United States Patent Application Publication US 2011/0183924 A1 - sequence listing, part 92

SEQ ID NO: 300429 - DNA, 4066 bp, Homo sapiens
cgccgtccctccctcgggctccggtcccctgggtgagccccagcgctggcggcgtgggcccgggactgggcaatgggtggcctcccaggtcgccgccttcccgcggggccccgcccccggcccgccccaaagcgggctataagttagcgccgctctccgcctcggcagtgccagccgccagtggtcgtggtcgcacttggagggtctcgccgccagtggaaggagccaccgcccccgcccgaccatggccgaggagctggtcttagagaggtgtgatctggagctggagaccaatggccgagaccaccacacggccgacctgtgccgggagaagctggtggtgcgacggggccagcccttctggctgaccctgcactttgagggccgcaactacgaggccagtgtagacagtctcaccttcagtgtcgtgaccggcccagcccctagccaggaggccgggaccaaggcccgttttccactaagagatgctgtggaggagggtgactggacagccaccgtggtggaccagcaagactgcaccctctcgctgcagctcaccaccccggccaacgcccccatcggcctgtatcgcctcagcctggaggcctccactggctaccagggatccagctttgtgctgggccacttcattttgctcttcaacgcctggtgcccagcggatgctgtgtacctggactcggaagaggagcggcaggagtatgtcctcacccagcagggctttatctaccagggctcggccaagttcatcaagaacataccttggaattttgggcagtttgaagatgggatcctagacatctgcctgatccttctagatgtcaaccccaagttcctgaagaacgccggccgtgactgctcccgccgcagcagccccgtctacgtgggccgggtggtgagtggcatggtcaactgcaacgatgaccagggtgtgctgctgggacgctgggacaacaactacggggacggcgtcagccccatgtcctggatcggcagcgtggacatcctgcggcgctggaagaaccacggctgccagcgcgtcaagtatggccagtgctgggtcttcgccgccgtggcctgcacagtgctgaggtgcctgggcatccctacccgcgtcgtgaccaactacaactcggcccatgaccagaacagcaaccttctcatcgagtacttccgcaatgagtttggggagatccagggtgacaagagcgagatgatctggaacttccactgctgggtggagtcgtggatgaccaggccggacctgcagccggggtacgagggctggcaggccctggacccaacgccccaggagaagagcgaagggacgtactgctgtggcccagttccagttcgtgccatcaaggagggcgacctgagcaccaagtacgatgcgccctttgtctttgcggaggtcaatgccgacgtggtagactggatccagcaggacgatgggtctgtgcacaaatccatcaaccgttccctgatcgttgggctgaagatcagcactaagagcgtgggccgagacgagcgggaggatatcacccacacctacaaatacccagaggggtcctcagaggagagggaggccttcacaagggcgaaccacctgaacaaactggccgagaaggaggagacagggatggccatgcggatccgtgtgggccagagcatgaacatgggcagtgactttgacgtctttgcccacatcaccaacaacaccgctgaggagtacgtctgccgcctcctgctctgtgcccgcaccgtcagctacaatgggatcttggggcccgagtgtggcaccaagtacctgctcaacctcaacctggagcctttctctgagaagagcgttcctctttgcatcctctatgagaaataccgtgactgccttacggagtccaacctcatcaaggtgcgggccctcctcgtggagccagttatcaacagctacctgctggctgagagggacctctacctggagaatccagaaatcaagatccggatccttggggagcccaagcagaaacgcaagctggtggctgaggtgtccctgcagaacccgctccctgtggccctggaaggctgcaccttcactgtggagggggccggcctgactgaggagcagaagacggtggagatcccagaccccgtggaggcaggggaggaagttaaggtgagaatggacctgctgccgctccacatgggcctccacaagctggtggtgaacttcgagagcgacaagctgaaggctgtgaagggcttccggaatgtcatcattggccccgcctaagggacccctgctcccagcctgctgagagcccccaccttgatcccaatccttatcccaagctagtgagcaaaatatgccccttcttgggccccagaccccagggcagggtgggcagcctatgggggctctcggaaatggaatgtgcccctggcccatctcagcctcctgagcctgtgggtccccactcaccccctttgctgtgaggaatgctctgtgccagaaacagtgggagccctgaccttggctgactggggctggggtgagagaggaaagacctacattccctctcctgcccagatgccctttggaaagccattgaccacccaccatattgtttgatctacttcatagctccttggagcaggcaaaaaagggacagcatgccccttggctggatcagggaatccagctccctagactgcatcccgtacctcttcccatgactgcacccagctccaggggcccttgggacagccagagctgggtggggacagtgataggcccaaggtcccctccacatcccagcagcccaagcttaatagccctccccctcaacctcaccattgtgaagcacctactatgtgctgggtgcctcccacacttgctggggctcacggggcctccaacccatttaatcaccatgggaaactgttgtgggcgctgcttccaggataaggagactgaggcttagagagaggaggcagccccctccacaccagtggcctcgtggttattagcaaggctgggtaatgtgaaggcccaagagcagagtctgggcctctgactctgagtccactgctccatttataaccccagcctgacctgagactgtcggagaggctgtctggggcctttatcaaaaaaagactcagccaagacaaggaggtagagaggggactgggggactgggagtcagagccctggctgggttcaggtcccacgtctggccaggcactgccttctcctctctgggcctttgtttccttgttggtcagaggagtgattgaaccagctcatctccaaggatcctctccactccatgtttgcaatgcttttatatggcccagccttgtaaataaccacaaggtccactccctgctccacgaagccttaagccataggcccaggatatttctgagagtgaaaccatgactgtgaccaccttctgtccccagccctgtcctggttccttcctatgcccaggtaccacccttcagaccccagttctaggggagaagagccctggacacccctgctctacccatgagcctgcccgctgcaatgcctagacttcccaacagccttagctgccagtgctggtcactaaccaacaaggttggcaccccagctaccccttctttgcagggctaaggcccccaaacatagcccctgccccggaggaagcttggggaacccatgagttgtcagctttgactttatctcctgctctttctacatgactgggcctcccttgggctggaagaattggggattctctattggaggtgagatcacagcctccagggccccccaaatcccagggaaggacttggagagaatcatgctgttgcatttagaactttctgctttgcacaggaaagagtcacacaattaatcaacatgtatattttctctatacatagagctctatttctctacggttttataaaagccttgggttccaaccaggcagtagatgtgcttctgaaccgcaaggagcaaacactgaaataaaatagtttatttttcacactcaaa

SEQ ID NO: 300430 - DNA, 3991 bp, Homo sapiens
gggctcacagtggatccggaagcacaggagaccaagagaccagagataccaggatgagagataggacccctggttgccaggttcgagaagtcctaggctgagtccctggaaatggtcgcacttggagggtctcgccgccagtggaaggagccaccgcccccgcccgaccatggccgaggagctggtcttagagaggtgtgatctggagctggagaccaatggccgagaccaccacacggccgacctgtgccgggagaagctggtggtgcgacggggccagcccttctggctgaccctgcactttgagggccgcaactacgaggccagtgtagacagtctcaccttcagtgtcgtgaccggcccagcccctagccaggaggccgggaccaaggcccgttttccactaagagatgctgtggaggagggtgactggacagccaccgtggtggaccagcaagactgcaccctctcgctgcagctcaccaccccggccaacgcccccatcggcctgtatcgcctcagcctggaggcctccactggctaccagggatccagctttgtgctgggccacttcattttgctcttcaacgcctggtgcccagcggatgctgtgtacctggactcggaagaggagcggcaggagtatgtcctcacccagcagggctttatctaccagggctcggccaagttcatcaagaacataccttggaattttgggcagtttgaagatgggatcctagacatctgcctgatccttctagatgtcaaccccaagttcctgaagaacgccggccgtgactgctcccgccgcagcagccccgtctacgtgggccgggtggtgagtggcatggtcaactgcaacgatgaccagggtgtgctgctgggacgctgggacaacaactacggggacggcgtcagccccatgtcctggatcggcagcgtggacatcctgcggcgctggaagaaccacggctgccagcgcgtcaagtatggccagtgctgggtcttcgccgccgtggcctgcacagtgctgaggtgcctgggcatccctacccgcgtcgtgaccaactacaactcggcccatgaccagaacagcaaccttctcatcgagtacttccgcaatgagtttggggagatccagggtgacaagagcgagatgatctggaacttccactgctgggtggagtcgtggatgaccaggccggacctgcagccggggtacgagggctggcaggccctggacccaacgccccaggagaagagcgaagggacgtactgctgtggcccagttccagttcgtgccatcaaggagggcgacctgagcaccaagtacgatgcgccctttgtctttgcggaggtcaatgccgacgtggtagactggatccagcaggacgatgggtctgtgcacaaatccatcaaccgttccctgatcgttgggctgaagatcagcactaagagcgtgggccgagacgagcgggaggatatcacccacacctacaaatacccagaggggtcctcagaggagagggaggccttcacaagggcgaaccacctgaacaaactggccgagaaggaggagacagggatggccatgcggatccgtgtgggccagagcatgaacatgggcagtgactttgacgtctttgcccacatcaccaacaacaccgctgaggagtacgtctgccgcctcctgctctgtgcccgcaccgtcagctacaatgggatcttggggcccgagtgtggcaccaagtacctgctcaacctcaacctggagcctttctctgagaagagcgttcctctttgcatcctctatgagaaataccgtgactgccttacggagtccaacctcatcaaggtgcgggccctcctcgtggagccagttatcaacagctacctgctggctgagagggacctctacctggagaatccagaaatcaagatccggatccttggggagcccaagcagaaacgcaagctggtggctgaggtgtccctgcagaacccgctccctgtggccctggaaggctgcaccttcactgtggagggggccggcctgactgaggagcagaagacggtggagatcccagaccccgtggaggcaggggaggaagttaaggtgagaatggacctgctgccgctccacatgggcctccacaagctggtggtgaacttcgagagcgacaagctgaaggctgtgaagggcttccggaatgtcatcattggccccgcctaagggacccctgctcccagcctgctgagagcccccaccttgatcccaatccttatcccaagctagtgagcaaaatatgccccttcttgggccccagaccccagggcagggtgggcagcctatgggggctctcggaaatggaatgtgcccctggcccatctcagcctcctgagcctgtgggtccccactcaccccctttgctgtgaggaatgctctgtgccagaaacagtgggagccctgaccttggctgactggggctggggtgagagaggaaagacctacattccctctcctgcccagatgccctttggaaagccattgaccacccaccatattgtttgatctacttcatagctccttggagcaggcaaaaaagggacagcatgccccttggctggatcagggaatccagctccctagactgcatcccgtacctcttcccatgactgcacccagctccaggggcccttgggacagccagagctgggtggggacagtgataggcccaaggtcccctccacatcccagcagcccaagcttaatagccctccccctcaacctcaccattgtgaagcacctactatgtgctgggtgcctcccacacttgctggggctcacggggcctccaacccatttaatcaccatgggaaactgttgtgggcgctgcttccaggataaggagactgaggcttagagagaggaggcagccccctccacaccagtggcctcgtggttattagcaaggctgggtaatgtgaaggcccaagagcagagtctgggcctctgactctgagtccactgctccatttataaccccagcctgacctgagactgtcggagaggctgtctggggcctttatcaaaaaaagactcagccaagacaaggaggtagagaggggactgggggactgggagtcagagccctggctgggttcaggtcccacgtctggccaggcactgccttctcctctctgggcctttgtttccttgttggtcagaggagtgattgaaccagctcatctccaaggatcctctccactccatgtttgcaatgcttttatatggcccagccttgtaaataaccacaaggtccactccctgctccacgaagccttaagccataggcccaggatatttctgagagtgaaaccatgactgtgaccaccttctgtccccagccctgtcctggttccttcctatgcccaggtaccacccttcagaccccagttctaggggagaagagccctggacacccctgctctacccatgagcctgcccgctgcaatgcctagacttcccaacagccttagctgccagtgctggtcactaaccaacaaggttggcaccccagctaccccttctttgcagggctaaggcccccaaacatagcccctgccccggaggaagcttggggaacccatgagttgtcagctttgactttatctcctgctctttctacatgactgggcctcccttgggctggaagaattggggattctctattggaggtgagatcacagcctccagggccccccaaatcccagggaaggacttggagagaatcatgctgttgcatttagaactttctgctttgcacaggaaagagtcacacaattaatcaacatgtatattttctctatacatagagctctatttctctacggttttataaaagccttgggttccaaccaggcagtagatgtgcttctgaaccgcaaggagcaaacactgaaataaaatagtttatttttcacactcaaa

SEQ ID NO: 300431 - DNA, 4295 bp, Homo sapiens
aacaggcgtgacgccagttctaaatcttgaaacaaaacaaaacttcaaagtacaccaaaatagaacctccttaaagcataaatctcacggagtggtcgcacttggagggtctcgccgccagtggaaggagccaccgcccccgcccgaccatggccgaggagctggtcttagagaggtgtgatctggagctggagaccaatggccgagaccaccacacggccgacctgtgccgggagaagctggtggtgcgacggggccagcccttctggctgaccctgcactttgagggccgcaactacgaggccagtgtagacagtctcaccttcagtgtcgtgaccgaaagtgaccagcccctcctcgccctgcccatgactcagacctgcctgtgggggcgggccctcccctccacctggaaaagcagctgctttgagagtgtgcccatcactgtgcctttgagaacccggctggggagtgtcctctttgggaagaagaggcaccgtagaagacaactgagagctaaagacccacttcagatgcgacctttgccacaaactcctaggatatccttgggagaccgctttgctctgagcctcagttttctcacctgggcaaggggtctcaaaggaagcaggtgcttcatgaagtgtaaaaggctgtaggaaggcccagcccctagccaggaggccgggaccaaggcccgttttccactaagagatgctgtggaggagggtgactggacagccaccgtggtggaccagcaagactgcaccctctcgctgcagctcaccaccccggccaacgcccccatcggcctgtatcgcctcagcctggaggcctccactggctaccagggatccagctttgtgctgggccacttcattttgctcttcaacgcctggtgcccagcggatgctgtgtacctggactcggaagaggagcggcaggagtatgtcctcacccagcagggctttatctaccagggctcggccaagttcatcaagaacataccttggaattttgggcagtttgaagatgggatcctagacatctgcctgatccttctagatgtcaaccccaagttcctgaagaacgccggccgtgactgctcccgccgcagcagccccgtctacgtgggccgggtggtgagtggcatggtcaactgcaacgatgaccagggtgtgctgctgggacgctgggacaacaactacggggacggcgtcagccccatgtcctggatcggcagcgtggacatcctgcggcgctggaagaaccacggctgccagcgcgtcaagtatggccagtgctgggtcttcgccgccgtggcctgcacagtgctgaggtgcctgggcatccctacccgcgtcgtgaccaactacaactcggcccatgaccagaacagcaaccttctcatcgagtacttccgcaatgagtttggggagatccagggtgacaagagcgagatgatctggaacttccactgctgggtggagtcgtggatgaccaggccggacctgcagccggggtacgagggctggcaggccctggacccaacgccccaggagaagagcgaagggacgtactgctgtggcccagttccagttcgtgccatcaaggagggcgacctgagcaccaagtacgatgcgccctttgtctttgcggaggtcaatgccgacgtggtagactggatccagcaggacgatgggtctgtgcacaaatccatcaaccgttccctgatcgttgggctgaagatcagcactaagagcgtgggccgagacgagcgggaggatatcacccacacctacaaatacccagaggggtcctcagaggagagggaggccttcacaagggcgaaccacctgaacaaactggccgagaaggaggagacagggatggccatgcggatccgtgtgggccagagcatgaacatgggcagtgactttgacgtctttgcccacatcaccaacaacaccgctgaggagtacgtctgccgcctcctgctctgtgcccgcaccgtcagctacaatgggatcttggggcccgagtgtggcaccaagtacctgctcaacctcaacctggagcctttctctgagaagagcgttcctctttgcatcctctatgagaaataccgtgactgccttacggagtccaacctcatcaaggtgcgggccctcctcgtggagccagttatcaacagctacctgctggctgagagggacctctacctggagaatccagaaatcaagatccggatccttggggagcccaagcagaaacgcaagctggtggctgaggtgtccctgcagaacccgctccctgtggccctggaaggctgcaccttcactgtggagggggccggcctgactgaggagcagaagacggtggagatcccagaccccgtggaggcaggggaggaagttaaggtgagaatggacctgctgccgctccacatgggcctccacaagctggtggtgaacttcgagagcgacaagctgaaggctgtgaagggcttccggaatgtcatcattggccccgcctaagggacccctgctcccagcctgctgagagcccccaccttgatcccaatccttatcccaagctagtgagcaaaatatgccccttcttgggccccagaccccagggcagggtgggcagcctatgggggctctcggaaatggaatgtgcccctggcccatctcagcctcctgagcctgtgggtccccactcaccccctttgctgtgaggaatgctctgtgccagaaacagtgggagccctgaccttggctgactggggctggggtgagagaggaaagacctacattccctctcctgcccagatgccctttggaaagccattgaccacccaccatattgtttgatctacttcatagctccttggagcaggcaaaaaagggacagcatgccccttggctggatcagggaatccagctccctagactgcatcccgtacctcttcccatgactgcacccagctccaggggcccttgggacagccagagctgggtggggacagtgataggcccaaggtcccctccacatcccagcagcccaagcttaatagccctccccctcaacctcaccattgtgaagcacctactatgtgctgggtgcctcccacacttgctggggctcacggggcctccaacccatttaatcaccatgggaaactgttgtgggcgctgcttccaggataaggagactgaggcttagagagaggaggcagccccctccacaccagtggcctcgtggttattagcaaggctgggtaatgtgaaggcccaagagcagagtctgggcctctgactctgagtccactgctccatttataaccccagcctgacctgagactgtcggagaggctgtctggggcctttatcaaaaaaagactcagccaagacaaggaggtagagaggggactgggggactgggagtcagagccctggctgggttcaggtcccacgtctggccaggcactgccttctcctctctgggcctttgtttccttgttggtcagaggagtgattgaaccagctcatctccaaggatcctctccactccatgtttgcaatgcttttatatggcccagccttgtaaataaccacaaggtccactccctgctccacgaagccttaagccataggcccaggatatttctgagagtgaaaccatgactgtgaccaccttctgtccccagccctgtcctggttccttcctatgcccaggtaccacccttcagaccccagttctaggggagaagagccctggacacccctgctctacccatgagcctgcccgctgcaatgcctagacttcccaacagccttagctgccagtgctggtcactaaccaacaaggttggcaccccagctaccccttctttgcagggctaaggcccccaaacatagcccctgccccggaggaagcttggggaacccatgagttgtcagctttgactttatctcctgctctttctacatgactgggcctcccttgggctggaagaattggggattctctattggaggtgagatcacagcctccagggccccccaaatcccagggaaggacttggagagaatcatgctgttgcatttagaactttctgctttgcacaggaaagagtcacacaattaatcaacatgtatattttctctatacatagagctctatttctctacggttttataaaagccttgggttccaaccaggcagtagatgtgcttctgaaccgcaaggagcaaacactgaaataaaatagtttatttttcacactcaaa

SEQ ID NO: 300432 - DNA, 3547 bp, Homo sapiens
gttgtggtgtggtgttctagaggatcccgagaggtgggacacgggtagggatgccaggcacctcagcactgtgcaggccacggcggcgaagacccagcactggccatacttgacgcgctggcagaagtggttcttccagcgccgcaggatgtccacgctgccgatccaggacatggggctgacgccgtccccgtagttgtatgtcctcacccagcagggctttatctaccagggctcggccaagttcatcaagaacataccttggaattttgggcagtttgaagatgggatcctagacatctgcctgatccttctagatgtcaaccccaagttcctgaagaacgccggccgtgactgctcccgccgcagcagccccgtctacgtgggccgggtggtgagtggcatggtcaactgcaacgatgaccagggtgtgctgctgggacgctgggacaacaactacggggacggcgtcagccccatgtcctggatcggcagcgtggacatcctgcggcgctggaagaaccacggctgccagcgcgtcaagtatggccagtgctgggtcttcgccgccgtggcctgcacagtgctgaggtgcctgggcatccctacccgcgtcgtgaccaactacaactcggcccatgaccagaacagcaaccttctcatcgagtacttccgcaatgagtttggggagatccagggtgacaagagcgagatgatctggaacttccactgctgggtggagtcgtggatgaccaggccggacctgcagccggggtacgagggctggcaggccctggacccaacgccccaggagaagagcgaagggacgtactgctgtggcccagttccagttcgtgccatcaaggagggcgacctgagcaccaagtacgatgcgccctttgtctttgcggaggtcaatgccgacgtggtagactggatccagcaggacgatgggtctgtgcacaaatccatcaaccgttccctgatcgttgggctgaagatcagcactaagagcgtgggccgagacgagcgggaggatatcacccacacctacaaatacccagaggggtcctcagaggagagggaggccttcacaagggcgaaccacctgaacaaactggccgagaaggaggagacagggatggccatgcggatccgtgtgggccagagcatgaacatgggcagtgactttgacgtctttgcccacatcaccaacaacaccgctgaggagtacgtctgccgcctcctgctctgtgcccgcaccgtcagctacaatgggatcttggggcccgagtgtggcaccaagtacctgctcaacctcaacctggagcctttctctgagaagagcgttcctctttgcatcctctatgagaaataccgtgactgccttacggagtccaacctcatcaaggtgcgggccctcctcgtggagccagttatcaacagctacctgctggctgagagggacctctacctggagaatccagaaatcaagatccggatccttggggagcccaagcagaaacgcaagctggtggctgaggtgtccctgcagaacccgctccctgtggccctggaaggctgcaccttcactgtggagggggccggcctgactgaggagcagaagacggtggagatcccagaccccgtggaggcaggggaggaagttaaggtgagaatggacctgctgccgctccacatgggcctccacaagctggtggtgaacttcgagagcgacaagctgaaggctgtgaagggcttccggaatgtcatcattggccccgcctaagggacccctgctcccagcctgctgagagcccccaccttgatcccaatccttatcccaagctagtgagcaaaatatgccccttcttgggccccagaccccagggcagggtgggcagcctatgggggctctcggaaatggaatgtgcccctggcccatctcagcctcctgagcctgtgggtccccactcaccccctttgctgtgaggaatgctctgtgccagaaacagtgggagccctgaccttggctgactggggctggggtgagagaggaaagacctacattccctctcctgcccagatgccctttggaaagccattgaccacccaccatattgtttgatctacttcatagctccttggagcaggcaaaaaagggacagcatgccccttggctggatcagggaatccagctccctagactgcatcccgtacctcttcccatgactgcacccagctccaggggcccttgggacagccagagctgggtggggacagtgataggcccaaggtcccctccacatcccagcagcccaagcttaatagccctccccctcaacctcaccattgtgaagcacctactatgtgctgggtgcctcccacacttgctggggctcacggggcctccaacccatttaatcaccatgggaaactgttgtgggcgctgcttccaggataaggagactgaggcttagagagaggaggcagccccctccacaccagtggcctcgtggttattagcaaggctgggtaatgtgaaggcccaagagcagagtctgggcctctgactctgagtccactgctccatttataaccccagcctgacctgagactgtcggagaggctgtctggggcctttatcaaaaaaagactcagccaagacaaggaggtagagaggggactgggggactgggagtcagagccctggctgggttcaggtcccacgtctggccaggcactgccttctcctctctgggcctttgtttccttgttggtcagaggagtgattgaaccagctcatctccaaggatcctctccactccatgtttgcaatgcttttatatggcccagccttgtaaataaccacaaggtccactccctgctccacgaagccttaagccataggcccaggatatttctgagagtgaaaccatgactgtgaccaccttctgtccccagccctgtcctggttccttcctatgcccaggtaccacccttcagaccccagttctaggggagaagagccctggacacccctgctctacccatgagcctgcccgctgcaatgcctagacttcccaacagccttagctgccagtgctggtcactaaccaacaaggttggcaccccagctaccccttctttgcagggctaaggcccccaaacatagcccctgccccggaggaagcttggggaacccatgagttgtcagctttgactttatctcctgctctttctacatgactgggcctcccttgggctggaagaattggggattctctattggaggtgagatcacagcctccagggccccccaaatcccagggaaggacttggagagaatcatgctgttgcatttagaactttctgctttgcacaggaaagagtcacacaattaatcaacatgtatattttctctatacatagagctctatttctctacggttttataaaagccttgggttccaaccaggcagtagatgtgcttctgaaccgcaaggagcaaacactgaaataaaatagtttatttttcacactcaaa

SEQ ID NO: 300433 - DNA, 3787 bp, Homo sapiens
aacaggcgtgacgccagttctaaatcttgaaacaaaacaaaacttcaaagtacaccaaaatagaacctccttaaagcataaatctcacggagtggtcgcacttggagggtctcgccgccagtggaaggagccaccgcccccgcccgaccatggccgaggagctggtcttagagaggtgtgatctggagctggagaccaatggccgagaccaccacacggccgacctgtgccgggagaagctggtggtgcgacggggccagcccttctggctgaccctgcactttgagggccgcaactacgaggccagtgtagacagtctcaccttcagtgtcgtgaccggcccagcccctagccaggaggccgggaccaaggcccgttttccactaagagatgctgtggaggagggtgactggacagccaccgtggtggaccagcaagactgcaccctctcgctgcagctcaccaccccggccaacgcccccatcggcctgtatcgcctcagcctggaggcctccactggctaccagggatccagctttgtgctgggccacttcattttgctcttcaacgcctggtgcccagcggatgctgtgtacctggactcggaagaggagcggcaggagtatgtcctcacccagcagggctttatctaccagggctcggccaagttcatcaagaacataccttggaattttgggcagtttgaagatgggatcctagacatctgcctgatccttctagatgtcaaccccaagttcctgaagaacgccggccgtgactgctcccgccgcagcagccccgtctacgtgggccgggtggtgagtggcatggtcaactgcaacgatgaccagggtgtgctgctgggacgctgggacaacaactacggggacggcgtcagccccatgtcctggatcggcagcgtggacatcctgcggcgctggaagaaccacggctgccagcgcgtcaagtatggccagtgctgggtcttcgccgccgtggcctgcacagtgctgaggtgcctgggcatccctacccgcgtcgtgaccaactacaactcggcccatgaccagaacagcaaccttctcatcgagtacttccgcaatgagtttggggagatccagggtgacaagagcgagatgatctggaacttccactgctgggtggagtcgtggatgaccaggccggacctgcagccggggtacgagggctggcaggccctggacccaacgccccaggagaagagcgaagggacgtactgctgtggcccagttccagttcgtgccatcaaggagggcgacctgagcaccaagtacgatgcgccctttgtctttgcggaggtcaatgccgacgtggtagactggatccagcaggacgatgggtctgtgcacaaatccatcaaccgttccctgatcgttgggctgaagatcagcactaagagcgtgggccgagacgagcgggaggatatcacccacacctacaaatacccagaggggtcctcagaggagagggaggccttcacaagggcgaaccacctgaacaaactggccgagaaggaggagacagggatggccatgcggatccgtgtgggccagagcatgaacatgggcagtgactttgacgtctttgcccacatcaccaacaacaccgctgaggagtacgtctgccgcctcctgctctgtgcccgcaccgtcagctacaatgggatcttggggcccgagtgtggcaccaagtacctgctcaacctcaacctggagcctttctctgagaagagcgttcctctttgcatcctctatgagaaataccgtgactgccttacggagtccaacctcatcaaggtgcgggccctcctcgtggagccagttatcaacagctacctgctggctgagagggacctctacctggagaatccagaaatcaagatccggatccttggggagcccaagcagaaacgcaactggtggtgaacttcgagagcgacaagctgaaggctgtgaagggcttccggaatgtcatcattggccccgcctaagggacccctgctcccagcctgctgagagcccccaccttgatcccaatccttatcccaagctagtgagcaaaatatgccccttcttgggccccagaccccagggcagggtgggcagcctatgggggctctcggaaatggaatgtgcccctggcccatctcagcctcctgagcctgtgggtccccactcaccccctttgctgtgaggaatgctctgtgccagaaacagtgggagccctgaccttggctgactggggctggggtgagagaggaaagacctacattccctctcctgcccagatgccctttggaaagccattgaccacccaccatattgtttgatctacttcatagctccttggagcaggcaaaaaagggacagcatgccccttggctggatcagggaatccagctccctagactgcatcccgtacctcttcccatgactgcacccagctccaggggcccttgggacagccagagctgggtggggacagtgataggcccaaggtcccctccacatcccagcagcccaagcttaatagccctccccctcaacctcaccattgtgaagcacctactatgtgctgggtgcctcccacacttgctggggctcacggggcctccaacccatttaatcaccatgggaaactgttgtgggcgctgcttccaggataaggagactgaggcttagagagaggaggcagccccctccacaccagtggcctcgtggttattagcaaggctgggtaatgtgaaggcccaagagcagagtctgggcctctgactctgagtccactgctccatttataaccccagcctgacctgagactgtcggagaggctgtctggggcctttatcaaaaaaagactcagccaagacaaggaggtagagaggggactgggggactgggagtcagagccctggctgggttcaggtcccacgtctggccaggcactgccttctcctctctgggcctttgtttccttgttggtcagaggagtgattgaaccagctcatctccaaggatcctctccactccatgtttgcaatgcttttatatggcccagccttgtaaataaccacaaggtccactccctgctccacgaagccttaagccataggcccaggatatttctgagagtgaaaccatgactgtgaccaccttctgtccccagccctgtcctggttccttcctatgcccaggtaccacccttcagaccccagttctaggggagaagagccctggacacccctgctctacccatgagcctgcccgctgcaatgcctagacttcccaacagccttagctgccagtgctggtcactaaccaacaaggttggcaccccagctaccccttctttgcagggctaaggcccccaaacatagcccctgccccggaggaagcttggggaacccatgagttgtcagctttgactttatctcctgctctttctacatgactgggcctcccttgggctggaagaattggggattctctattggaggtgagatcacagcctccagggccccccaaatcccagggaaggacttggagagaatcatgctgttgcatttagaactttctgctttgcacaggaaagagtcacacaattaatcaacatgtatattttctctatacatagagctctatttctctacggttttataaaagccttgggttccaaccaggcagtagatgtgcttctgaaccgcaaggagcaaacactgaaataaaatagtttatttttcacactcaaa

SEQ ID NO: 300434 - DNA, 4109 bp, Homo sapiens
aacaggcgtgacgccagttctaaatcttgaaacaaaacaaaacttcaaagtacaccaaaatagaacctccttaaagcataaatctcacggagtggtcgcacttggagggtctcgccgccagtggaaggagccaccgcccccgcccgaccatggccgaggagctggtcttagagaggtgtgatctggagctggagaccaatggccgagaccaccacacggccgacctgtgccgggagaagctggtggtgcgacggggccagcccttctggctgaccctgcactttgagggccgcaactacgaggccagtgtagacagtctcaccttcagtgtcgtgaccggcccagcccctagccaggaggccgggaccaaggcccgttttccactaagagatgctgtggaggagggtgactggacagccaccgtggtggaccagcaagactgcaccctctcgctgcagctcaccaccccggccaacgcccccatcggcctgtatcgcctcagcctggaggcctccactggctaccagggatccagctttgtgctgggccacttcattttgctcttcaacgcctggtgcccagcggatgctgtgtacctggactcggaagaggagcggcaggagtatgtcctcacccagcagggctttatctaccagggctcggccaagttcatcaagaacataccttggaattttgggcagtttgaagatgggatcctagacatctgcctgatccttctagatgtcaaccccaagttcctgaagaacgccggccgtgactgctcccgccgcagcagccccgtctacgtgggccgggtggtgagtggcatggtcaactgcaacgatgaccagggtgtgctgctgggacgctgggacaacaactacggggacggcgtcagccccatgtcctggatcggcagcgtggacatcctgcggcgctggaagaaccacggctgccagcgcgtcaagtatggccagtgctgggtcttcgccgccgtggcctgcacagtgctgaggtgcctgggcatccctacccgcgtcgtgaccaactacaactcggcccatgaccagaacagcaaccttctcatcgagtacttccgcaatgagtttggggagatccagggtgacaagagcgagatgatctggaacttccactgctgggtggagtcgtggatgaccaggccggacctgcagccggggtacgagggctggcaggccctggacccaacgccccaggagaagagcgaagggacgtactgctgtggcccagttccagttcgtgccatcaaggagggcgacctgagcaccaagtacgatgcgccctttgtctttgcggaggtcaatgccgacgtggtagactggatccagcaggacgatgggtctgtgcacaaatccatcaaccgttccctgatcgttgggctgaagatcagcactaagagcgtgggccgagacgagcgggaggatatcacccacacctacaaatacccagaggggtcctcagaggagagggaggccttcacaagggcgaaccacctgaacaaactggccgagaaggaggagacagggatggccatgcggatccgtgtgggccagagcatgaacatgggcagtgactttgacgtctttgcccacatcaccaacaacaccgctgaggagtacgtctgccgcctcctgctctgtgcccgcaccgtcagctacaatgggatcttggggcccgagtgtggcaccaagtacctgctcaacctcaacctggagcctttctctgagaagagcgttcctctttgcatcctctatgagaaataccgtgactgccttacggagtccaacctcatcaaggtgcgggccctcctcgtggagccagttatcaacagctacctgctggctgagagggacctctacctggagaatccagaaatcaagatccggatccttggggagcccaagcagaaacgcaagctggtggctgaggtgtccctgcagaacccgctccctgtggccctggaaggctgcaccttcactgtggagggggccggcctgactgaggagcagaagacggtggagatcccagaccccgtggaggcaggggaggaagttaaggtgagaatggacctgctgccgctccacatgggcctccacaagctggtggtgaacttcgagagcgacaagctgaaggctgtgaagggcttccggaatgtcatcattggccccgcctaagggacccctgctcccagcctgctgagagcccccaccttgatcccaatccttatcccaagctagtgagcaaaatatgccccttcttgggccccagaccccagggcagggtgggcagcctatgggggctctcggaaatggaatgtgcccctggcccatctcagcctcctgagcctgtgggtccccactcaccccctttgctgtgaggaatgctctgtgccagaaacagtgggagccctgaccttggctgactggggctggggtgagagaggaaagacctacattccctctcctgcccagatgccctttggaaagccattgaccacccaccatattgtttgatctacttcatagctccttggagcaggcaaaaaagggacagcatgccccttggctggatcagggaatccagctccctagactgcatcccgtacctcttcccatgactgcacccagctccaggggcccttgggacagccagagctgggtggggacagtgataggcccaaggtcccctccacatcccagcagcccaagcttaatagccctccccctcaacctcaccattgtgaagcacctactatgtgctgggtgcctcccacacttgctggggctcacggggcctccaacccatttaatcaccatgggaaactgttgtgggcgctgcttccaggataaggagactgaggcttagagagaggaggcagccccctccacaccagtggcctcgtggttattagcaaggctgggtaatgtgaaggcccaagagcagagtctgggcctctgactctgagtccactgctccatttataaccccagcctgacctgagactgtcggagaggctgtctggggcctttatcaaaaaaagactcagccaagacaaggaggtagagaggggactgggggactgggagtcagagccctggctgggttcaggtcccacgtctggccaggcactgccttctcctctctgggcctttgtttccttgttggtcagaggagtgattgaaccagctcatctccaaggatcctctccactccatgtttgcaatgcttttatatggcccagccttgtaaataaccacaaggtccactccctgctccacgaagccttaagccataggcccaggatatttctgagagtgaaaccatgactgtgaccaccttctgtccccagccctgtcctggttccttcctatgcccaggtaccacccttcagaccccagttctaggggagaagagccctggacacccctgctctacccatgagcctgcccgctgcaatgcctagacttcccaacagccttagctgccagtgctggtcactaaccaacaaggttggcaccccagctaccccttctttgcagggctaaggcccccaaacatagcccctgccccggaggaagcttggggaacccatgagttgtcagctttgactttatctcctgctctttctacatgactgggcctcccttgggctggaagaattggggattctctattggaggtgagatcacagcctccagggccccccaaatcccagggaaggacttggagagaatcatgctgttgcatttagaactttctgctttgcacaggaaagagtcacacaattaatcaacatgtatattttctctatacatagagctctatttctctacggttttataaaagccttgggttccaaccaggcagtagatgtgcttctgaaccgcaaggagcaaacactgaaataaaatagtttatttttcacactcaaaaaaacacaactaacccgcacacacaacaaccaccaacaacacaaccccacagggacccacacagcgcggggcgcgaacaagccgcactcaaggccgcctgtgccacgggtaccggcccccctcttgcaccccgggcgc

SEQ ID NO: 300435 - DNA, 2768 bp, Homo sapiens
tagagaggctgatgcctgtaccgacgccccaggagaagagcgaagggacgtactgctgtggcccagttccagttcgtgccatcaaggagggcgacctgagcaccaagtacgatgcgccctttgtctttgcggaggtcaatgccgacgtggtagactggatccagcaggacgatgggtctgtgcacaaatccatcaaccgttccctgatcgttgggctgaagatcagcactaagagcgtgggccgagacgagcgggaggatatcacccacacctacaaatacccagaggggtcctcagaggagagggaggccttcacaagggcgaaccacctgaacaaactggccgagaaggaggagacagggatggccatgcggatccgtgtgggccagagcatgaacatgggcagtgactttgacgtctttgcccacatcaccaacaacaccgctgaggagtacgtctgccgcctcctgctctgtgcccgcaccgtcagctacaatgggatcttggggcccgagtgtggcaccaagtacctgctcaacctcaacctggagcctttctctgagaagagcgttcctctttgcatcctctatgagaaataccgtgactgccttacggagtccaacctcatcaaggtgcgggccctcctcgtggagccagttatcaacagctacctgctggctgagagggacctctacctggagaatccagaaatcaagatccggatccttggggagcccaagcagaaacgcaagctggtggctgaggtgtccctgcagaacccgctccctgtggccctggaaggctgcaccttcactgtggagggggccggcctgactgaggagcagaagacggtggagatcccagaccccgtggaggcaggggaggaagttaaggtgagaatggacctgctgccgctccacatgggcctccacaagctggtggtgaacttcgagagcgacaagctgaaggctgtgaagggcttccggaatgtcatcattggccccgcctaagggacccctgctcccagcctgctgagagcccccaccttgatcccaatccttatcccaagctagtgagcaaaatatgccccttcttgggccccagaccccagggcagggtgggcagcctatgggggctctcggaaatggaatgtgcccctggcccatctcagcctcctgagcctgtgggtccccactcaccccctttgctgtgaggaatgctctgtgccagaaacagtgggagccctgaccttggctgactggggctggggtgagagaggaaagacctacattccctctcctgcccagatgccctttggaaagccattgaccacccaccatattgtttgatctacttcatagctccttggagcaggcaaaaaagggacagcatgccccttggctggatcagggaatccagctccctagactgcatcccgtacctcttcccatgactgcacccagctccaggggcccttgggacagccagagctgggtggggacagtgataggcccaaggtcccctccacatcccagcagcccaagcttaatagccctccccctcaacctcaccattgtgaagcacctactatgtgctgggtgcctcccacacttgctggggctcacggggcctccaacccatttaatcaccatgggaaactgttgtgggcgctgcttccaggataaggagactgaggcttagagagaggaggcagccccctccacaccagtggcctcgtggttattagcaaggctgggtaatgtgaaggcccaagagcagagtctgggcctctgactctgagtccactgctccatttataaccccagcctgacctgagactgtcggagaggctgtctggggcctttatcaaaaaaagactcagccaagacaaggaggtagagaggggactgggggactgggagtcagagccctggctgggttcaggtcccacgtctggccaggcactgccttctcctctctgggcctttgtttccttgttggtcagaggagtgattgaaccagctcatctccaaggatcctctccactccatgtttgcaatgcttttatatggcccagccttgtaaataaccacaaggtccactccctgctccacgaagccttaagccataggcccaggatatttctgagagtgaaaccatgactgtgaccaccttctgtccccagccctgtcctggttccttcctatgcccaggtaccacccttcagaccccagttctaggggagaagagccctggacacccctgctctacccatgagcctgcccgctgcaatgcctagacttcccaacagccttagctgccagtgctggtcactaaccaacaaggttggcaccccagctaccccttctttgcagggctaaggcccccaaacatagcccctgccccggaggaagcttggggaacccatgagttgtcagctttgactttatctcctgctctttctacatgactgggcctcccttgggctggaagaattggggattctctattggaggtgagatcacagcctccagggccccccaaatcccagggaaggacttggagagaatcatgctgttgcatttagaactttctgctttgcacaggaaagagtcacacaattaatcaacatgtatattttctctatacatagagctctatttctctacggttttataaaagccttgggttccaaccaggcagtagatgtgcttctgaaccgcaaggagcaaacactgaaataaaatagtttatttttcacactcaaa

SEQ ID NO: 300436 - DNA, 2791 bp, Homo sapiens
gacatcatcacgttcgcagtgtgtctcctccttgatcgggcgcccctcgctccaggagaagagcgaagggacgtactgctgtggcccagttccagttcgtgccatcaaggagggcgacctgagcaccaagtacgatgcgccctttgtctttgcggaggtcaatgccgacgtggtagactggatccagcaggacgatgggtctgtgcacaaatccatcaaccgttccctgatcgttgggctgaagatcagcactaagagcgtgggccgagacgagcgggaggatatcacccacacctacaaatacccagaggggtcctcagaggagagggaggccttcacaagggcgaaccacctgaacaaactggccgagaaggaggagacagggatggccatgcggatccgtgtgggccagagcatgaacatgggcagtgactttgacgtctttgcccacatcaccaacaacaccgctgaggagtacgtctgccgcctcctgctctgtgcccgcaccgtcagctacaatgggatcttggggcccgagtgtggcaccaagtacctgctcaacctcaacctggagcctttctctgagaagagcgttcctctttgcatcctctatgagaaataccgtgactgccttacggagtccaacctcatcaaggtgcgggccctcctcgtggagccagttatcaacagctacctgctggctgagagggacctctacctggagaatccagaaatcaagatccggatccttggggagcccaagcagaaacgcaagctggtggctgaggtgtccctgcagaacccgctccctgtggccctggaaggctgcaccttcactgtggagggggccggcctgactgaggagcagaagacggtggagatcccagaccccgtggaggcaggggaggaagttaaggtgagaatggacctgctgccgctccacatgggcctccacaagctggtggtgaacttcgagagcgacaagctgaaggctgtgaagggcttccggaatgtcatcattggccccgcctaagggacccctgctcccagcctgctgagagcccccaccttgatcccaatccttatcccaagctagtgagcaaaatatgccccttcttgggccccagaccccagggcagggtgggcagcctatgggggctctcggaaatggaatgtgcccctggcccatctcagcctcctgagcctgtgggtccccactcaccccctttgctgtgaggaatgctctgtgccagaaacagtgggagccctgaccttggctgactggggctggggtgagagaggaaagacctacattccctctcctgcccagatgccctttggaaagccattgaccacccaccatattgtttgatctacttcatagctccttggagcaggcaaaaaagggacagcatgccccttggctggatcagggaatccagctccctagactgcatcccgtacctcttcccatgactgcacccagctccaggggcccttgggacagccagagctgggtggggacagtgataggcccaaggtcccctccacatcccagcagcccaagcttaatagccctccccctcaacctcaccattgtgaagcacctactatgtgctgggtgcctcccacacttgctggggctcacggggcctccaacccatttaatcaccatgggaaactgttgtgggcgctgcttccaggataaggagactgaggcttagagagaggaggcagccccctccacaccagtggcctcgtggttattagcaaggctgggtaatgtgaaggcccaagagcagagtctgggcctctgactctgagtccactgctccatttataaccccagcctgacctgagactgtcggagaggctgtctggggcctttatcaaaaaaagactcagccaagacaaggaggtagagaggggactgggggactgggagtcagagccctggctgggttcaggtcccacgtctggccaggcactgccttctcctctctgggcctttgtttccttgttggtcagaggagtgattgaaccagctcatctccaaggatcctctccactccatgtttgcaatgcttttatatggcccagccttgtaaataaccacaaggtccactccctgctccacgaagccttaagccataggcccaggatatttctgagagtgaaaccatgactgtgaccaccttctgtccccagccctgtcctggttccttcctatgcccaggtaccacccttcagaccccagttctaggggagaagagccctggacacccctgctctacccatgagcctgcccgctgcaatgcctagacttcccaacagccttagctgccagtgctggtcactaaccaacaaggttggcaccccagctaccccttctttgcagggctaaggcccccaaacatagcccctgccccggaggaagcttggggaacccatgagttgtcagctttgactttatctcctgctctttctacatgactgggcctcccttgggctggaagaattggggattctctattggaggtgagatcacagcctccagggccccccaaatcccagggaaggacttggagagaatcatgctgttgcatttagaactttctgctttgcacaggaaagagtcacacaattaatcaacatgtatattttctctatacatagagctctatttctctacggttttataaaagccttgggttccaaccaggcagtagatgtgcttctgaaccgcaaggagcaaacactgaaataaaatagtttatttttcacactcaaa

SEQ ID NO: 300437 - DNA, 3620 bp, Homo sapiens
ctatggtcatttcctgcttttgcaattgaagaaagtgctatggtgaaaacaaagatacccttttttccccatcatagggttcatagacccctgaattctgttggtagtgccttggggggatccgtgggccctggtttaagacctccagcggcatggaacattttttcccagctctgtccacttctggataaagcattggcatttctccagcagatagttttctgtgatttgaatttttatttaatgtgaccgtggtccatcacatggatgtgctagactgtatctatccagcctctagtcctcagcattggaagtctgcggacagtgtggggcggttatcaaccacacttacgtaaacatcaggcacccgtattcacttggagaacacacacgccctggggctggccccatgcggggcactgagctccactctcagtatgagcaggaaacgagacagatgtcctccttgctaacatgttgcctgtccttggctccataatttcctcaggatgtctgggatacatttccattttatttatcaaatacttgcatagcatttagtataggctatgagctttacatctataattcaggaatgctcattaggtggtccagatcttatctccacatgaaactgccgcttcgagaagttagtgactggcccaaagtcaccagctaataacaggctgagctgggatttgaaccttaaaagttgtgctccagagcccctattctgaacccttgccctgtggtgccctcctggaagtggagtccttccgtcagagggccgcgtggtcttgaggtttttggctacatgtgattgaattgtggagcgttttagaggacaccacccaaccttcacccaggcccatcccttcccctttctacctctgccagggacgtactgctgtggcccagttccagttcgtgccatcaaggagggcgacctgagcaccaagtacgatgcgccctttgtctttgcggaggtcaatgccgacgtggtagactggatccagcaggacgatgggtctgtgcacaaatccatcaaccgttccctgatcgttgggctgaagatcagcactaagagcgtgggccgagacgagcgggaggatatcacccacacctacaaatacccagaggggtcctcagaggagagggaggccttcacaagggcgaaccacctgaacaaactggccgagaaggaggagacagggatggccatgcggatccgtgtgggccagagcatgaacatgggcagtgactttgacgtctttgcccacatcaccaacaacaccgctgaggagtacgtctgccgcctcctgctctgtgcccgcaccgtcagctacaatgggatcttggggcccgagtgtggcaccaagtacctgctcaacctcaacctggagcctttctctgagaagagcgttcctctttgcatcctctatgagaaataccgtgactgccttacggagtccaacctcatcaaggtgcgggccctcctcgtggagccagttatcaacagctacctgctggctgagagggacctctacctggagaatccagaaatcaagatccggatccttggggagcccaagcagaaacgcaagctggtggctgaggtgtccctgcagaacccgctccctgtggccctggaaggctgcaccttcactgtggagggggccggcctgactgaggagcagaagacggtggagatcccagaccccgtggaggcaggggaggaagttaaggtgagaatggacctgctgccgctccacatgggcctccacaagctggtggtgaacttcgagagcgacaagctgaaggctgtgaagggcttccggaatgtcatcattggccccgcctaagggacccctgctcccagcctgctgagagcccccaccttgatcccaatccttatcccaagctagtgagcaaaatatgccccttcttgggccccagaccccagggcagggtgggcagcctatgggggctctcggaaatggaatgtgcccctggcccatctcagcctcctgagcctgtgggtccccactcaccccctttgctgtgaggaatgctctgtgccagaaacagtgggagccctgaccttggctgactggggctggggtgagagaggaaagacctacattccctctcctgcccagatgccctttggaaagccattgaccacccaccatattgtttgatctacttcatagctccttggagcaggcaaaaaagggacagcatgccccttggctggatcagggaatccagctccctagactgcatcccgtacctcttcccatgactgcacccagctccaggggcccttgggacagccagagctgggtggggacagtgataggcccaaggtcccctccacatcccagcagcccaagcttaatagccctccccctcaacctcaccattgtgaagcacctactatgtgctgggtgcctcccacacttgctggggctcacggggcctccaacccatttaatcaccatgggaaactgttgtgggcgctgcttccaggataaggagactgaggcttagagagaggaggcagccccctccacaccagtggcctcgtggttattagcaaggctgggtaatgtgaaggcccaagagcagagtctgggcctctgactctgagtccactgctccatttataaccccagcctgacctgagactgtcggagaggctgtctggggcctttatcaaaaaaagactcagccaagacaaggaggtagagaggggactgggggactgggagtcagagccctggctgggttcaggtcccacgtctggccaggcactgccttctcctctctgggcctttgtttccttgttggtcagaggagtgattgaaccagctcatctccaaggatcctctccactccatgtttgcaatgcttttatatggcccagccttgtaaataaccacaaggtccactccctgctccacgaagccttaagccataggcccaggatatttctgagagtgaaaccatgactgtgaccaccttctgtccccagccctgtcctggttccttcctatgcccaggtaccacccttcagaccccagttctaggggagaagagccctggacacccctgctctacccatgagcctgcccgctgcaatgcctagacttcccaacagccttagctgccagtgctggtcactaaccaacaaggttggcaccccagctaccccttctttgcagggctaaggcccccaaacatagcccctgccccggaggaagcttggggaacccatgagttgtcagctttgactttatctcctgctctttctacatgactgggcctcccttgggctggaagaattggggattctctattggaggtgagatcacagcctccagggccccccaaatcccagggaaggacttggagagaatcatgctgttgcatttagaactttctgctttgcacaggaaagagtcacacaattaatcaacatgtatattttctctatacatagagctctatttctctacggttttataaaagccttgggttccaaccaggcagtagatgtgcttctgaaccgcaaggagcaaacactgaaataaaatagtttatttttcacactcaaa

SEQ ID NO: 300438 - DNA, 3536 bp, Homo sapiens
aacaggcgtgacgccagttctaaatcttgaaacaaaacaaaacttcaaagtacaccaaaatagaacctccttaaagcataaatctcacggagtggtcgcacttggagggtctcgccgccagtggaaggagccaccgcccccgcccgaccatggccgaggagctggtcttagagaggtgtgatctggagctggagaccaatggccgagaccaccacacggccgacctgtgccgggagaagctggtggtgcgacggggccagcccttctggctgaccctgcactttgagggccgcaactacgaggccagtgtagacagtctcaccttcagtgtcgtgaccggcccagcccctagccaggaggccgggaccaaggcccgttttccactaagagatgctgtggaggagggtgactggacagccaccgtggtggaccagcaagactgcaccctctcgctgcagctcaccaccccggccaacgcccccatcggcctgtatcgcctcagcctggaggcctccactggctaccagggatccagctttgtgctgggccacttcattttgctcttcaacgcctggtgcccagcggatgctgtgtacctggactcggaagaggagcggcaggagtatgtcctcacccagcagggctttatctaccagggctcggccaagttcatcaagaacataccttggaattttgggcagtttgaagatgggatcctagacatctgcctgatccttctagatgtcaaccccaagttcctgaagaacgccggccgtgactgctcccgccgcagcagccccgtctacgtgggccgggtggtgagtggcatggtcaactgcaacgatgaccagggtgtgctgctgggacgctgggacaacaactacggggacggcgtcagccccatgtcctggatcggcagcgtggacatcctgcggcgctggaagaaccacggctgccagcgcgtcaagtatggccagtgctgggtcttcgccgccgtggcctgcacagtgctgaggtgcctgggcatccctacccgcgtcgtgaccaactacaactcggcccatgaccagaacagcaaccttctcatcgagtacttccgcaatgagtttggggagatccagggtgacaagagcgagatgatctggaacttccactgctgggtggagtcgtggatgaccaggccggacctgcagccggggtacgagggctggcaggccctggacccaacgccccaggagaagagcgaagggacgtactgctgtggcccagttccagttcgtgccatcaaggagggcgacctgagcaccaagtacgatgcgccctttgtctttgcggaggtcaatgccgacgtggtagactggatccagcaggacgatgggtctgtgcacaaatccatcaaccgttccctgatcgttgggctgaagatcagcactaagagcgtgggccgagacgagcgggaggatatcacccacacctacaaatacccagaggggtcctcagaggagagggaggccttcacaagggcgaaccacctgaacaaactggccgagaaggaggagacagggatggccatgcggatccgtgtgggccagagcatgaacatgggcagtgactttgacgtctttgcccacatcaccaacaacaccgctgaggagtacgtctgccgcctcctgctctgtgcccgcaccgtcagctacaatgggatcttggggcccgagtgtggcaccaagtacctgctcaacctcaacctggagcctttctctgagaagagcgttcctctttgcatcctctatgagaaataccgtgactgccttacggagtccaacctcatcaaggtgcgggccctcctcgtggagccagttatcaacagctacctgctggctgagagggacctctacctggagaatccagaaatcaagatccggatccttggggagcccaagcagaaacgcaagctggtggctgaggtgtccctgcagaacccgctccctgtgccagaaacagtgggagccctgaccttggctgactggggctggggtgagagaggaaagacctacattccctctcctgcccagatgccctttggaaagccattgaccacccaccatattgtttgatctacttcatagctccttggagcaggcaaaaaagggacagcatgccccttggctggatcagggaatccagctccctagactgcatcccgtacctcttcccatgactgcacccagctccaggggcccttgggacagccagagctgggtggggacagtgataggcccaaggtcccctccacatcccagcagcccaagcttaatagccctccccctcaacctcaccattgtgaagcacctactatgtgctgggtgcctcccacacttgctggggctcacggggcctccaacccatttaatcaccatgggaaactgttgtgggcgctgcttccaggataaggagactgaggcttagagagaggaggcagccccctccacaccagtggcctcgtggttattagcaaggctgggtaatgtgaaggcccaagagcagagtctgggcctctgactctgagtccactgctccatttataaccccagcctgacctgagactgtcggagaggctgtctggggcctttatcaaaaaaagactcagccaagacaaggaggtagagaggggactgggggactgggagtcagagccctggctgggttcaggtcccacgtctggccaggcactgccttctcctctctgggcctttgtttccttgttggtcagaggagtgattgaaccagctcatctccaaggatcctctccactccatgtttgcaatgcttttatatggcccagccttgtaaataaccacaaggtccactccctgctccacgaagccttaagccataggcccaggatatttctgagagtgaaaccatgactgtgaccaccttctgtccccagccctgtcctggttccttcctatgcccaggtaccacccttcagaccccagttctaggggagaagagccctggacacccctgctctacccatgagcctgcccgctgcaatgcctagacttcccaacagccttagctgccagtgctggtcactaaccaacaaggttggcaccccagctaccccttctttgcagggctaaggcccccaaacatagcccctgccccggaggaagcttggggaacccatgagttgtcagctttgactttatctcctgctctttctacatgactgggcctcccttgggctggaagaattggggattctctattggaggtgagatcacagcctccagggccccccaaatcccagggaaggacttggagagaatcatgctgttgcatttagaactttctgctttgcacaggaaagagtcacacaattaatcaacatgtatattttctctatacatagagctctatttctctacggttttataaaagccttgggttccaaccaggcagtagatgtgcttctgaaccgcaaggagcaaacactgaaataaaatagtttatttttcacactcaaa

SEQ ID NO: 300439 - DNA, 2381 bp, Homo sapiens
gctcctcgctgggaaccctggagccacagtggggagttcagggatccgcccagccattcccccgctgtgtgaccccaagcacattccttcccctctctgtgcctcttggagttgcaagagagttgggaggggtgattctgcatcatgagcaccctcctttctccccttctgcagagaagagcgttcctctttgcatcctctatgagaaataccgtgactgccttacggagtccaacctcatcaaggtgcgggccctcctcgtggagccagttatcaacagctacctgctggctgagagggacctctacctggagaatccagaaatcaagatccggatccttggggagcccaagcagaaacgcaagctggtggctgaggtgtccctgcagaacccgctccctgtggccctggaaggctgcaccttcactgtggagggggccggcctgactgaggagcagaagacggtggagatcccagaccccgtggaggcaggggaggaagttaaggtgagaatggacctgctgccgctccacatgggcctccacaagctggtggtgaacttcgagagcgacaagctgaaggctgtgaagggcttccggaatgtcatcattggccccgcctaagggacccctgctcccagcctgctgagagcccccaccttgatcccaatccttatcccaagctagtgagcaaaatatgccccttcttgggccccagaccccagggcagggtgggcagcctatgggggctctcggaaatggaatgtgcccctggcccatctcagcctcctgagcctgtgggtccccactcaccccctttgctgtgaggaatgctctgtgccagaaacagtgggagccctgaccttggctgactggggctggggtgagagaggaaagacctacattccctctcctgcccagatgccctttggaaagccattgaccacccaccatattgtttgatctacttcatagctccttggagcaggcaaaaaagggacagcatgccccttggctggatcagggaatccagctccctagactgcatcccgtacctcttcccatgactgcacccagctccaggggcccttgggacagccagagctgggtggggacagtgataggcccaaggtcccctccacatcccagcagcccaagcttaatagccctccccctcaacctcaccattgtgaagcacctactatgtgctgggtgcctcccacacttgctggggctcacggggcctccaacccatttaatcaccatgggaaactgttgtgggcgctgcttccaggataaggagactgaggcttagagagaggaggcagccccctccacaccagtggcctcgtggttattagcaaggctgggtaatgtgaaggcccaagagcagagtctgggcctctgactctgagtccactgctccatttataaccccagcctgacctgagactgtcggagaggctgtctggggcctttatcaaaaaaagactcagccaagacaaggaggtagagaggggactgggggactgggagtcagagccctggctgggttcaggtcccacgtctggccaggcactgccttctcctctctgggcctttgtttccttgttggtcagaggagtgattgaaccagctcatctccaaggatcctctccactccatgtttgcaatgcttttatatggcccagccttgtaaataaccacaaggtccactccctgctccacgaagccttaagccataggcccaggatatttctgagagtgaaaccatgactgtgaccaccttctgtccccagccctgtcctggttccttcctatgcccaggtaccacccttcagaccccagttctaggggagaagagccctggacacccctgctctacccatgagcctgcccgctgcaatgcctagacttcccaacagccttagctgccagtgctggtcactaaccaacaaggttggcaccccagctaccccttctttgcagggctaaggcccccaaacatagcccctgccccggaggaagcttggggaacccatgagttgtcagctttgactttatctcctgctctttctacatgactgggcctcccttgggctggaagaattggggattctctattggaggtgagatcacagcctccagggccccccaaatcccagggaaggacttggagagaatcatgctgttgcatttagaactttctgctttgcacaggaaagagtcacacaattaatcaacatgtatattttctctatacatagagctctatttctctacggttttataaaagccttgggttccaaccaggcagtagatgtgcttctgaaccgcaaggagcaaacactgaaataaaatagtttatttttcacactcaaa

SEQ ID NO: 300440 - DNA, 2280 bp, Homo sapiens
agtaacaccgctataaacacataagcttgtaactcttactccctctctcctactacctgactcgcatctgcagagaagagcgttcctctttgcatcctctatgagaaataccgtgactgccttacggagtccaacctcatcaaggtgcgggccctcctcgtggagccagttatcaacagctacctgctggctgagagggacctctacctggagaatccagaaatcaagatccggatccttggggagcccaagcagaaacgcaagctggtggctgaggtgtccctgcagaacccgctccctgtggccctggaaggctgcaccttcactgtggagggggccggcctgactgaggagcagaagacggtggagatcccagaccccgtggaggcaggggaggaagttaaggtgagaatggacctgctgccgctccacatgggcctccacaagctggtggtgaacttcgagagcgacaagctgaaggctgtgaagggcttccggaatgtcatcattggccccgcctaagggacccctgctcccagcctgctgagagcccccaccttgatcccaatccttatcccaagctagtgagcaaaatatgccccttcttgggccccagaccccagggcagggtgggcagcctatgggggctctcggaaatggaatgtgcccctggcccatctcagcctcctgagcctgtgggtccccactcaccccctttgctgtgaggaatgctctgtgccagaaacagtgggagccctgaccttggctgactggggctggggtgagagaggaaagacctacattccctctcctgcccagatgccctttggaaagccattgaccacccaccatattgtttgatctacttcatagctccttggagcaggcaaaaaagggacagcatgccccttggctggatcagggaatccagctccctagactgcatcccgtacctcttcccatgactgcacccagctccaggggcccttgggacagccagagctgggtggggacagtgataggcccaaggtcccctccacatcccagcagcccaagcttaatagccctccccctcaacctcaccattgtgaagcacctactatgtgctgggtgcctcccacacttgctggggctcacggggcctccaacccatttaatcaccatgggaaactgttgtgggcgctgcttccaggataaggagactgaggcttagagagaggaggcagccccctccacaccagtggcctcgtggttattagcaaggctgggtaatgtgaaggcccaagagcagagtctgggcctctgactctgagtccactgctccatttataaccccagcctgacctgagactgtcggagaggctgtctggggcctttatcaaaaaaagactcagccaagacaaggaggtagagaggggactgggggactgggagtcagagccctggctgggttcaggtcccacgtctggccaggcactgccttctcctctctgggcctttgtttccttgttggtcagaggagtgattgaaccagctcatctccaaggatcctctccactccatgtttgcaatgcttttatatggcccagccttgtaaataaccacaaggtccactccctgctccacgaagccttaagccataggcccaggatatttctgagagtgaaaccatgactgtgaccaccttctgtccccagccctgtcctggttccttcctatgcccaggtaccacccttcagaccccagttctaggggagaagagccctggacacccctgctctacccatgagcctgcccgctgcaatgcctagacttcccaacagccttagctgccagtgctggtcactaaccaacaaggttggcaccccagctaccccttctttgcagggctaaggcccccaaacatagcccctgccccggaggaagcttggggaacccatgagttgtcagctttgactttatctcctgctctttctacatgactgggcctcccttgggctggaagaattggggattctctattggaggtgagatcacagcctccagggccccccaaatcccagggaaggacttggagagaatcatgctgttgcatttagaactttctgctttgcacaggaaagagtcacacaattaatcaacatgtatattttctctatacatagagctctatttctctacggttttataaaagccttgggttccaaccaggcagtagatgtgcttctgaaccgcaaggagcaaacactgaaataaaatagtttatttttcacactcaaa

SEQ ID NO: 300441 - DNA, 4452 bp, Homo sapiens
aacaggcgtgacgccagttctaaatcttgaaacaaaacaaaacttcaaagtacaccaaaatagaacctccttaaagcataaatctcacggagtggtcgcacttggagggtctcgccgccagtggaaggagccaccgcccccgcccgaccatggccgaggagctggtcttagagaggtgtgatctggagctggagaccaatggccgagaccaccacacggccgacctgtgccgggagaagctggtggtgcgacggggccagcccttctggctgaccctgcactttgagggccgcaactacgaggccagtgtagacagtctcaccttcagtgtcgtgaccggcccagcccctagccaggaggccgggaccaaggcccgttttccactaagagatgctgtggaggagggtgactggacagccaccgtggtggaccagcaagactgcaccctctcgctgcagctcaccaccccggccaacgcccccatcggcctgtatcgcctcagcctggaggcctccactggctaccagggatccagctttgtgctgggccacttcattttgctcttcaacgcctggtgcccagcggatgctgtgtacctggactcggaagaggagcggcaggagtatgtcctcacccagcagggctttatctaccagggctcggccaagttcatcaagaacataccttggaattttgggcagtttgaagatgggatcctagacatctgcctgatccttctagatgtcaaccccaagttcctgaagaacgccggccgtgactgctcccgccgcagcagccccgtctacgtgggccgggtggtgagtggcatggtcaactgcaacgatgaccagggtgtgctgctgggacgctgggacaacaactacggggacggcgtcagccccatgtcctggatcggcagcgtggacatcctgcggcgctggaagaaccacggctgccagcgcgtcaagtatggccagtgctgggtcttcgccgccgtggcctgcacagtgctgaggtgcctgggcatccctacccgcgtcgtgaccaactacaactcggcccatgaccagaacagcaaccttctcatcgagtacttccgcaatgagtttggggagatccagggtgacaagagcgagatgatctggaacttccactgctgggtggagtcgtggatgaccaggccggacctgcagccggggtacgagggctggcaggccctggacccaacgccccaggagaagagcgaagggacgtactgctgtggcccagttccagttcgtgccatcaaggagggcgacctgagcaccaagtacgatgcgccctttgtctttgcggaggtcaatgccgacgtggtagactggatccagcaggacgatgggtctgtgcacaaatccatcaaccgttccctgatcgttgggctgaagatcagcactaagagcgtgggccgagacgagcgggaggatatcacccacacctacaaatacccagaggggtcctcagaggagagggaggccttcacaagggcgaaccacctgaacaaactggccgagaaggaggagacagggatggccatgcggatccgtgtgggccagagcatgaacatgggcagtgactttgacgtctttgcccacatcaccaacaacaccgctgaggagtacgtctgccgcctcctgctctgtgcccgcaccgtcagctacaatgggatcttggggcccgagtgtggcaccaagtacctgctcaacctcaacctggagcctttctctgagaagagcgttcctctttgcatcctctatgagaaataccgtgactgccttacggagtccaacctcatcaaggtgcgggccctcctcgtggagccagttatcaacagctacctgctggctgagagggacctctacctggagaatccagaaatcaagatccggatccttggggagcccaagcagaaacgcaagctggtggctgaggtgtccctgcagaacccgctccctgtggccctggaaggctgcaccttcactgtggagggggccggcctgactgaggagcagaagacggtggagatcccagaccccgtggaggcaggggaggaagttaaggtgagaatggacctgctgccgctccacatgggcctccacaagctggtggtgaacttcgagagcgacaagctgaaggctgtgaagggcttccggaatgtcatcattggccccgcctaagggacccctgctcccagcctgctgagagcccccaccttgatcccaatccttatcccaagctagtgagcaaaatatgccccttcttgggccccagaccccagggcagggtgggcagcctatgggggctctcggaaatggaatgtgcccctggcccatctcagcctcctgagcctgtgggtccccactcaccccctttgctgtgaggaatgctctgtgccagaaacagtgggagccctgaccttggctgactggggctggggtgagagaggaaagacctacattccctctcctgcccagatgccctttggaaagccattgaccacccaccatattgtttgatctacttcatagctccttggagcaggcaaaaaagggacagcatgccccttggctggatcagggaatccagctccctagactgcatcccgtacctcttcccatgactgcacccagctccaggggcccttgggacagccagagctgggtggggacagtgataggcccaaggtcccctccacatcccagcagcccaagcttaatagccctccccctcaacctcaccattgtgaagcacctactatgtgctgggtgcctcccacacttgctggggctcacggggcctccaacccatttaatcaccatgggaaactgttgtgggcgctgcttccaggataaggagactgaggcttagagagaggaggcagccccctccacaccagtggcctcgtggttattagcaaggctgggtaatgtgaaggcccaagagcagagtctgggcctctgactctgagtccactgctccatttataaccccagcctgacctgagactgtcggagaggctgtctggggcctttatcaaaaaaagactcagccaagacaaggaggtagagaggggactgggggactgggagtcagagccctggctgggttcaggtcccacgtctggccaggcactgccttctcctctctgggcctttgtttccttgttggtcagaggagtgattgaaccagctcatctccaaggatcctctccactccatgtttgcaatgcttttatatggcccagccttgtaaataaccacaaggtccactccctgctccacgaagccttaagccataggcccaggatatttctgagagtgaaaccatgactgtgaccaccttctgtccccagccctgtcctggttccttcctatgcccaggtaccacccttcagaccccagttctaggggagaagagccctggacacccctgctctacccatgagcctgcccgctgcaatgcctagacttcccaacagccttagctgccagtgctggtcactaaccaacaaggttggcaccccagctaccccttctttgcagggctaaggcccccaaacatagcccctgccccggaggaagcttggggaacccatgagttgtcagctttgactttatctcctgctctttctacatgactgggcctcccttgggctggaagaattggggattctctattggaggtgagatcacagcctccagggccccccaaatcccagggaaggacttggagagaatcatgctgttgcatttagaactttctgctttgcacaggaaagagtcacacaattaatcaacatgtatattttctctatacatagagctctatttctctacggttttataaaagccttgggttccaaccaggcagtagatgtgcttctgaaccgcaaggagcaaacactgaaataaaatagtttatttttcacactcaaaaaaaaaaaaaaaaaaaaaaaaaaaaaaaaaaaaaaaaaaaaaaaaaaaaaaaaaacaaaaaacaaaaacatgtggtggcgcgcgcgccgccggcgcggcccgcaagaagaagatattctacaacaacaccatgctgcgtgggagggcgcgcggaggccaccacacgggcgaggaagaagagagcaaggtggagcaaacggaagtgctgctcagcagggaaaacgacggggagcaagacagcagggcaggggtgggggatctctcccccaccagataaaaagaaatagagaccgcgcgcgcgggagagagaaaaaaccgagaagggtttgtcgccagagaaacaacaaactcaccgagagaggggaggaataactaggcgcgagcgacacacagctaggagagagcaaatataaaacacgagaggaggaacacaaaacgagggcgaagcgagagaaaaagaaaataacagcccccccggagg

SEQ ID NO: 300442 - DNA, 3714 bp, Homo sapiens
aacaggcgtgacgccagttctaaatcttgaaacaaaacaaaacttcaaagtacaccaaaatagaacctccttaaagcataaatctcacggagtggtcgcacttggagggtctcgccgccagtggaaggagccaccgcccccgcccgaccatggccgaggagctggtcttagagaggtgtgatctggagctggagaccaatggccgagaccaccacacggccgacctgtgccgggagaagctggtggtgcgacggggccagcccttctggctgaccctgcactttgagggccgcaactacgaggccagtgtagacagtctcaccttcagtgtcgtgaccggcccagcccctagccaggaggccgggaccaaggcccgttttccactaagagatgctgtggaggagggtgactggacagccaccgtggtggaccagcaagactgcaccctctcgctgcagctcaccaccccggccaacgcccccatcggcctgtatcgcctcagcctggaggcctccactggctaccagggatccagctttgtgctgggccacttcattttgctcttcaacgcctggtgcccagcggatgctgtgtacctggactcggaagaggagcggcaggagtatgtcctcacccagcagggctttatctaccagggctcggccaagttcatcaagaacataccttggaattttgggcagtttgaagatgggatcctagacatctgcctgatccttctagatgtcaaccccaagttcctgaagaacgccggccgtgactgctcccgccgcagcagccccgtctacgtgggccgggtggtgagtggcatggtcaactgcaacgatgaccagggtgtgctgctgggacgctgggacaacaactacggggacggcgtcagccccatgtcctggatcggcagcgtggacatcctgcggcgctggaagaaccacggctgccagcgcgtcaagtatggccagtgctgggtcttcgccgccgtggcctgcacagtgctgaggtgcctgggcatccctacccgcgtcgtgaccaactacaactcggcccatgaccagaacagcaaccttctcatcgagtacttccgcaatgagtttggggagatccagggtgacaagagcgagatgatctggaacttccactgctgggtggagtcgtggatgaccaggccggacctgcagccggggtacgagggctggcaggccctggacccaacgccccaggagaagagcgaagggacgtactgctgtggcccagttccagttcgtgccatcaaggagggcgacctgagcaccaagtacgatgcgccctttgtctttgcggaggtcaatgccgacgtggtagactggatccagcaggacgatgggtctgtgcacaaatccatcaaccgttccctgatcgttgggctgaagatcagcactaagagcgtgggccgagacgagcgggaggatatcacccacacctacaaatacccagaggggtcctcagaggagagggaggccttcacaagggcgaaccacctgaacaaactggccgagaaggaggagacagggatggccatgcggatccgtgtgggccagagcatgaacatgggcagtgactttgacgtctttgcccacatcaccaacaacaccgctgaggagtacgtctgccgcctcctgctctgtgcccgcaccgtcagctacaatgggatcttggggcccgagtgtggcaccaagtacctgctcaacctcaacctggagcctttctctgagaagagcgttcctctttgcatcctctatgagaaataccgtgactgccttacggagtccaacctcatcaaggtgcgggccctcctcgtggagccagttatcaacagctacctgctggctgagagggacctctacctggagaatccagaaatcaagatccggatccttggggagcccaagcagaaacgcaagctggtggctgaggtgtccctgcagaacccgctccctgtggccctggaaggctgcaccttcactgtggagggggccggcctgactgaggagcagaagacggtggagatcccagaccccgtggaggcaggggaggaagttaaggtgagaatggacctgctgccgctccacatgggcctccacaagctggtggtgaacttcgagagcgacaagctgaaggctgtgaagggcttccggaatgtcatcattggccccgcctaagggacccctgctcccagcctgctgagagcccccaccttgatcccaatccttatcccaagctagtgagcaaaatatgccccttcttgggccccagaccccagggcagggtgggcagcctatgggggctctcggaaatggaatgtgcccctggcccatctcagcctcctgagcctgtgggtccccactcaccccctttgctgtgaggaatgctctgtgccagaaacagtgggagccctgaccttggctgactggggctggggtgagagaggaaagacctacattccctctcctgcccagatgccctttggaaagccattgaccacccaccatattgtttgatctacttcatagctccttggagcaggcaaaaaagggacagcatgccccttggctggatcagggaatccagctccctagactgcatcccgtacctcttcccatgactgcacccagctccaggggcccttgggacagccagagctgggtggggacagtgataggcccaagagcagagtctgggcctctgactctgagtccactgctccatttataaccccagcctgacctgagactgtcggagaggctgtctggggcctttatcaaaaaaagactcagccaagacaaggaggtagagaggggactgggggactgggagtcagagccctggctgggttcaggtcccacgtctggccaggcactgccttctcctctctgggcctttgtttccttgttggtcagaggagtgattgaaccagctcatctccaaggatcctctccactccatgtttgcaatgcttttatatggcccagccttgtaaataaccacaaggtccactccctgctccacgaagccttaagccataggcccaggatatttctgagagtgaaaccatgactgtgaccaccttctgtccccagccctgtcctggttccttcctatgcccaggtaccacccttcagaccccagttctaggggagaagagccctggacacccctgctctacccatgagcctgcccgctgcaatgcctagacttcccaacagccttagctgccagtgctggtcactaaccaacaaggttggcaccccagctaccccttctttgcagggctaaggcccccaaacatagcccctgccccggaggaagcttggggaacccatgagttgtcagctttgactttatctcctgctctttctacatgactgggcctcccttgggctggaagaattggggattctctattggaggtgagatcacagcctccagggccccccaaatcccagggaaggacttggagagaatcatgctgttgcatttagaactttctgctttgcacaggaaagagtcacacaattaatcaacatgtatattttctctatacatagagctctatttctctacggttttataaaagccttgggttccaaccaggcagtagatgtgcttctgaaccgcaaggagcaaacactgaaataaaatagtttatttttcacactcaaa

SEQ ID NO: 300443 - DNA, 2133 bp, Homo sapiens
ccacgctctgggggtgaaatctgctacacacccgggtatgctgctcagcaacggagcggatagtctgacctccctgggctttgtgacagcggtgacagagagagtagttctcaaaccactccgagttgggattcagttctgctgagcccgccccacagagagagcgtcgacgctctctctgtggagggggccggcctgactgaggagcagaagacggtggagatcccagaccccgtggaggcaggggaggaagttaaggtgagaatggacctgctgccgctccacatgggcctccacaagctggtggtgaacttcgagagcgacaagctgaaggctgtgaagggcttccggaatgtcatcattggccccgcctaagggacccctgctcccagcctgctgagagcccccaccttgatcccaatccttatcccaagctagtgagcaaaatatgccccttcttgggccccagaccccagggcagggtgggcagcctatgggggctctcggaaatggaatgtgcccctggcccatctcagcctcctgagcctgtgggtccccactcaccccctttgctgtgaggaatgctctgtgccagaaacagtgggagccctgaccttggctgactggggctggggtgagagaggaaagacctacattccctctcctgcccagatgccctttggaaagccattgaccacccaccatattgtttgatctacttcatagctccttggagcaggcaaaaaagggacagcatgccccttggctggatcagggaatccagctccctagactgcatcccgtacctcttcccatgactgcacccagctccaggggcccttgggacagccagagctgggtggggacagtgataggcccaaggtcccctccacatcccagcagcccaagcttaatagccctccccctcaacctcaccattgtgaagcacctactatgtgctgggtgcctcccacacttgctggggctcacggggcctccaacccatttaatcaccatgggaaactgttgtgggcgctgcttccaggataaggagactgaggcttagagagaggaggcagccccctccacaccagtggcctcgtggttattagcaaggctgggtaatgtgaaggcccaagagcagagtctgggcctctgactctgagtccactgctccatttataaccccagcctgacctgagactgtcggagaggctgtctggggcctttatcaaaaaaagactcagccaagacaaggaggtagagaggggactgggggactgggagtcagagccctggctgggttcaggtcccacgtctggccaggcactgccttctcctctctgggcctttgtttccttgttggtcagaggagtgattgaaccagctcatctccaaggatcctctccactccatgtttgcaatgcttttatatggcccagccttgtaaataaccacaaggtccactccctgctccacgaagccttaagccataggcccaggatatttctgagagtgaaaccatgactgtgaccaccttctgtccccagccctgtcctggttccttcctatgcccaggtaccacccttcagaccccagttctaggggagaagagccctggacacccctgctctacccatgagcctgcccgctgcaatgcctagacttcccaacagccttagctgccagtgctggtcactaaccaacaaggttggcaccccagctaccccttctttgcagggctaaggcccccaaacatagcccctgccccggaggaagcttggggaacccatgagttgtcagctttgactttatctcctgctctttctacatgactgggcctcccttgggctggaagaattggggattctctattggaggtgagatcacagcctccagggccccccaaatcccagggaaggacttggagagaatcatgctgttgcatttagaactttctgctttgcacaggaaagagtcacacaattaatcaacatgtatattttctctatacatagagctctatttctctacggttttataaaagccttgggttccaaccaggcagtagatgtgcttctgaaccgcaaggagcaaacactgaaataaaatagtttatttttcacactcaaa

SEQ ID NO: 300444 - DNA, 2428 bp, Homo sapiens
cgccgtccctccctcgggctccggtcccctgggtgagccccagcgctggcggcgtgggcccgggactgggcaatgggtggcctcccaggtcgccgccttcccgcggggccccgcccccggcccgccccaaagcgggctataagttagcgccgctctccgcctcggcagtgccagccgccagtggtcgtggtcgcacttggagggtctcgccgccagtggaaggagccaccgcccccgcccgaccatggccgaggagctggtcttagagaggtgtgatctggagctggagaccaatggccgagaccaccacacggccgacctgtgccgggagaagctggtggtgcgacggggccagcccttctggctgaccctgcactttgagggccgcaactacgaggccagtgtagacagtctcaccttcagtgtcgtgaccggcccagcccctagccaggaggccgggaccaaggcccgttttccactaagagatgctgtggaggagggtgactggacagccaccgtggtggaccagcaagactgcaccctctcgctgcagctcaccaccccggccaacgcccccatcggcctgtatcgcctcagcctggaggcctccactggctaccagggatccagctttgtgctgggccacttcattttgctcttcaacgcctggtgcccagcggatgctgtgtacctggactcggaagaggagcggcaggagtatgtcctcacccagcagggctttatctaccagggctcggccaagttcatcaagaacataccttggaattttgggcagtctcggaaatggaatgtgcccctggcccatctcagcctcctgagcctgtgggtccccactcaccccctttgctgtgaggaatgctctgtgccagaaacagtgggagccctgaccttggctgactggggctggggtgagagaggaaagacctacattccctctcctgcccagatgccctttggaaagccattgaccacccaccatattgtttgatctacttcatagctccttggagcaggcaaaaaagggacagcatgccccttggctggatcagggaatccagctccctagactgcatcccgtacctcttcccatgactgcacccagctccaggggcccttgggacagccagagctgggtggggacagtgataggcccaaggtcccctccacatcccagcagcccaagcttaatagccctccccctcaacctcaccattgtgaagcacctactatgtgctgggtgcctcccacacttgctggggctcacggggcctccaacccatttaatcaccatgggaaactgttgtgggcgctgcttccaggataaggagactgaggcttagagagaggaggcagccccctccacaccagtggcctcgtggttattagcaaggctgggtaatgtgaaggcccaagagcagagtctgggcctctgactctgagtccactgctccatttataaccccagcctgacctgagactgtcggagaggctgtctggggcctttatcaaaaaaagactcagccaagacaaggaggtagagaggggactgggggactgggagtcagagccctggctgggttcaggtcccacgtctggccaggcactgccttctcctctctgggcctttgtttccttgttggtcagaggagtgattgaaccagctcatctccaaggatcctctccactccatgtttgcaatgcttttatatggcccagccttgtaaataaccacaaggtccactccctgctccacgaagccttaagccataggcccaggatatttctgagagtgaaaccatgactgtgaccaccttctgtccccagccctgtcctggttccttcctatgcccaggtaccacccttcagaccccagttctaggggagaagagccctggacacccctgctctacccatgagcctgcccgctgcaatgcctagacttcccaacagccttagctgccagtgctggtcactaaccaacaaggttggcaccccagctaccccttctttgcagggctaaggcccccaaacatagcccctgccccggaggaagcttggggaacccatgagttgtcagctttgactttatctcctgctctttctacatgactgggcctcccttgggctggaagaattggggattctctattggaggtgagatcacagcctccagggccccccaaatcccagggaaggacttggagagaatcatgctgttgcatttagaactttctgctttgcacaggaaagagtcacacaattaatcaacatgtatattttctctatacatagagctctatttctctacggttttataaaagccttgggttccaaccaggcagtagatgtgcttctgaaccgcaaggagcaaacactgaaataaaatagtttatttttcacactcaaa

SEQ ID NO: 300445 - DNA, 1782 bp, Homo sapiens
gggtggtaatacacgtacaagccttttagggttgtcatgtaggtgaagtaggagcccgccttgatcccaatccttatcccaagctagtgagcaaaatatgccccttcttgggccccagaccccagggcagggtgggcagcctatgggggctctcggaaatggaatgtgcccctggcccatctcagcctcctgagcctgtgggtccccactcaccccctttgctgtgaggaatgctctgtgccagaaacagtgggagccctgaccttggctgactggggctggggtgagagaggaaagacctacattccctctcctgcccagatgccctttggaaagccattgaccacccaccatattgtttgatctacttcatagctccttggagcaggcaaaaaagggacagcatgccccttggctggatcagggaatccagctccctagactgcatcccgtacctcttcccatgactgcacccagctccaggggcccttgggacagccagagctgggtggggacagtgataggcccaaggtcccctccacatcccagcagcccaagcttaatagccctccccctcaacctcaccattgtgaagcacctactatgtgctgggtgcctcccacacttgctggggctcacggggcctccaacccatttaatcaccatgggaaactgttgtgggcgctgcttccaggataaggagactgaggcttagagagaggaggcagccccctccacaccagtggcctcgtggttattagcaaggctgggtaatgtgaaggcccaagagcagagtctgggcctctgactctgagtccactgctccatttataaccccagcctgacctgagactgtcggagaggctgtctggggcctttatcaaaaaaagactcagccaagacaaggaggtagagaggggactgggggactgggagtcagagccctggctgggttcaggtcccacgtctggccaggcactgccttctcctctctgggcctttgtttccttgttggtcagaggagtgattgaaccagctcatctccaaggatcctctccactccatgtttgcaatgcttttatatggcccagccttgtaaataaccacaaggtccactccctgctccacgaagccttaagccataggcccaggatatttctgagagtgaaaccatgactgtgaccaccttctgtccccagccctgtcctggttccttcctatgcccaggtaccacccttcagaccccagttctaggggagaagagccctggacacccctgctctacccatgagcctgcccgctgcaatgcctagacttcccaacagccttagctgccagtgctggtcactaaccaacaaggttggcaccccagctaccccttctttgcagggctaaggcccccaaacatagcccctgccccggaggaagcttggggaacccatgagttgtcagctttgactttatctcctgctctttctacatgactgggcctcccttgggctggaagaattggggattctctattggaggtgagatcacagcctccagggccccccaaatcccagggaaggacttggagagaatcatgctgttgcatttagaactttctgctttgcacaggaaagagtcacacaattaatcaacatgtatattttctctatacatagagctctatttctctacggttttataaaagccttgggttccaaccaggcagtagatgtgcttctgaaccgcaaggagcaaacactgaaataaaatagtttatttttcacactcaaa

SEQ ID NO: 300446 - DNA, 1783 bp, Homo sapiens
  misc_feature (5)..(5): n is a, c, g, or t
  misc_feature (63)..(63): n is a, c, g, or t
cttcntgccttggtctcccaaagtgctgggataacaggtgtgcaccaccgagcctggccttgntttgtttctaaccggatgtctgcctatttttttttcgagacagagtctgcttctgtcacccaggcgtcatctcagctcaccgcaacctccgcctcccaggttcaagtgatttttccatctcagcctcctgagcctgtgggtccccactcaccccctttgctgtgaggaatgctctgtgccagaaacagtgggagccctgaccttggctgactggggctggggtgagagaggaaagacctacattccctctcctgcccagatgccctttggaaagccattgaccacccaccatattgtttgatctacttcatagctccttggagcaggcaaaaaagggacagcatgccccttggctggatcagggaatccagctccctagactgcatcccgtacctcttcccatgactgcacccagctccaggggcccttgggacagccagagctgggtggggacagtgataggcccaaggtcccctccacatcccagcagcccaagcttaatagccctccccctcaacctcaccattgtgaagcacctactatgtgctgggtgcctcccacacttgctggggctcacggggcctccaacccatttaatcaccatgggaaactgttgtgggcgctgcttccaggataaggagactgaggcttagagagaggaggcagccccctccacaccagtggcctcgtggttattagcaaggctgggtaatgtgaaggcccaagagcagagtctgggcctctgactctgagtccactgctccatttataaccccagcctgacctgagactgtcggagaggctgtctggggcctttatcaaaaaaagactcagccaagacaaggaggtagagaggggactgggggactgggagtcagagccctggctgggttcaggtcccacgtctggccaggcactgccttctcctctctgggcctttgtttccttgttggtcagaggagtgattgaaccagctcatctccaaggatcctctccactccatgtttgcaatgcttttatatggcccagccttgtaaataaccacaaggtccactccctgctccacgaagccttaagccataggcccaggatatttctgagagtgaaaccatgactgtgaccaccttctgtccccagccctgtcctggttccttcctatgcccaggtaccacccttcagaccccagttctaggggagaagagccctggacacccctgctctacccatgagcctgcccgctgcaatgcctagacttcccaacagccttagctgccagtgctggtcactaaccaacaaggttggcaccccagctaccccttctttgcagggctaaggcccccaaacatagcccctgccccggaggaagcttggggaacccatgagttgtcagctttgactttatctcctgctctttctacatgactgggcctcccttgggctggaagaattggggattctctattggaggtgagatcacagcctccagggccccccaaatcccagggaaggacttggagagaatcatgctgttgcatttagaactttctgctttgcacaggaaagagtcacacaattaatcaacatgtatattttctctatacatagagctctatttctctacggttttataaaagccttgggttccaaccaggcagtagatgtgcttctgaaccgcaaggagcaaacactgaaataaaatagtttatttttcacactcaaa

SEQ ID NO: 300447 - DNA, 3604 bp, Homo sapiens
aacaggcgtgacgccagttctaaatcttgaaacaaaacaaaacttcaaagtacaccaaaatagaacctccttaaagcataaatctcacggagtggtcgcacttggagggtctcgccgccagtggaaggagccaccgcccccgcccgaccatggccgaggagctggtcttagagaggtgtgatctggagctggagaccaatggccgagaccaccacacggccgacctgtgccgggagaagctggtggtgcgacggggccagcccttctggctgaccctgcactttgagggccgcaactacgaggccagtgtagacagtctcaccttcagtgtcgtgaccggcccagcccctagccaggaggccgggaccaaggcccgttttccactaagagatgctgtggaggagggtgactggacagccaccgtggtggaccagcaagactgcaccctctcgctgcagctcaccaccccggccaacgcccccatcggcctgtatcgcctcagcctggaggcctccactggctaccagggatccagctttgtgctgggccacttcattttgctcttcaacgcctggtgcccagcggatgctgtgtacctggactcggaagaggagcggcaggagtatgtcctcacccagcagggctttatctaccagggctcggccaagttcatcaagaacataccttggaattttgggcagtttgaagatgggatcctagacatctgcctgatccttctagatgtcaaccccaagttcctgaagaacgccggccgtgactgctcccgccgcagcagccccgtctacgtgggccgggtggtgagtggcatggtcaactgcaacgatgaccagggtgtgctgctgggacgctgggacaacaactacggggacggcgtcagccccatgtcctggatcggcagcgtggacatcctgcggcgctggaagaaccacggctgccagcgcgtcaagtatggccagtgctgggtcttcgccgccgtggcctgcacagtgctgaggtgcctgggcatccctacccgcgtcgtgaccaactacaactcggcccatgaccagaacagcaaccttctcatcgagtacttccgcaatgagtttggggagatccagggtgacaagagcgagatgatctggaacttccactgctgggtggagtcgtggatgaccaggccggacctgcagccggggtacgagggctggcaggccctggacccaacgccccaggagaagagcgaagggacgtactgctgtggcccagttccagttcgtgccatcaaggagggcgacctgagcaccaagtacgatgcgccctttgtctttgcggaggtcaatgccgacgtggtagactggatccagcaggacgatgggtctgtgcacaaatccatcaaccgttccctgatcgttgggctgaagatcagcactaagagcgtgggccgagacgagcgggaggatatcacccacacctacaaatacccagaggggtcctcagaggagagggaggccttcacaagggcgaaccacctgaacaaactggccgagaaggaggagacagggatggccatgcggatccgtgtgggccagagcatgaacatgggcagtgactttgacgtctttgcccacatcaccaacaacaccgctgaggagtacgtctgccgcctcctgctctgtgcccgcaccgtcagctacaatgggatcttggggcccgagtgtggcaccaagtacctgctcaacctcaacctggagcctttctctgagaagagcgttcctctttgcatcctctatgagaaataccgtgactgccttacggagtccaacctcatcaaggtgcgggccctcctcgtggagccagttatcaacagctacctgctggctgagagggacctctacctggagaatccagaaatcaagatccggatccttggggagcccaagcagaaacgcaagctggtggctgaggtgtccctgcagaacccgctccctgtggccctggaaggctgcaccttcactgtggagggggccggcctgactgaggagcagaagacggtggagatcccagaccccgtggaggcaggggaggaagttaaggtgagaatggacctgctgccgctccacatgggcctccacaagctggtggtgaacttcgagagcgacaagctgaaggctgtgaagggcttccggaatgtcatcattggccccgcctaagggacccctgctcccagcctgctgagagcccccaccttgatcccaatccttatcccaagctagtgagcaaaatatgccccttcttgggccccagaccccagggcagggtgggcagcctatgggggctctcggaaatggaatgtgcccctggcccatctcagcctcctgagcctgtgggtccccactcaccccctttgctgtgaggaatgctctgtgccagaaacagtgggagccctgaccttggctgactggggctggggtgagagaggaaagacctacattccctctcctgcccagatgccctttggaaagccattgaccacccaccatattgtttgatctacttcatagctccttggagcaggcaaaaaagggacagcatgccccttggctggatcagggaatccagctccctagactgcatcccgtacctcttcccatgactgcacccagctccaggggcccttgggacagccagagctgggtggggacagtgataggcccaaggtcccctccacatcccagcagcccaagcttaatagccctccccctcaacctcaccattgtgaagcacctactatgtgctgggtgcctcccacacttgctggggctcacggggcctccaacccatttaatcaccatgggaaactgttgtgggcgctgcttccaggataaggagactgaggcttagagagaggaggcagccccctccacacaaggtccactccctgctccacgaagccttaagccataggcccaggatatttctgagagtgaaaccatgactgtgaccaccttctgtccccagccctgtcctggttccttcctatgcccaggtaccacccttcagaccccagttctaggggagaagagccctggacacccctgctctacccatgagcctgcccgctgcaatgcctagacttcccaacagccttagctgccagtgctggtcactaaccaacaaggttggcaccccagctaccccttctttgcagggctaaggcccccaaacatagcccctgccccggaggaagcttggggaacccatgagttgtcagctttgactttatctcctgctctttctacatgactgggcctcccttgggctggaagaattggggattctctattggaggtgagatcacagcctccagggccccccaaatcccagggaaggacttggagagaatcatgctgttgcatttagaactttctgctttgcacaggaaagagtcacacaattaatcaacatgtatattttctctatacatagagctctatttctctacggttttataaaagccttgggttccaaccaggcagtagatgtgcttctgaaccgcaaggagcaaacactgaaataaaatagtttatttttcacactcaaa

SEQ ID NO: 300448 - DNA, 3732 bp, Homo sapiens
  misc_feature (3640)..(3640): n is a, c, g, or t
  misc_feature (3659)..(3659): n is a, c, g, or t
  misc_feature (3676)..(3676): n is a, c, g, or t
aacaggcgtgacgccagttctaaatcttgaaacaaaacaaaacttcaaagtacaccaaaatagaacctccttaaagcataaatctcacggagtggtcgcacttggagggtctcgccgccagtggaaggagccaccgcccccgcccgaccatggccgaggagctggtcttagagaggtgtgatctggagctggagaccaatggccgagaccaccacacggccgacctgtgccgggagaagctggtggtgcgacggggccagcccttctggctgaccctgcactttgagggccgcaactacgaggccagtgtagacagtctcaccttcagtgtcgtgaccggcccagcccctagccaggaggccgggaccaaggcccgttttccactaagagatgctgtggaggagggtgactggacagccaccgtggtggaccagcaagactgcaccctctcgctgcagctcaccaccccggccaacgcccccatcggcctgtatcgcctcagcctggaggcctccactggctaccagggatccagctttgtgctgggccacttcattttgctcttcaacgcctggtgcccagcggatgctgtgtacctggactcggaagaggagcggcaggagtatgtcctcacccagcagggctttatctaccagggctcggccaagttcatcaagaacataccttggaattttgggcagtttgaagatgggatcctagacatctgcctgatccttctagatgtcaaccccaagttcctgaagaacgccggccgtgactgctcccgccgcagcagccccgtctacgtgggccgggtggtgagtggcatggtcaactgcaacgatgaccagggtgtgctgctgggacgctgggacaacaactacggggacggcgtcagccccatgtcctggatcggcagcgtggacatcctgcggcgctggaagaaccacggctgccagcgcgtcaagtatggccagtgctgggtcttcgccgccgtggcctgcacagtgctgaggtgcctgggcatccctacccgcgtcgtgaccaactacaactcggcccatgaccagaacagcaaccttctcatcgagtacttccgcaatgagtttggggagatccagggtgacaagagcgagatgatctggaacttccactgctgggtggagtcgtggatgaccaggccggacctgcagccggggtacgagggctggcaggccctggacccaacgccccaggagaagagcgaagggacgtactgctgtggcccagttccagttcgtgccatcaaggagggcgacctgagcaccaagtacgatgcgccctttgtctttgcggaggtcaatgccgacgtggtagactggatccagcaggacgatgggtctgtgcacaaatccatcaaccgttccctgatcgttgggctgaagatcagcactaagagcgtgggccgagacgagcgggaggatatcacccacacctacaaatacccagaggggtcctcagaggagagggaggccttcacaagggcgaaccacctgaacaaactggccgagaaggaggagacagggatggccatgcggatccgtgtgggccagagcatgaacatgggcagtgactttgacgtctttgcccacatcaccaacaacaccgctgaggagtacgtctgccgcctcctgctctgtgcccgcaccgtcagctacaatgggatcttggggcccgagtgtggcaccaagtacctgctcaacctcaacctggagcctttctctgagaagagcgttcctctttgcatcctctatgagaaataccgtgactgccttacggagtccaacctcatcaaggtgcgggccctcctcgtggagccagttatcaacagctacctgctggctgagagggacctctacctggagaatccagaaatcaagatccggatccttggggagcccaagcagaaacgcaagctggtggctgaggtgtccctgcagaacccgctccctgtggccctggaaggctgcaccttcactgtggagggggccggcctgactgaggagcagaagacggtggagatcccagaccccgtggaggcaggggaggaagttaaggtgagaatggacctgctgccgctccacatgggcctccacaagctggtggtgaacttcgagagcgacaagctgaaggctgtgaagggcttccggaatgtcatcattggccccgcctaagggacccctgctcccagcctgctgagagcccccaccttgatcccaatccttatcccaagctagtgagcaaaatatgccccttcttgggccccagaccccagggcagggtgggcagcctatgggggctctcggaaatggaatgtgcccctggcccatctcagcctcctgagcctgtgggtccccactcaccccctttgctgtgaggaatgctctgtgccagaaacagtgggagccctgaccttggctgactggggctggggtgagagaggaaagacctacattccctctcctgcccagatgccctttggaaagccattgaccacccaccatattgtttgatctacttcatagctccttggagcaggcaaaaaagggacagcatgccccttggctggatcagggaatccagctccctagactgcatcccgtacctcttcccatgactgcacccagctccaggggcccttgggacagccagagctgggtggggacagtgataggcccaaggtcccctccacatcccagcagcccaagcttaatagccctccccctcaacctcaccattgtgaagcacctactatgtgctgggtgcctcccacacttgctggggctcacggggcctccaacccatttaatcaccatgggaaactgttgtgggcgctgcttccaggataaggagactgaggcttagagagaggaggcagccccctccacaccagtggcctcgtggttattagcaaggctgggtaatgtgaaggcccaagagcagagtctgggcctctgactctgagtccactgctccatttataaccccagcctgacctgagactgtcggagaggctgtctggggcctttatcaaaaaaagactcagccaagacaaggaggtagagaggggactgggggactgggagtcagagccctggctgggttcaggtcccacgtctggccaggcactgccttctcctctctgggcctttgtttccttgttggtcagaggagtgattgaaccagctcatctccaaggatcctctccactccatgtttgcaatgcttttatatggcccagccttgtaaataaccacaaggtccactccctgctccacgaagccttaagccataggcccaggatatttctgagagtgaaaccatgactgtgaccaccttctgtccccagccctgtcctggttccttcctatgcccaggtaccacccttcagaccccagttctaggggagaagagccctggacaccctgaatttggagggcaagagctgatgactttcattcacattcattagtgctctataagaatctatgtatgcctggctttcctgccaggtgtccttttgggaagaccatacttcctgtctgtgaatgaattagaaggatatttggtatttctggtgtgtaggcatcttctgatgganccaggttaggaatggcagncaccaagctatgatctncacagtgaattctcaatatattaagaaaacccatttaagttttccctcaaatctgg

SEQ ID NO: 300449 - DNA, 3873 bp, Homo sapiens
  misc_feature (3469)..(3469): n is a, c, g, or t
  misc_feature (3595)..(3595): n is a, c, g, or t
  misc_feature (3609)..(3609): n is a, c, g, or t
  misc_feature (3689)..(3689): n is a, c, g, or t
  misc_feature (3706)..(3706): n is a, c, g, or t
  misc_feature (3712)..(3712): n is a, c, g, or t
  misc_feature (3821)..(3821): n is a, c, g, or t
aacaggcgtgacgccagttctaaatcttgaaacaaaacaaaacttcaaagtacaccaaaatagaacctccttaaagcataaatctcacggagtggtcgcacttggagggtctcgccgccagtggaaggagccaccgcccccgcccgaccatggccgaggagctggtcttagagaggtgtgatctggagctggagaccaatggccgagaccaccacacggccgacctgtgccgggagaagctggtggtgcgacggggccagcccttctggctgaccctgcactttgagggccgcaactacgaggccagtgtagacagtctcaccttcagtgtcgtgaccggcccagcccctagccaggaggccgggaccaaggcccgttttccactaagagatgctgtggaggagggtgactggacagccaccgtggtggaccagcaagactgcaccctctcgctgcagctcaccaccccggccaacgcccccatcggcctgtatcgcctcagcctggaggcctccactggctaccagggatccagctttgtgctgggccacttcattttgctcttcaacgcctggtgcccagcggatgctgtgtacctggactcggaagaggagcggcaggagtatgtcctcacccagcagggctttatctaccagggctcggccaagttcatcaagaacataccttggaattttgggcagtttgaagatgggatcctagacatctgcctgatccttctagatgtcaaccccaagttcctgaagaacgccggccgtgactgctcccgccgcagcagccccgtctacgtgggccgggtggtgagtggcatggtcaactgcaacgatgaccagggtgtgctgctgggacgctgggacaacaactacggggacggcgtcagccccatgtcctggatcggcagcgtggacatcctgcggcgctggaagaaccacggctgccagcgcgtcaagtatggccagtgctgggtcttcgccgccgtggcctgcacagtgctgaggtgcctgggcatccctacccgcgtcgtgaccaactacaactcggcccatgaccagaacagcaaccttctcatcgagtacttccgcaatgagtttggggagatccagggtgacaagagcgagatgatctggaacttccactgctgggtggagtcgtggatgaccaggccggacctgcagccggggtacgagggctggcaggccctggacccaacgccccaggagaagagcgaagggacgtactgctgtggcccagttccagttcgtgccatcaaggagggcgacctgagcaccaagtacgatgcgccctttgtctttgcggaggtcaatgccgacgtggtagactggatccagcaggacgatgggtctgtgcacaaatccatcaaccgttccctgatcgttgggctgaagatcagcactaagagcgtgggccgagacgagcgggaggatatcacccacacctacaaatacccagaggggtcctcagaggagagggaggccttcacaagggcgaaccacctgaacaaactggccgagaaggaggagacagggatggccatgcggatccgtgtgggccagagcatgaacatgggcagtgactttgacgtctttgcccacatcaccaacaacaccgctgaggagtacgtctgccgcctcctgctctgtgcccgcaccgtcagctacaatgggatcttggggcccgagtgtggcaccaagtacctgctcaacctcaacctggagcctttctctgagaagagcgttcctctttgcatcctctatgagaaataccgtgactgccttacggagtccaacctcatcaaggtgcgggccctcctcgtggagccagttatcaacagctacctgctggctgagagggacctctacctggagaatccagaaatcaagatccggatccttggggagcccaagcagaaacgcaagctggtggctgaggtgtccctgcagaacccgctccctgtggccctggaaggctgcaccttcactgtggagggggccggcctgactgaggagcagaagacggtggagatcccagaccccgtggaggcaggggaggaagttaaggtgagaatggacctgctgccgctccacatgggcctccacaagctggtggtgaacttcgagagcgacaagctgaaggctgtgaagggcttccggaatgtcatcattggccccgcctaagggacccctgctcccagcctgctgagagcccccaccttgatcccaatccttatcccaagctagtgagcaaaatatgccccttcttgggccccagaccccagggcagggtgggcagcctatgggggctctcggaaatggaatgtgcccctggcccatctcagcctcctgagcctgtgggtccccactcaccccctttgctgtgaggaatgctctgtgccagaaacagtgggagccctgaccttggctgactggggctggggtgagagaggaaagacctacattccctctcctgcccagatgccctttggaaagccattgaccacccaccatattgtttgatctacttcatagctccttggagcaggcaaaaaagggacagcatgccccttggctggatcagggaatccagctccctagactgcatcccgtacctcttcccatgactgcacccagctccaggggcccttgggacagccagagctgggtggggacagtgataggcccaaggtcccctccacatcccagcagcccaagcttaatagccctccccctcaacctcaccattgtgaagcacctactatgtgctgggtgcctcccacacttgctggggctcacggggcctccaacccatttaatcaccatgggaaactgttgtgggcgctgcttccaggataaggagactgaggcttagagagaggaggcagccccctccacaccagtggcctcgtggttattagcaaggctgggtaatgtgaaggcccaagagcagagtctgggcctctgactctgagtccactgctccatttataaccccagcctgacctgagactgtcggagaggctgtctggggcctttatcaaaaaaagactcagccaagacaaggaggtagagaggggactgggggactgggagtcagagccctggctgggttcaggtcccacgtctggccaggcactgccttctcctctctgggcctttgtttccttgttggtcagaggagtgattgaaccagctcatctccaaggatcctctccactccatgtttgcaatgcttttatatggcccagccttgtaaataaccacaaggtccactccctgctccacgaagccttaagccataggcccaggatatttctgagagtgaaaccatgactgtgaccaccttctgtccccagccctgtcctggttccttcctatgcccaggtaccacccttcagaccccagttctaggggagaagagccctggacaccccaangccccaggagaagagcgaagggacgtactgctgtggcccagttccagttcgtgccatcaaggagggcgacctgagcaccaagtacgatgcgcccttgtctttgcggagtcatgccgacgtggtagnctggatccagcagnacgatgggtctgtgcacaaatccatcaaccgttccctgatcgttgggctgaagatcagcactaagagcgtgggccgagangagcgggaggatatcanccacanctacaaatacccagaggggtcctcagaggagagggaggccttcacaagggcgaaccacctgaacaaactgtccgagaaggaggaggaggaattcgcccaggaggaggangaattcgcccaggaggaggaggaattcgcccaggaggaggaggaattcgccc

SEQ ID NO: 300450 - DNA, 2659 bp, Homo sapiens
aacaggcgtgacgccagttctaaatcttgaaacaaaacaaaacttcaaagtacaccaaaatagaacctccttaaagcataaatctcacggagtggtcgcacttggagggtctcgccgccagtggaaggagccaccgcccccgcccgaccatggccgaggagctggtcttagagaggtgtgatctggagctggagaccaatggccgagaccaccacacggccgacctgtgccgggagaagctggtggtgcgacggggccagcccttctggctgaccctgcactttgagggccgcaactacgaggccagtgtagacagtctcaccttcagtgtcgtgaccggcccagcccctagccaggaggccgggaccaaggcccgttttccactaagagatgctgtggaggagggtgactggacagccaccgtggtggaccagcaagactgcaccctctcgctgcagctcaccaccccggccaacgcccccatcggcctgtatcgcctcagcctggaggcctccactggctaccagggatccagctttgtgctgggccacttcattttgctcttcaacgcctggtgcccagcggatgctgtgtacctggactcggaagaggagcggcaggagtatgtcctcacccagcagggctttatctaccagggctcggccaagttcatcaagaacataccttggaattttgggcagtttgaagatgggatcctagacatctgcctgatccttctagatgtcaaccccaagttcctgaagaacgccggccgtgactgctcccgccgcagcagccccgtctacgtgggccgggtggtgagtggcatggtcaactgcaacgatgaccagggtgtgctgctgggacgctgggacaacaactacggggacggcgtcagccccatgtcctggatcggcagcgtggacatcctgcggcgctggaagaaccacggctgccagcgcgtcaagtatggccagtgctgggtcttcgccgccgtggcctgcacagtgctgaggtgcctgggcatccctacccgcgtcgtgaccaactacaactcggcccatgaccagaacagcaaccttctcatcgagtacttccgcaatgagtttggggagatccagggtgacaagagcgagatgatctggaacttccactgctgggtggagtcgtggatgaccaggccggacctgcagccggggtacgagggctggcaggccctggacccaacgccccaggagaagagcgaagggacgtactgctgtggcccagttccagttcgtgccatcaaggagggcgacctgagcaccaagtacgatgcgccctttgtctttgcggaggtcaatgccgacgtggtagactggatccagcaggacgatgggtctgtgcacaaatccatcaaccgttccctgatcgttgggctgaagatcagcactaagagcgtgggccgagacgagcgggaggatatcacccacacctacaaatacccagaggggtcctcagaggagagggaggccttcacaagggcgaaccacctgaacaaactggccgagaaggaggagacagggatggccatgcggatccgtgtgggccagagcatgaacatgggcagtgactttgacgtctttgcccacatcaccaacaacaccgctgaggagtacgtctgccgcctcctgctctgtgcccgcaccgtcagctacaatgggatcttggggcccgagtgtggcaccaagtacctgctcaacctcaacctggagcctttctctgagaagagcgttcctctttgcatcctctatgagaaataccgtgactgccttacggagtccaacctcatcaaggtgcgggccctcctcgtggagccagttatcaacagctacctgctggctgagagggacctctacctggagaatccagaaatcaagatccgggatcctctccactccatgtttgcaatgcttttatatggcccagccttgtaaataaccacaaggtccactccctgctccacgaagccttaagccataggcccaggatatttctgagagtgaaaccatgactgtgaccaccttctgtccccagccctgtcctggttccttcctatgcccaggtaccacccttcagaccccagttctaggggagaagagccctggacacccctgctctacccatgagcctgcccgctgcaatgcctagacttcccaacagccttagctgccagtgctggtcactaaccaacaaggttggcaccccagctaccccttctttgcagggctaaggcccccaaacatagcccctgccccggaggaagcttggggaacccatgagttgtcagctttgactttatctcctgctctttctacatgactgggcctcccttgggctggaagaattggggattctctattggaggtgagatcacagcctccagggccccccaaatcccagggaaggacttggagagaatcatgctgttgcatttagaactttctgctttgcacaggaaagagtcacacaattaatcaacatgtatattttctctatacatagagctctatttctctacggttttataaaagccttgggttccaaccaggcagtagatgtgcttctgaaccgcaaggagcaaacactgaaataaaatagtttatttttcacactcaaa

SEQ ID NO: 300451 - DNA, 1049 bp, Homo sapiens
tcatacgctgctctagaggataaacagacgaccacggaatctgtgaaggcccaagagcagagtctgggcctctgactctgagtccactgctccatttataaccccagcctgacctgagactgtcggagaggctgtctggggcctttatcaaaaaaagactcagccaagacaaggaggtagagaggggactgggggactgggagtcagagccctggctgggttcaggtcccacgtctggccaggcactgccttctcctctctgggcctttgtttccttgttggtcagaggagtgattgaaccagctcatctccaaggatcctctccactccatgtttgcaatgcttttatatggcccagccttgtaaataaccacaaggtccactccctgctccacgaagccttaagccataggcccaggatatttctgagagtgaaaccatgactgtgaccaccttctgtccccagccctgtcctggttccttcctatgcccaggtaccacccttcagaccccagttctaggggagaagagccctggacacccctgctctacccatgagcctgcccgctgcaatgcctagacttcccaacagccttagctgccagtgctggtcactaaccaacaaggttggcaccccagctaccccttctttgcagggctaaggcccccaaacatagcccctgccccggaggaagcttggggaacccatgagttgtcagctttgactttatctcctgctctttctacatgactgggcctcccttgggctggaagaattggggattctctattggaggtgagatcacagcctccagggccccccaaatcccagggaaggacttggagagaatcatgctgttgcatttagaactttctgctttgcacaggaaagagtcacacaattaatcaacatgtatattttctctatacatagagctctatttctctacggttttataaaagccttgggttccaaccaggcagtagatgtgcttctgaaccgcaaggagcaaacactgaaataaaatagtttatttttcacactcaaa

SEQ ID NO: 300452 - DNA, 3589 bp, Homo sapiens
aacaggcgtgacgccagttctaaatcttgaaacaaaacaaaacttcaaagtacaccaaaatagaacctccttaaagcataaatctcacggagtggtcgcacttggagggtctcgccgccagtggaaggagccaccgcccccgcccgaccatggccgaggagctggtcttagagaggtgtgatctggagctggagaccaatggccgagaccaccacacggccgacctgtgccgggagaagctggtggtgcgacggggccagcccttctggctgaccctgcactttgagggccgcaactacgaggccagtgtagacagtctcaccttcagtgtcgtgaccggcccagcccctagccaggaggccgggaccaaggcccgttttccactaagagatgctgtggaggagggtgactggacagccaccgtggtggaccagcaagactgcaccctctcgctgcagctcaccaccccggccaacgcccccatcggcctgtatcgcctcagcctggaggcctccactggctaccagggatccagctttgtgctgggccacttcattttgctcttcaacgcctggtgcccagcggatgctgtgtacctggactcggaagaggagcggcaggagtatgtcctcacccagcagggctttatctaccagggctcggccaagttcatcaagaacataccttggaattttgggcagtttgaagatgggatcctagacatctgcctgatccttctagatgtcaaccccaagttcctgaagaacgccggccgtgactgctcccgccgcagcagccccgtctacgtgggccgggtggtgagtggcatggtcaactgcaacgatgaccagggtgtgctgctgggacgctgggacaacaactacggggacggcgtcagccccatgtcctggatcggcagcgtggacatcctgcggcgctggaagaaccacggctgccagcgcgtcaagtatggccagtgctgggtcttcgccgccgtggcctgcacagtgctgaggtgcctgggcatccctacccgcgtcgtgaccaactacaactcggcccatgaccagaacagcaaccttctcatcgagtacttccgcaatgagtttggggagatccagggtgacaagagcgagatgatctggaacttccactgctgggtggagtcgtggatgaccaggccggacctgcagccggggtacgagggctggcaggccctggacccaacgccccaggagaagagcgaagggacgtactgctgtggcccagttccagttcgtgccatcaaggagggcgacctgagcaccaagtacgatgcgccctttgtctttgcggaggtcaatgccgacgtggtagactggatccagcaggacgatgggtctgtgcacaaatccatcaaccgttccctgatcgttgggctgaagatcagcactaagagcgtgggccgagacgagcgggaggatatcacccacacctacaaatacccagaggggtcctcagaggagagggaggccttcacaagggcgaaccacctgaacaaactggccgagaaggaggagacagggatggccatgcggatccgtgtgggccagagcatgaacatgggcagtgactttgacgtctttgcccacatcaccaacaacaccgctgaggagtacgtctgccgcctcctgctctgtgcccgcaccgtcagctacaatgggatcttggggcccgagtgtggcaccaagtacctgctcaacctcaacctggagcctttctctgagaagagcgttcctctttgcatcctctatgagaaataccgtgactgccttacggagtccaacctcatcaaggtgcgggccctcctcgtggagccagttatcaacagctacctgctggctgagagggacctctacctggagaatccagaaatcaagatccggatccttggggagcccaagcagaaacgcaagctggtggctgaggtgtccctgcagaacccgctccctgtggccctggaaggctgcaccttcactgtggagggggccggcctgactgaggagcagaagacggtggagatcccagaccccgtggaggcaggggaggaagttaaggtgagaatggacctgctgccgctccacatgggcctccacaagctggtggtgaacttcgagagcgacaagctgaaggctgtgaagggcttccggaatgtcatcattggccccgcctaagggacccctgctcccagcctgctgagagcccccaccttgatcccaatccttatcccaagctagtgagcaaaatatgccccttcttgggccccagaccccagggcagggtgggcagcctatgggggctctcggaaatggaatgtgcccctggcccatctcagcctcctgagcctgtgggtccccactcaccccctttgctgtgaggaatgctctgtgccagaaacagtgggagccctgaccttggctgactggggctggggtgagagaggaaagacctacattccctctcctgcccagatgccctttggaaagccattgaccacccaccatattgtttgatctacttcatagctccttggagcaggcaaaaaagggacagcatgccccttggctggatcagggaatccagctccctagactgcatcccgtacctcttcccatgactgcacccagctccaggggcccttgggacagccagagctgggtggggacagtgataggcccaaggtcccctccacatcccagcagcccaagcttaatagccctccccctcaacctcaccattgtgaagcacctactatgtgctgggtgcctcccacacttgctggggctcacggggcctccaacccatttaatcaccatgggaaactgttgtgggcgctgcttccaggataaggagactgaggcttagagagaggaggcagccccctccacaccagtggcctcgtggttattagcaaggctgggtaatgtgaaggcccaagagcagagtctgggcctctgactctgagtccactgctccatttataaccccagcctgacctgagactgtcggagaggctgtctggggcctttatcaaaaaaagactcagccaagacaaggaggtagagaggggactgggggactgggagtcagagccctggctgggttcaggtcccacgtctggccaggcactgccttctcctctctgggcctttgtttccttgttggtcagaggagtgattgaaccagctcatctccaaggatcctctccactccatgtttgcaatgcttttatatggcccagccttgtaaataaccacaaggtccactccctgctccacgaagccttaagccataggcccaggatatttctgagaagggccccccaaatcccagggaaggacttggagagaatcatgctgttgcatttagaactttctgctttgcacaggaaagagtcacacaattaatcaacatgtatattttctctatacatagagctctatttctctacggttttataaaagccttgggttccaaccaggcagtagatgtgcttctgaaccgcaaggagcaaacactgaaataaaatagtttatttttcacactcaaa

SEQ ID NO: 300453 - DNA, 1069 bp, Homo sapiens
gctcctcgctgggaaccctggagccacagtggggagttcagggatccgcccagccattcccccgctgtgtgaccccaagcacattccttcccctctctgtgcctcttggagttgcaagagagttgggaggggtgattctgcatcatgagcaccctcctttctccccttctgcagagaagagcgttcctctttgcatcctctatgagaaataccgtgactgccttacggagtccaacctcatcaaggtgcgggccctcctcgtggagccagttatcaacagctacctgctggctgagagggacctctacctggagaatccagaaatcaagatccgggatcctctccactccatgtttgcaatgcttttatatggcccagccttgtaaataaccacaaggtccactccctgctccacgaagccttaagccataggcccaggatatttctgagagtgaaaccatgactgtgaccaccttctgtccccagccctgtcctggttccttcctatgcccaggtaccacccttcagaccccagttctaggggagaagagccctggacacccctgctctacccatgagcctgcccgctgcaatgcctagacttcccaacagccttagctgccagtgctggtcactaaccaacaaggttggcaccccagctaccccttctttgcagggctaaggcccccaaacatagcccctgccccggaggaagcttggggaacccatgagttgtcagctttgactttatctcctgctctttctacatgactgggcctcccttgggctggaagaattggggattctctattggaggtgagatcacagcctccagggccccccaaatcccagggaaggacttggagagaatcatgctgttgcatttagaactttctgctttgcacaggaaagagtcacacaattaatcaacatgtatattttctctatacatagagctctatttctctacggttttataaaagccttgggttccaaccaggcagtagatgtgcttctgaaccgcaaggagcaaacactgaaataaaatagtttatttttcacactcaaa

SEQ ID NO: 300454 - DNA, 3177 bp, Homo sapiens
  misc_feature (3125)..(3125): n is a, c, g, or t
aacaggcgtgacgccagttctaaatcttgaaacaaaacaaaacttcaaagtacaccaaaatagaacctccttaaagcataaatctcacggagtggtcgcacttggagggtctcgccgccagtggaaggagccaccgcccccgcccgaccatggccgaggagctggtcttagagaggtgtgatctggagctggagaccaatggccgagaccaccacacggccgacctgtgccgggagaagctggtggtgcgacggggccagcccttctggctgaccctgcactttgagggccgcaactacgaggccagtgtagacagtctcaccttcagtgtcgtgaccggcccagcccctagccaggaggccgggaccaaggcccgttttccactaagagatgctgtggaggagggtgactggacagccaccgtggtggaccagcaagactgcaccctctcgctgcagctcaccaccccggccaacgcccccatcggcctgtatcgcctcagcctggaggcctccactggctaccagggatccagctttgtgctgggccacttcattttgctcttcaacgcctggtgcccagcggatgctgtgtacctggactcggaagaggagcggcaggagtatgtcctcacccagcagggctttatctaccagggctcggccaagttcatcaagaacataccttggaattttgggcagtttgaagatgggatcctagacatctgcctgatccttctagatgtcaaccccaagttcctgaagaacgccggccgtgactgctcccgccgcagcagccccgtctacgtgggccgggtggtgagtggcatggtcaactgcaacgatgaccagggtgtgctgctgggacgctgggacaacaactacggggacggcgtcagccccatgtcctggatcggcagcgtggacatcctgcggcgctggaagaaccacggctgccagcgcgtcaagtatggccagtgctgggtcttcgccgccgtggcctgcacagtgctgaggtgcctgggcatccctacccgcgtcgtgaccaactacaactcggcccatgaccagaacagcaaccttctcatcgagtacttccgcaatgagtttggggagatccagggtgacaagagcgagatgatctggaacttccactgctgggtggagtcgtggatgaccaggccggacctgcagccggggtacgagggctggcaggccctggacccaacgccccaggagaagagcgaagggacgtactgctgtggcccagttccagttcgtgccatcaaggagggcgacctgagcaccaagtacgatgcgccctttgtctttgcggaggtcaatgccgacgtggtagactggatccagcaggacgatgggtctgtgcacaaatccatcaaccgttccctgatcgttgggctgaagatcagcactaagagcgtgggccgagacgagcgggaggatatcacccacacctacaaatacccagaggggtcctcagaggagagggaggccttcacaagggcgaaccacctgaacaaactggccgagaaggaggagacagggatggccatgcggatccgtgtgggccagagcatgaacatgggcagtgactttgacgtctttgcccacatcaccaacaacaccgctgaggagtacgtctgccgcctcctgctctgtgcccgcaccgtcagctacaatgggatcttggggcccgagtgtggcaccaagtacctgctcaacctcaacctggagcctttctctgagaagagcgttcctctttgcatcctctatgagaaataccgtgactgccttacggagtccaacctcatcaaggtgcgggccctcctcgtggagccagttatcaacagctacctgctggctgagagggacctctacctggagaatccagaaatcaagatccggatccttggggagcccaagcagaaacgcaagctggtggctgaggtgtccctgcagaacccgctccctgtggccctggaaggctgcaccttcactgtggagggggccggcctgactgaggagcagaagacggtggagatcccagaccccgtggaggcaggggaggaagttaaggtgagaatggacctgctgccgctccacatgggcctccacaagctggtggtgaacttcgagagcgacaagctgaaggctgtgaagggcttccggaatgtcatcattggccccgcctaagggacccctgctcccagcctgctgagagcccccaccttgatcccaatccttatcccaagctagtgagcaaaatatgccccttcttgggccccagaccccagggcagggtgggcagcctatgggggctctcggaaatggaatgtgcccctggcccatctcagcctcctgagcctgtgggtccccactcaccccctttgctgtgaggaatgctctgtgccagaaacagtgggagccctgaccttggctgactggggctggggtgagagaggaaagacctacattccctctcctgcccagatgccctttggaaagccattgaccacccaccatattgtttgatctacttcatagctccttggagcaggcaaaaaagggacagcatgccccttggctggatcagggaatccagctccctagactgcatcccgtacctcttcccatgactgcacccagctccaggggcccttgggacagccagagctgggtggggacagtgataggcccaaggtcccctccacatcccagcagcccaagcttaatagccctccccctcaacctcaccattgtgaagcacctactatgtgctgggtgcctcccacacttgctggggctcacggggcctccaacccatttaatcaccatgggaaactgttgtgggcgctgcttccaggataaggagactgaggcttagagagaggaggcagccccctccacaccagtggcctcgtggttattagcaaggctgggtaatgtgaaggcccaagagcagagtctgggcctctgactctgagtccactgctccatttataaccccagcctgacctgagactgtcggagaggctgtctggggcctttatcaaaaaaagactcagccaagacaaggaggaggaggaattcgcccaggaggaggangaattcgcccaggaggaggaggaattcgcccaggaggaggaggaattcgccc

SEQ ID NO: 300455 - DNA, 2239 bp, Homo sapiens
aacaggcgtgacgccagttctaaatcttgaaacaaaacaaaacttcaaagtacaccaaaatagaacctccttaaagcataaatctcacggagtggtcgcacttggagggtctcgccgccagtggaaggagccaccgcccccgcccgaccatggccgaggagctggtcttagagaggtgtgatctggagctggagaccaatggccgagaccaccacacggccgacctgtgccgggagaagctggtggtgcgacggggccagcccttctggctgaccctgcactttgagggccgcaactacgaggccagtgtagacagtctcaccttcagtgtcgtgaccggcccagcccctagccaggaggccgggaccaaggcccgttttccactaagagatgctgtggaggagggtgactggacagccaccgtggtggaccagcaagactgcaccctctcgctgcagctcaccaccccggccaacgcccccatcggcctgtatcgcctcagcctggaggcctccactggctaccagggatccagctttgtgctgggccacttcattttgctcttcaacgcctggtgcccagcggatgctgtgtacctggactcggaagaggagcggcaggagtatgtcctcacccagcagggctttatctaccagggctcggccaagttcatcaagaacataccttggaattttgggcagtttgaagatgggatcctagacatctgcctgatccttctagatgtcaaccccaagttcctgaagaacgccggccgtgactgctcccgccgcagcagccccgtctacgtgggccgggtggtgagtggcatggtcaactgcaacgatgaccagggtgtgctgctgggacgctgggacaacaactacggggacggcgtcagccccatgtcctggatcggcagcgtggacatcctgcggcgctggaagaaccacggctgccagcgcgtcaagtatggccagtgctgggtcttcgccgccgtggcctgcacagtgctgaggtgcctgggcatccctacccgcgtcgtgaccaactacaactcggcccatgaccagaacagcaaccttctcatcgagtacttccgcaatgagtttggggagatccagggtgacaagagcgagatgatctggaacttccactgctgggtggagtcgtggatgaccaggccggacctgcagccggggtacgagggctggcaggccctggacccaacgccccaggagaagagcgaagggacgtactgctgtggcccagttccagttcgtgccatcaaggagggcgacctgagcaccaagtacgatgcgccctttgtctttgcggaggtcaatgccgacgtggtagactggatccagcaggacgatgggtctgtgcacaaatccatcaaccgttccctgatcgttgggctgaagatcagcactaagagcgtgggccgagacgagcgggaggatatcacccacacctacaaatacccagaggggtcctcagaggagagggaggccttcacaagggcgaaccacctgaacaaactggccgagaaggaggagacagggatggccatgcggatccgtgtgggccagagcatgaacatgggcagtgactttgacgtctttgcccacatcaccaacaacaccgctgaggagtacgtctgccgcctcctgctctgtgcccgcaccgtcagctacaatgggatcttggggcccgagtgtggcaccaagtacctgctcaacctcaacctggagcctttctctggtaaagccctgtgttcctggagcatttgttgaccgccaactgacaacatgctaggtagtgacctaaccacttagcatgtgtgatttcaccccacagacacttacatggcgctgactctggggcaggccctgtcctaagcactttataaatatcaacccacttaattcttattgcaagatgaggctggtccaagtcccctgttggaacctccaatgccaagctcaagctgagatgcgttccctctaagcccccatactgtggttgagttacttgttattctttgatgataagatctggggaatttccgtgtgctggtggacaggaagccaggccctggatggctgaaaggaatccagttgcccccacccctgcctcctttctctgctgcttctttctcttctccttcctgcctccaccctttcatgctctctcctccctcatcccagtgacgttcctcatcccgggatcctctaga

SEQ ID NO: 300456 - DNA, 2514 bp, Homo sapiens
aacaggcgtgacgccagttctaaatcttgaaacaaaacaaaacttcaaagtacaccaaaatagaacctccttaaagcataaatctcacggagtggtcgcacttggagggtctcgccgccagtggaaggagccaccgcccccgcccgaccatggccgaggagctggtcttagagaggtgtgatctggagctggagaccaatggccgagaccaccacacggccgacctgtgccgggagaagctggtggtgcgacggggccagcccttctggctgaccctgcactttgagggccgcaactacgaggccagtgtagacagtctcaccttcagtgtcgtgaccggcccagcccctagccaggaggccgggaccaaggcccgttttccactaagagatgctgtggaggagggtgactggacagccaccgtggtggaccagcaagactgcaccctctcgctgcagctcaccaccccggccaacgcccccatcggcctgtatcgcctcagcctggaggcctccactggctaccagggatccagctttgtgctgggccacttcattttgctcttcaacgcctggtgcccagcggatgctgtgtacctggactcggaagaggagcggcaggagtatgtcctcacccagcagggctttatctaccagggctcggccaagttcatcaagaacataccttggaattttgggcagtttgaagatgggatcctagacatctgcctgatccttctagatgtcaaccccaagttcctgaagaacgccggccgtgactgctcccgccgcagcagccccgtctacgtgggccgggtggtgagtggcatggtcaactgcaacgatgaccagggtgtgctgctgggacgctgggacaacaactacggggacggcgtcagccccatgtcctggatcggcagcgtggacatcctgcggcgctggaagaaccacggctgccagcgcgtcaagtatggccagtgctgggtcttcgccgccgtggcctgcacagtgctgaggtgcctgggcatccctacccgcgtcgtgaccaactacaactcggcccatgaccagaacagcaaccttctcatcgagtacttccgcaatgagtttggggagatccagggtgacaagagcgagatgatctggaacttccactgctgggtggagtcgtggatgaccaggccggacctgcagccggggtacgagggctggcaggccctggacccaacgccccaggagaagagcgaagggacgtactgctgtggcccagttccagttcgtgccatcaaggagggcgacctgagcaccaagtacgatgcgccctttgtctttgcggaggtcaatgccgacgtggtagactggatccagcaggacgatgggtctgtgcacaaatccatcaaccgttccctgatcgttgggctgaagatcagcactaagagcgtgggccgagacgagcgggaggatatcacccacacctacaaatacccagaggggtcctcagaggagagggaggccttcacaagggcgaaccacctgaacaaactggccgagaaggaggagacagggatggccatgcggatccgtgtgggccagagcatgaacatgggcagtgactttgacgtctttgcccacatcaccaacaacaccgctgaggagtacgtctgccgcctcctgctctgtgcccgcaccgtcagctacaatgggatcttggggcccgagtgtggcaccaagtacctgctcaacctcaacctggagcctttctctggtaaagccctgtgttcctggagcatttgttgaccgccaactgacaacatgctaggtagtgacctaaccacttagcatgtgtgatttcaccccacagacacttacatggcgctgactctggggcaggccctgtcctaagcactttataaatatcaacccacttaattcttattgcaagagtgagggggtggattctaacatggctccgttttccagatgagtagactgaggcacagagaggttaagtaattttcttaaggttgcacagttggggagttaacctgtcctcacagcagctatactgtttggtttcacctcatcttcgtgtgacccctgactgctttcacagaccctctgctgccctctcccagtgaattccactgtctccagcccctcatgcctcagcagcctctctccatgggcccttcgagaacctctcctgtgcctctggttgctctcggcctcaaagaaaagtctctaacccagcgccttggaaagtgcctgttgcactttccacagtgatggagacgtgctgagtctgcaccgcctatccagcatggctgccaccagctgcacgtggctgctaagcgcttgaaatgtggctggtgcaaccgtagaactaaagtttgtttgtttgtttgcttgtttttttattttttttgagatggagtcttactctgttgcccagtctgcagtgcagtggcacgatctcagctcactgcaatctcagcctcccaagtagctgggatta

SEQ ID NO: 300457 - DNA, 2668 bp, Homo sapiens
aacaggcgtgacgccagttctaaatcttgaaacaaaacaaaacttcaaagtacaccaaaatagaacctccttaaagcataaatctcacggagtggtcgcacttggagggtctcgccgccagtggaaggagccaccgcccccgcccgaccatggccgaggagctggtcttagagaggtgtgatctggagctggagaccaatggccgagaccaccacacggccgacctgtgccgggagaagctggtggtgcgacggggccagcccttctggctgaccctgcactttgagggccgcaactacgaggccagtgtagacagtctcaccttcagtgtcgtgaccggcccagcccctagccaggaggccgggaccaaggcccgttttccactaagagatgctgtggaggagggtgactggacagccaccgtggtggaccagcaagactgcaccctctcgctgcagctcaccaccccggccaacgcccccatcggcctgtatcgcctcagcctggaggcctccactggctaccagggatccagctttgtgctgggccacttcattttgctcttcaacgcctggtgcccagcggatgctgtgtacctggactcggaagaggagcggcaggagtatgtcctcacccagcagggctttatctaccagggctcggccaagttcatcaagaacataccttggaattttgggcagtttgaagatgggatcctagacatctgcctgatccttctagatgtcaaccccaagttcctgaagaacgccggccgtgactgctcccgccgcagcagccccgtctacgtgggccgggtggtgagtggcatggtcaactgcaacgatgaccagggtgtgctgctgggacgctgggacaacaactacggggacggcgtcagccccatgtcctggatcggcagcgtggacatcctgcggcgctggaagaaccacggctgccagcgcgtcaagtatggccagtgctgggtcttcgccgccgtggcctgcacagtgctgaggtgcctgggcatccctacccgcgtcgtgaccaactacaactcggcccatgaccagaacagcaaccttctcatcgagtacttccgcaatgagtttggggagatccagggtgacaagagcgagatgatctggaacttccactgctgggtggagtcgtggatgaccaggccggacctgcagccggggtacgagggctggcaggccctggacccaacgccccaggagaagagcgaagggacgtactgctgtggcccagttccagttcgtgccatcaaggagggcgacctgagcaccaagtacgatgcgccctttgtctttgcggaggtcaatgccgacgtggtagactggatccagcaggacgatgggtctgtgcacaaatccatcaaccgttccctgatcgttgggctgaagatcagcactaagagcgtgggccgagacgagcgggaggatatcacccacacctacaaatacccagaggggtcctcagaggagagggaggccttcacaagggcgaaccacctgaacaaactggccgagaaggaggagacagggatggccatgcggatccgtgtgggccagagcatgaacatgggcagtgactttgacgtctttgcccacatcaccaacaacaccgctgaggagtacgtctgccgcctcctgctctgtgcccgcaccgtcagctacaatgggatcttggggcccgagtgtggcaccaagtacctgctcaacctcaacctggagcctttctctgagaagagcgttcctctttgcatcctctatgagaaataccgtgactgccttacggagtccaacctcatcaaggtgcgggccctcctcgtggagccagttatcaacagctacctgctggctgagagggacctctacctggagaatccagaaatcaagatccggatccttggggagcccaagcagaaacgcaagctggtggctgaggtgtccctgcagaacccgctccctgtggccctggaaggctgcaccttcactgtggagggggccggcctgactgaggagcagaagacggtggagatgtaagtgctggctgctctagctttggggcctgggggaagcgggcagatgccggtgggggtagagactgtccttaggtaccaagccctggctgaaaatcccctcctctcatctcccacacagctgtgcccactcccagacaccctggggctagagttcccaccgtcacattctctgtcaatgctgacaccacccatgcacagatctgccacagacctccacagtgacatcatccgtcaataggcgctcacctgcagacacgtgcatcctcacatagacaggtatctgccctccgaatgtccacacatgagcatgcacacacatatgcatgcgtgggtgtttccacatagatacgtagctgcacacatacatacgagcacacacttcttttttacttttttactgtaatgtaacttatatacagtaaaaagcacagatcacctatgtacagctcaatacattttcacacacacggctacctgagcctatccccttgtgcccctaaatgcaccatctgcttttatgcacacggagcggcacatcgatgggttatcctctgagtcgagtgcatactgaggcatcagcgatagaaagcaataaaaagacag

SEQ ID NO: 300458 - DNA, 1929 bp, Homo sapiens
aacaggcgtgacgccagttctaaatcttgaaacaaaacaaaacttcaaagtacaccaaaatagaacctccttaaagcataaatctcacggagtggtcgcacttggagggtctcgccgccagtggaaggagccaccgcccccgcccgaccatggccgaggagctggtcttagagaggtgtgatctggagctggagaccaatggccgagaccaccacacggccgacctgtgccgggagaagctggtggtgcgacggggccagcccttctggctgaccctgcactttgagggccgcaactacgaggccagtgtagacagtctcaccttcagtgtcgtgaccggcccagcccctagccaggaggccgggaccaaggcccgttttccactaagagatgctgtggaggagggtgactggacagccaccgtggtggaccagcaagactgcaccctctcgctgcagctcaccaccccggccaacgcccccatcggcctgtatcgcctcagcctggaggcctccactggctaccagggatccagctttgtgctgggccacttcattttgctcttcaacgcctggtgcccagcggatgctgtgtacctggactcggaagaggagcggcaggagtatgtcctcacccagcagggctttatctaccagggctcggccaagttcatcaagaacataccttggaattttgggcagtttgaagatgggatcctagacatctgcctgatccttctagatgtcaaccccaagttcctgaagaacgccggccgtgactgctcccgccgcagcagccccgtctacgtgggccgggtggtgagtggcatggtcaactgcaacgatgaccagggtgtgctgctgggacgctgggacaacaactacggggacggcgtcagccccatgtcctggatcggcagcgtggacatcctgcggcgctggaagaaccacggctgccagcgcgtcaagtatggccagtgctgggtcttcgccgccgtggcctgcacagtgctgaggtgcctgggcatccctacccgcgtcgtgaccaactacaactcggcccatgaccagaacagcaaccttctcatcgagtacttccgcaatgagtttggggagatccagggtgacaagagcgagatgatctggaacttccactgctgggtggagtcgtggatgaccaggccggacctgcagccggggtacgagggctggcaggccctggacccaacgccccaggagaagagcgaagggacgtactgctgtggcccagttccagttcgtgccatcaaggagggcgacctgagcaccaagtacgatgcgccctttgtctttgcggaggtcaatgccgacgtggtagactggatccagcaggacgatgggtctgtgcacaaatccatcaaccgttccctgatcgttgggctgaagatcagcactaagagcgtgggccgagacgagcgggaggatatcacccacacctacaaatacccagaggggtcctcagaggagagggaggccttcacaagggcgaaccacctgaacaaactggccgagaaggaggagacagggatggccatgcggatccgtgtgggccagagcatgaacatgggcagtgactttgacgtctttgcccacatcaccaacaacaccgctgaggagtacgtctgccgcctcctgctctgtgcccgcaccgtcagagggccccccaaatcccagggaaggacttggagagaatcatgctgttgcatttagaactttctgctttgcacaggaaagagtcacacaattaatcaacatgtatattttctctatacatagagctctatttctctacggttttataaaagccttgggttccaaccaggcagtagatgtgcttctgaaccgcaaggagcaaacactgaaataaaatagtttatttttcacactcaaa

SEQ ID NO: 300459 - DNA, 1780 bp, Homo sapiens
aacaggcgtgacgccagttctaaatcttgaaacaaaacaaaacttcaaagtacaccaaaatagaacctccttaaagcataaatctcacggagtggtcgcacttggagggtctcgccgccagtggaaggagccaccgcccccgcccgaccatggccgaggagctggtcttagagaggtgtgatctggagctggagaccaatggccgagaccaccacacggccgacctgtgccgggagaagctggtggtgcgacggggccagcccttctggctgaccctgcactttgagggccgcaactacgaggccagtgtagacagtctcaccttcagtgtcgtgaccggcccagcccctagccaggaggccgggaccaaggcccgttttccactaagagatgctgtggaggagggtgactggacagccaccgtggtggaccagcaagactgcaccctctcgctgcagctcaccaccccggccaacgcccccatcggcctgtatcgcctcagcctggaggcctccactggctaccagggatccagctttgtgctgggccacttcattttgctcttcaacgcctggtgcccagcggatgctgtgtacctggactcggaagaggagcggcaggagtatgtcctcacccagcagggctttatctaccagggctcggccaagttcatcaagaacataccttggaattttgggcagtttgaagatgggatcctagacatctgcctgatccttctagatgtcaaccccaagttcctgaagaacgccggccgtgactgctcccgccgcagcagccccgtctacgtgggccgggtggtgagtggcatggtcaactgcaacgatgaccagggtgtgctgctgggacgctgggacaacaactacggggacggcgtcagccccatgtcctggatcggcagcgtggacatcctgcggcgctggaagaaccacggctgccagcgcgtcaagtatggccagtgctgggtcttcgccgccgtggcctgcacagtgctgaggtgcctgggcatccctacccgcgtcgtgaccaactacaactcggcccatgaccagaacagcaaccttctcatcgagtacttccgcaatgagtttggggagatccagggtgacaagagcgagatgatctggaacttccactgctgggtggagtcgtggatgaccaggccggacctgcagccggggtacgagggctggcaggccctggacccaacgccccaggagaagagcgaagggacgtactgctgtggcccagttccagttcgtgccatcaaggagggcgacctgagcaccaagtacgatgcgccctttgtctttgcggaggtcaatgccgacgtggtagactggatccagcaggacgatgggtctgtgcacaaatccatcaaccgttccctgatcgttgggctgaagatcagcactaagagcgtgggccgagacgagcgggaggatatcacccacacctacaaatacccagaggggtcctcagaggagagggaggccttcacaagggcgaaccacctgaacaaactggccgagaaggaggagacagggatggccatgcggatccgtgtgggccagagcatgaacatgggcagtgactttgacgtctttgcccacatcaccaacaatcacatcatgcatgatgtgatttgccacaacagtgaagtccatggacccagggacgtcgagacatcagtgtacccttgtatcatgtgtaggaaaccagaatgtgtccttatttctggttcccaaacaggattactgtg

SEQ ID NO: 300460 - DNA, 1733 bp, Homo sapiens
aacaggcgtgacgccagttctaaatcttgaaacaaaacaaaacttcaaagtacaccaaaatagaacctccttaaagcataaatctcacggagtggtcgcacttggagggtctcgccgccagtggaaggagccaccgcccccgcccgaccatggccgaggagctggtcttagagaggtgtgatctggagctggagaccaatggccgagaccaccacacggccgacctgtgccgggagaagctggtggtgcgacggggccagcccttctggctgaccctgcactttgagggccgcaactacgaggccagtgtagacagtctcaccttcagtgtcgtgaccggcccagcccctagccaggaggccgggaccaaggcccgttttccactaagagatgctgtggaggagggtgactggacagccaccgtggtggaccagcaagactgcaccctctcgctgcagctcaccaccccggccaacgcccccatcggcctgtatcgcctcagcctggaggcctccactggctaccagggatccagctttgtgctgggccacttcattttgctcttcaacgcctggtgcccagcggatgctgtgtacctggactcggaagaggagcggcaggagtatgtcctcacccagcagggctttatctaccagggctcggccaagttcatcaagaacataccttggaattttgggcagtttgaagatgggatcctagacatctgcctgatccttctagatgtcaaccccaagttcctgaagaacgccggccgtgactgctcccgccgcagcagccccgtctacgtgggccgggtggtgagtggcatggtcaactgcaacgatgaccagggtgtgctgctgggacgctgggacaacaactacggggacggcgtcagccccatgtcctggatcggcagcgtggacatcctgcggcgctggaagaaccacggctgccagcgcgtcaagtatggccagtgctgggtcttcgccgccgtggcctgcacagtgctgaggtgcctgggcatccctacccgcgtcgtgaccaactacaactcggcccatgaccagaacagcaaccttctcatcgagtacttccgcaatgagtttggggagatccagggtgacaagagcgagatgatctggaacttccactgctgggtggagtcgtggatgaccaggccggacctgcagccggggtacgagggctggcaggccctggacccaacgccccaggagaagagcgaagggacgtactgctgtggcccagttccagttcgtgccatcaaggagggcgacctgagcaccaagtacgatgcgccctttgtctttgcggaggtcaatgccgacgtggtagactggatccagcaggacgatgggtctgtgcacaaatccatcaaccgttccctgatcgttgggctgaagatcagcactaagagcgtcgtgaccaactacaactcggcccatgaccagaacagcaaccttctcatcgagtactagggccccccaaatcccagggaaggacttggagagaatcatgctgttgcatttagaactttctgctttgcacaggaaagagtcacacaattaatcaacatgtatattttctctatacatagagctctatttctctacggttttataaaagccttgggttccaaccaggcagtagatgtgcttctgaaccgcaaggagcaaacactgaaataaaatagtttatttttcacactcaaa

SEQ ID NO: 300461 - DNA, 1183 bp, Homo sapiens
  misc_feature (476)..(477): n is a, c, g, or t
gctggggccctcactcctccctgagtgcgagtgctaagaggcgtggggaggcgagaagcccgggacctttcctgaacaccttctgtcccaggcagtggtgtcagccctgggctcgggggttcctgtgtccctgacacctcggtggtgtagaaaggacccggccctcgctgctcatccaggccccgagagtccgagacaggatccatctctacaggcgtgtgggggttcaggacacaaggacacccaagttctagttcctgctgcctgctgcctgctgcctggctgtgggctcctgggtattcctctcctccagcaaggctatgggttccccattcacacaaaggggaaggtgctttcctcttttaagagcccttccagccctgttttgtgtgtgtgtatgtgtgtgtgtgtgtgtgtgtgtgtgtgtgtgtgtatacatttaggaggtccaagtgcggtttgttacacggatatannttgagcagtggtgaagtcttgggcttgacattggagacccagtcccatcgtttcagtgcacacccaccagctccttctcgtgctcagagctgctccaaggggagaaagtgtctgtcctagaatgagtggcatgaggtgaactccaggcctgggccagacacaccaaaatcacttcctcccaggcctctgtggagtcagccctcacctctaagtcaccatcgggaccctgagagcattgttccgcactggcatcagccaagcatgctgacttttctcatcctcccaggaacatgctcaccacagagggtgagcagcaggtccctcctgttggggatccactggagacatagccttcagggagaggaaggggaggacagaaggtcctgggcattggcctctggctggaaagtgaggctggtccaagtcccctgttggaacctccaatgccaagctcaagctgagatgcgttccctctaagcccccatactgtggttgagttacttgttattctttgatgataagatctggggaatttccgtgtgctggtggacaggaagccaggccctggatggctgaaaggaatccagttgcccccacccctgcctcctttctctgctgcttctttctcttctccttcctgcctccaccctttcatgctctctcctccctcatcccagtgacgttcctcatcccgggatcctctaga

SEQ ID NO: 300462 - DNA, 698 bp, Homo sapiens
tggtcgcacttggagggtctcgccgccagtggaaggagccaccgcccccgcccgaccatggccgagggtgagtatcagagtcaccgcagccgccactcaggggccccggggcattgggggtcaggacccggtgggagctgaatccctaagtcctgatttggagagcaacaggcagaccgggctgggtgaggaggcgtctcaatgctgcttggagcctcagtttccccatccacactgcataaccattaacccttgcctccctggatcaggtgaggcaatggaacgcgacggggtgttgtaaactgtaaagtactgtcctggcggaccactggcacgtgtcctcagtcagtcagtgggggctggctctctgatgtgtgcctggagctgtgcagggggtgctggcctggcctcagaacacttaggtttgggtggttcttgccagccaggaccaggtggtgtgcatgccacgccggtggtgtgcaagccaagcctggctgagtccttggctccagcggccagagaggagctttcggcatcctatccaggagccttcggaaatcaggcttgttcttcccgccctcacgttctgcaaccctagaccttggccaattgttgagtctcacctataaaataaggacaacagtgtccttattttataggacaaggtttatgagatttgttttcccccaagaccccca

SEQ ID NO: 300463 - DNA, 323 bp, Homo sapiens
ctgccttacggagtccaacctcatcaaggtgcgggccctcctcgtggagccagttatcaacagctacctgctggctgagagggacctctacctggagaatccagaaatcaagatccggggtaagggcaggctgggcaaggggcagggtcccagggcagctcagcgctggggagagggcagatccctacccccaccccacacacctgcatccctgcaagctccagacctttggtgccttagcgatcctcaaatcctagcctcatcgaagaaaagcatcatgaagcctagagaattggggactcgtagcctctaggaatgaatct

SEQ ID NO: 300464 - DNA, 363 bp, Homo sapiens
aggcccccaaaggctctgcgcagaccagcactgtctcctccttcatccacagagaggatgaaagaacatggcaagaggaagactcacagaaccccacagagaagctttgagaattgggctgtctggctctcccatcacccatttggccaccagctttggtcccagctgctgtgccctcgggggatgcattatggccctgaaaggggcccttgtccctttttggggtgtcatcctggctgggtggtatggatttctgctgtaaacatggcccatctgggagaagcccaggtgccacgttttgaacagctctgaaacttaaagctcagaaggctttgaaatgcaaatattttgaaggaaacataa

SEQ ID NO: 300465 - DNA, 2381 bp, Homo sapiens
agcgggcttcctgttccggcgccaggaggagccgcgcgctgctggtgctgttgccgccgctgctctagctgccgtcagtcaggctgcgcccgcgtcttcagggcccagtccctcggacccatcgccgcttctagaccctactgcggtctcggatattgccgggaaaatgtctgatgaattttcgttggcagatgcactacctgaacactcccctgccaaaacctctgctgtgagcaatacaaaacctggccaacctcctcaaggctggccaggctccaacccttggaataatccgagtgctccatcttcagtgccatctggactcccaccaagtgcaacaccctccactgtgccttttggaccagcaccaacaggaatgtatccctccgtgcctcccaccggaccacctccaggacccccagcaccctttcctccttccggaccatcatgtcccccacctggtggtccttatccagccccaactgtgccgggccctggccccacagggccatatcctacaccaaatatgccctttccagagctacccagaccatatggtgcacccacagatccagctgcagctggtcctttaggtccatggggatccatgtcttctggaccttgggcgccaggaatgggagggcagtatcctacccctaatatgccatatccatctccaggcccatatcccgctcctcctcctccccaagcccctggggcagcaccacctgttccatggggcaccgttccaccaggagcctggggaccaccagcaccatatcctgcccctacaggatcgtatcccacaccaggactctatcctactcccagtaatcctttccaagtgccttcaggaccttctggtgctccaccaatgcctggtggcccccattcttaccattaagttaacaatggacgaagagatgacgctttgctttttgaagtacatgtatatgcacatgaatgcatatataaaaattgctggtttcactattagagggcattcatgaaagaacaactcttgcacctctcagagaagataactgcctcttgtacttggatgcgtagtacatcatatgtatacaatcagataaaagcatagaagtaaatcattcggatgtgatttttatttggttttcatggaaagttaaagtgataaagtatattgaatagttctttgacagaatttgtttaaactatgaaactacacacttaaaaatctaagatgtggattattgttagaatctgcaacttcattggcaaattatttcaagtatttttctataatcactttccccttctaaataaataaacttcgagaataacccatcataatccaaacaaatgatgcctcaacattttgagctgctctgtcggacaaataaacctggtcctcttgaggttatattttggatatacatttttaaactgtcagtaattattgtcagatgtggagttcaatagccagccagtgttcatttttatccttgagcttttagtaaaaacttcctggttttatttttagtcattgggtcatacagcactaaagtctgctatttatggaaactaacttttttgtttttaatccaggccaacatgtatgtaaattaaatttttagataattgattatctctttgtactacttgagatttgattatgagatgtgcatattgctttgggaagagctcgaggaaggaaataattctctcctttgttttgaacctcaaactagataaaccctaggaattgcttaactgcaacaagtaattttcattcccacaaaaacctgaggcagctcttttgcccagagcgttccctgtagccacccccaccccacttgcccttggttctttagaaggagcacacacatcccttgattcctccctgatgtggtaaactggcacactccaggggtctaaaacataaaacagttgtgtttagggaaccttaagtcatgcagacatgactgttctctttgtacaagtgtgaatcaaaatatgtatctctttttcagagtctggttaagctatgtcattgtctactgcattccagcctgggtgacagagtgagactgtctcaaaaaaaaaaaaaaattaatgatggtcaaagggtataaaatctcagacaggaagaatatgttttatgctttttttgagttctgttgtacagtgtggtgcctatacttaataatggggtattatacatttcaaaattgatgttctcatcacagaaatgtatttgaagtattgcatatgttaactagcttgatttaactattccatattgtatccacaatttatgatatcactttgtaacccatacatttatacaattataaattgtcaatttacaataaaaaatttttgttgcgtctttttag

SEQ ID NO: 300466 - DNA, 438 bp, Homo sapiens
aagatggcactcaactccacttatttacctgtcaacaaatacagaactgaactgttagccataagcactttacaaacagactcaggaaactatgcagtagacaatgacatagcttaaccagactctgaaaataataataaattgtagatctctgcaactaagtttaaagcagtgtgactgtgttgcttaaatatcaagtattgtttataaccaccaaaaaaaaaaaagccctggtagttttttggcaccttatgtttaaatcagattcttagatttggagtagacctgaccttgttatttattagataacattttgaatgtatccattggatttctaaaatgtattgtgaatttctcagacaaacaggatttatgctggagctctgttttgcttagaaataaaatatttagtagtttatttctgctctaattaaaatg

SEQ ID NO: 300467 - DNA, 3581 bp, Homo sapiens
agcgggcttcctgttccggcgccaggaggagccgcgcgctgctggtgctgttgccgccgctgctctagctgccgtcagtcaggctgcgcccgcgtcttcagggcccagtccctcggacccatcgccgcttctagaccctactgcggtctcggatattgccgggaaaatgtctgatgaattttcgttggcagatgcactacctgaacactcccctgccaaaacctctgctgtgagcaatacaaaacctggccaacctcctcaaggctggccaggctccaacccttggaataatccgagtgctccatcttcagtgccatctggactcccaccaagtgcaacaccctccactgtgccttttggaccagcaccaacaggaatgtatccctccgtgcctcccaccggaccacctccaggacccccagcaccctttcctccttccggaccatcatgtcccccacctggtggtccttatccagccccaactgtgccgggccctggccccacagggccatatcctacaccaaatatgccctttccagagctacccagaccatatggtgcacccacagatccagctgcagctggtcctttaggtccatggggatccatgtcttctggaccttgggcgccaggaatgggagggcagtatcctacccctaatatgccatatccatctccaggcccatatcccgctcctcctcctccccaagcccctggggcagcaccacctgttccatggggcaccgttccaccaggagcctggggaccaccagcaccatatcctgcccctacaggatcgtatcccacaccaggactctatcctactcccagtaatcctttccaagtgccttcaggaccttctggtgctccaccaatgcctggtggcccccattcttaccattaagttaacaatggacgaagagatgacgctttgctttttgaagtacatgtatatgcacatgaatgcatatataaaaattgctggtttcactattagagggcattcatgaaagaacaactcttgcacctctcagagaagataactgcctcttgtacttggatgcgtagtacatcatatgtatacaatcagataaaagcatagaagtaaatcattcggatgtgatttttatttggttttcatggaaagttaaagtgataaagtatattgaatagttctttgacagaatttgtttaaactatgaaactacacacttaaaaatctaagatgtggattattgttagaatctgcaacttcattggcaaattatttcaagtatttttctataatcactttccccttctaaataaataaacttcgagaataacccatcataatccaaacaaatgatgcctcaacattttgagctgctctgtcggacaaataaacctggtcctcttgaggttatattttggatatacatttttaaactgtcagtaattattgtcagatgtggagttcaatagccagccagtgttcatttttatccttgagcttttagtaaaaacttcctggttttatttttagtcattgggtcatacagcactaaagtctgctatttatggaaactaacttttttgtttttaatccaggccaacatgtatgtaaattaaatttttagataattgattatctctttgtactacttgagatttgattatgagatgtgcatattgctttgggaagagctcgaggaaggaaataattctctcctttgttttgaacctcaaactagataaaccctaggaattgcttaactgcaacaagtaattttcattcccacaaaaacctgaggcagctcttttgcccagagcgttccctgtagccacccccaccccacttgcccttggttctttagaaggagcacacacatcccttgattcctccctgatgtggtaaactggcacactccaggggtctaaaacataaaacagttgtgtttagggaaccttaagtcatgcagacatgactgttctctttgtacaagtgtgaatcaaaatatgtatctctttttcagagtctggttaagctatgtcattgtctactgcatagtttcctgagtctgtttgtaaagtgcttatggctaacagttcagttctgtatttgttgacaggtaaataagtggagttgagtgccatctttgaaaaaattaccctctagctctaacactgaaaataataataaattgtagatctctgcaactaagtttaaagcagtgtgactgtgttgcttaaatatcaagtattgtttataaccaccaaaaaaaaaaaagccctggtagttttttggcaccttatgtttaaatcagattcttagatttggagtagacctgaccttgttatttattagataacattttgaatgtatccattggatttctaaaatgtattgtgaatttctcagacaaacaggatttatgctggagctctgttttgcttagaaataaaatatttagtagtttatttctgctctaattaaaatgttcactttacccctggataaaggcactttcactgcctgtcactgatcagcagatactgacttgttgccattaagtgaacttgacttcttatgtgtgctctatgagtttgttgtaattttcttcttgaaattgtgatttttcactgacagtaatgacaaatttaatgtatgtaattgtctatgcattttaagttaaactgcctaaaatgtgatttgagacatatacatatgtttgtattataaattgtaagcaatcagtttgagatactaggttttatcacctgctgctgtatttgtaaacaaagacaaatgttgctttaagaagtaattataattaggaataggctatggatgtgatacttggtattttttaagataaacttgtttgcttttgtgtattatacctggaaactttttttaaaaaatgtattttcatggtttcacagatttttcatgttattttattctttaggccccaattctgggcttcctctgagcaagtcccagagccctaattaactgtaaatttgttgtcaaaaaggaagaaaaaagggcctgagatacctctttgcatgtgacctgcattcacctaaggatatctggaaaccacccttcctccgcaaaccctctcagcaacatggtgtcccattgtggtgattttctcttcttttaaggctaggctactcttggtaaccagattatccgtatatatgataatatgaagtcagggaactttctctgtctgtccctactcccctcactcccccactttctgttatgaaagatagttctacttttatcattaactcctacgcatttagtgagggtcacattattaaacttggagtttaccattttcccacaggagatttcgctggcattccttggaactcccaatttcagtagggcaatgaatgaatgaatactttgcagtgctacttttggaaggaatttctgctttttgccttatgattggacaaaatgcagctgtaaaattttaaattgtttttgatatgttattcaatatcccatgaaagtattcacctaaagtggagttatgaaatggatggtgaaataataagaccattctggagcagggcca

SEQ ID NO: 300468 - DNA, 2480 bp, Homo sapiens
agcgggcttcctgttccggcgccaggaggagccgcgcgctgctggtgctgttgccgccgctgctctagctgccgtcagtcaggctgcgcccgcgtcttcagggcccagtccctcggacccatcgccgcttctagaccctactgcggtctcggatattgccgggaaaatgtctgatgaattttcgttggcagatgcactacctgaacactcccctgccaaaacctctgctgtgagcaatacaaaacctggccaacctcctcaaggctggccaggctccaacccttggaataatccgagtgctccatcttcagtgccatctggactcccaccaagtgcaacaccctccactgtgccttttggaccagcaccaacaggaatgtatccctccgtgcctcccaccggaccacctccaggacccccagcaccctttcctccttccggaccatcatgtcccccacctggtggtccttatccagccccaactgtgccgggccctggccccacagggccatatcctacaccaaatatgccctttccagagctacccagaccatatggtgcacccacagatccagctgcagctggtcctttaggtccatggggatccatgtcttctggaccttgggcgccaggaatgggagggcagtatcctacccctaatatgccatatccatctccaggcccatatcccgctcctcctcctccccaagcccctggggcagcaccacctgttccatggggcaccgttccaccaggagcctggggaccaccagcaccatatcctgcccctacaggatcgtatcccacaccaggactctatcctactcccagtaatcctttccaagtgccttcaggaccttctggtgctccaccaatgcctggtggcccccattcttaccattaagttaacaatggacgaagagatgacgctttgctttttgaagtacatgtatatgcacatgaatgcatatataaaaattgctggtttcactattagagggcattcatgaaagaacaactcttgcacctctcagagaagataactgcctcttgtacttggatgcgtagtacatcatatgtatacaatcagataaaagcatagaagtaaatcattcggatgtgatttttatttggttttcatggaaagttaaagtgataaagtatattgaatagttctttgacagaatttgtttaaactatgaaactacacacttaaaaatctaagatgtggattattgttagaatctgcaacttcattggcaaattatttcaagtatttttctataatcactttccccttctaaataaataaacttcgagaataacccatcataatccaaacaaatgatgcctcaacattttgagctgctctgtcggacaaataaacctggtcctcttgaggttatattttggatatacatttttaaactgtcagtaattattgtcagatgtggagttcaatagccagccagtgttcatttttatccttgagcttttagtaaaaacttcctggttttatttttagtcattgggtcatacagcactaaagtctgctatttatggaaactaacttttttgtttttaatccaggccaacatgtatgtaaattaaatttttagataattgattatctctttgtactacttgagatttgattatgagatgtgcatattgctttgggaagagctcgaggaaggaaataattctctcctttgttttgaacctcaaactagataaaccctaggaattgcttaactgcaacaagtaattttcattcccacaaaaacctgaggcagctcttttgcccagagcgttccctgtagccacccccaccccacttgcccttggttctttagaaggagcacacacatcccttgattcctccctgatgtggtaaactggcacactccaggggtctaaaacataaaacagttgtgtttagggaaccttaagtcatgcagacatgactgttctctttgtacaagtgtgaatcaaaatatgtatctctttttcagagtctggttaagctatgtcattgtctactgcatagtttcctgagtctgtttgtaaagtgcttatggctaacagttcagttctgtatttgttgacaggtaaataagtggagttgagtgccatctttgaaaaaattaccctctagctctaacactgaaaataataataaattgtagatctctgcaactaagtttaaagcagtgtgactgtgttgcttaaatatcaagtattgtttataaccaccaaaaaaaaaaaagccctggtagttttttggcaccttatgtttaaatcagattcttagatttggagtagacctgaccttgttatttattagataacattttgaatgtatccattggatttctaaaatgtattgtgaatttctcagacaaacaggatttatgctggagctctgttttgcttagaaataaaatatttagtagtttatttctgctctaattaaaatg

SEQ ID NO: 300469 - DNA, 2801 bp, Homo sapiens
agcgggcttcctgttccggcgccaggaggagccgcgcgctgctggtgctgttgccgccgctgctctagctgccgtcagtcaggctgcgcccgcgtcttcagggcccagtccctcggacccatcgccgcttctagaccctactgcggtctcggatattgccgggaaaatgtctgatgaattttcgttggcagatgcactacctgaacactcccctgccaaaacctctgctgtgagcaatacaaaacctggccaacctcctcaaggctggccaggctccaacccttggaataatccgagtgctccatcttcagtgccatctggactcccaccaagtgcaacaccctccactgtgccttttggaccagcaccaacaggaatgtatccctccgtgcctcccaccggaccacctccaggacccccagcaccctttcctccttccggaccatcatgtcccccacctggtggtccttatccagccccaactgtgccgggccctggccccacagggccatatcctacaccaaatatgccctttccagagctacccagaccatatggtgcacccacagatccagctgcagctggtcctttaggtccatggggatccatgtcttctggaccttgggcgccaggaatgggagggcagtatcctacccctaatatgccatatccatctccaggcccatatcccgctcctcctcctccccaagcccctggggcagcaccacctgttccatggggcaccgttccaccaggagcctggggaccaccagcaccatatcctgcccctacaggatcgtatcccacaccaggactctatcctactcccagtaatcctttccaagtgccttcaggaccttctggtgctccaccaatgcctggtggcccccattcttaccattaagttaacaatggacgaagagatgacgctttgctttttgaagtacatgtatatgcacatgaatgcatatataaaaattgctggtttcactattagagggcattcatgaaagaacaactcttgcacctctcagagaagataactgcctcttgtacttggatgcgtagtacatcatatgtatacaatcagataaaagcatagaagtaaatcattcggatgtgatttttatttggttttcatggaaagttaaagtgataaagtatattgaatagttctttgacagaatttgtttaaactatgaaactacacacttaaaaatctaagatgtggattattgttagaatctgcaacttcattggcaaattatttcaagtatttttctataatcactttccccttctaaataaataaacttcgagaataacccatcataatccaaacaaatgatgcctcaacattttgagctgctctgtcggacaaataaacctggtcctcttgaggttatattttggatatacatttttaaactgtcagtaattattgtcagatgtggagttcaatagccagccagtgttcatttttatccttgagcttttagtaaaaacttcctggttttatttttagtcattgggtcatacagcactaaagtctgctatttatggaaactaacttttttgtttttaatccaggccaacatgtatgtaaattaaatttttagataattgattatctctttgtactacttgagatttgattatgagatgtgcatattgctttgggaagagctcgaggaaggaaataattctctcctttgttttgaacctcaaactagataaaccctaggaattgcttaactgcaacaagtaattttcattcccacaaaaacctgaggcagctcttttgcccagagcgttccctgtagccacccccaccccacttgcccttggttctttagaaggagcacacacatcccttgattcctccctgatgtggtaaactggcacactccaggggtctaaaacataaaacagttgtgtttagggaaccttaagtcatgcagacatgactgttctctttgtacaagtgtgaatcaaaatatgtatctctttttcagagtctggttaagctatgtcattgtctactgcatagtttcctgagtctgtttgtaaagtgcttatggctaacagttcagttctgtatttgttgacaggtaaataagtggagttgagtgccatctttgaaaaaattaccctctagctctaacactgaaaataataataaattgtagatctctgcaactaagtttaaagcagtgtgactgtgttgcttaaatatcaagtattgtttataaccaccaaaaaaaaaaaagccctggtagttttttggcaccttatgtttaaatcagattcttagatttggagtagacctgaccttgttatttattagataacattttgaatgtatccattggatttctaaaatgtattgtgaatttctcagacaaacaggatttatgctggagctctgttttgcttagaaataaaatatttagtagtttatttctgctctaattaaaatgtcaagaatgccaaaaaaaaaaaaaaaaaaaaaaaaaaaaaaaaaaaaaaggggggggggggaaaaaatttccccgggggggcccaaatttcgggacccacggtttttgtgacaagggggcccaaagaggaggagcgccggaataaaagcgccaagggagagggcgcgggcggtaaaacacgccgggacggggaacaaccgggcacgcggggaactctggggaagggacccctaactcgggggggggggaccacactgcggcaccaactcccctaagagattaaacagccaagggacataacaactcacaacgagtacagcg

SEQ ID NO: 300470 - DNA, 3668 bp, Homo sapiens
agcgggcttcctgttccggcgccaggaggagccgcgcgctgctggtgctgttgccgccgctgctctagctgccgtcagtcaggctgcgcccgcgtcttcagggcccagtccctcggacccatcgccgcttctagaccctactgcggtctcggatattgccgggaaaatgtctgatgaattttcgttggcagatgcactacctgaacactcccctgccaaaacctctgctgtgagcaatacaaaacctggccaacctcctcaaggctggccaggctccaacccttggaataatccgagtgctccatcttcagtgccatctggactcccaccaagtgcaacaccctccactgtgccttttggaccagcaccaacaggaatgtatccctccgtgcctcccaccggaccacctccaggacccccagcaccctttcctccttccggaccatcatgtcccccacctggtggtccttatccagccccaactgtgccgggccctggccccacagggccatatcctacaccaaatatgccctttccagagctacccagaccatatggtgcacccacagatccagctgcagctggtcctttaggtccatggggatccatgtcttctggaccttgggcgccaggaatgggagggcagtatcctacccctaatatgccatatccatctccaggcccatatcccgctcctcctcctccccaagcccctggggcagcaccacctgttccatggggcaccgttccaccaggagcctggggaccaccagcaccatatcctgcccctacaggatcgtatcccacaccaggactctatcctactcccagtaatcctttccaagtgccttcaggaccttctggtgctccaccaatgcctggtggcccccatacaacccagtgtggggttaacatcttagttgaggagcctgccttggtcatataaccaaatggaaaagtaccccacttcccctgtgagtcttaccattaagttaacaatggacgaagagatgacgctttgctttttgaagtacatgtatatgcacatgaatgcatatataaaaattgctggtttcactattagagggcattcatgaaagaacaactcttgcacctctcagagaagataactgcctcttgtacttggatgcgtagtacatcatatgtatacaatcagataaaagcatagaagtaaatcattcggatgtgatttttatttggttttcatggaaagttaaagtgataaagtatattgaatagttctttgacagaatttgtttaaactatgaaactacacacttaaaaatctaagatgtggattattgttagaatctgcaacttcattggcaaattatttcaagtatttttctataatcactttccccttctaaataaataaacttcgagaataacccatcataatccaaacaaatgatgcctcaacattttgagctgctctgtcggacaaataaacctggtcctcttgaggttatattttggatatacatttttaaactgtcagtaattattgtcagatgtggagttcaatagccagccagtgttcatttttatccttgagcttttagtaaaaacttcctggttttatttttagtcattgggtcatacagcactaaagtctgctatttatggaaactaacttttttgtttttaatccaggccaacatgtatgtaaattaaatttttagataattgattatctctttgtactacttgagatttgattatgagatgtgcatattgctttgggaagagctcgaggaaggaaataattctctcctttgttttgaacctcaaactagataaaccctaggaattgcttaactgcaacaagtaattttcattcccacaaaaacctgaggcagctcttttgcccagagcgttccctgtagccacccccaccccacttgcccttggttctttagaaggagcacacacatcccttgattcctccctgatgtggtaaactggcacactccaggggtctaaaacataaaacagttgtgtttagggaaccttaagtcatgcagacatgactgttctctttgtacaagtgtgaatcaaaatatgtatctctttttcagagtctggttaagctatgtcattgtctactgcatagtttcctgagtctgtttgtaaagtgcttatggctaacagttcagttctgtatttgttgacaggtaaataagtggagttgagtgccatctttgaaaaaattaccctctagctctaacactgaaaataataataaattgtagatctctgcaactaagtttaaagcagtgtgactgtgttgcttaaatatcaagtattgtttataaccaccaaaaaaaaaaaagccctggtagttttttggcaccttatgtttaaatcagattcttagatttggagtagacctgaccttgttatttattagataacattttgaatgtatccattggatttctaaaatgtattgtgaatttctcagacaaacaggatttatgctggagctctgttttgcttagaaataaaatatttagtagtttatttctgctctaattaaaatgttcactttacccctggataaaggcactttcactgcctgtcactgatcagcagatactgacttgttgccattaagtgaacttgacttcttatgtgtgctctatgagtttgttgtaattttcttcttgaaattgtgatttttcactgacagtaatgacaaatttaatgtatgtaattgtctatgcattttaagttaaactgcctaaaatgtgatttgagacatatacatatgtttgtattataaattgtaagcaatcagtttgagatactaggttttatcacctgctgctgtatttgtaaacaaagacaaatgttgctttaagaagtaattataattaggaataggctatggatgtgatacttggtattttttaagataaacttgtttgcttttgtgtattatacctggaaactttttttaaaaaatgtattttcatggtttcacagatttttcatgttattttattctttaggccccaattctgggcttcctctgagcaagtcccagagccctaattaactgtaaatttgttgtcaaaaaggaagaaaaaagggcctgagatacctctttgcatgtgacctgcattcacctaaggatatctggaaaccacccttcctccgcaaaccctctcagcaacatggtgtcccattgtggtgattttctcttcttttaaggctaggctactcttggtaaccagattatccgtatatatgataatatgaagtcagggaactttctctgtctgtccctactcccctcactcccccactttctgttatgaaagatagttctacttttatcattaactcctacgcatttagtgagggtcacattattaaacttggagtttaccattttcccacaggagatttcgctggcattccttggaactcccaatttcagtagggcaatgaatgaatgaatactttgcagtgctacttttggaaggaatttctgctttttgccttatgattggacaaaatgcagctgtaaaattttaaattgtttttgatatgttattcaatatcccatgaaagtattcacctaaagtggagttatgaaatggatggtgaaataataagaccattctggagcagggcca

SEQ ID NO: 300471 - DNA, 4194 bp, Homo sapiens
agcgggcttcctgttccggcgccaggaggagccgcgcgctgctggtgctgttgccgccgctgctctagctgccgtcagtcaggctgcgcccgcgtcttcagggcccagtccctcggacccatcgccgcttctagaccctactgcggtctcggatattgccgggaaaatgtctgatgaattttcgttggcagatgcactacctgaacactcccctgccaaaacctctgctgtgagcaatacaaaacctggccaacctcctcaaggctggccaggctccaacccttggaataatccgagtgctccatcttcagtgccatctggactcccaccaagtgcaacaccctccactgtgccttttggaccagcaccaacaggaatgtatccctccgtgcctcccaccggaccacctccaggacccccagcaccctttcctccttccggaccatcatgtcccccacctggtggtccttatccagccccaactgtgccgggccctggccccacagggccatatcctacaccaaatatgccctttccagagctacccagaccatatggtgcacccacagatccagctgcagctggtcctttaggtccatggggatccatgtcttctggaccttgggcgccaggaatgggagggcagtatcctacccctaatatgccatatccatctccaggcccatatcccgctcctcctcctccccaagcccctggggcagcaccacctgttccatggggcaccgttccaccaggagcctggggaccaccagcaccatatcctgcccctacaggatcgtatcccacaccaggactctatcctactcccagtaatcctttccaagtgccttcaggaccttctggtgctccaccaatgcctggtggcccccatgtgagtgttcaatttgttatttaaagtgtactaattgtacatagcacaactgacattgtttctccccagttttggatggaagattaagaaggcttttaagtttttaaaagagggtgtgtgtatattaaataagtaaatttcaaaccttcaggtaaagcatttaaaaggatgaaagcactgttttaagtattccttgtgctaaaaagaagaattttccaaagatccccaaagactttgtaatgtagtaagcagtgtcctcaatagcatcctttaggtaaactctgagattcatttcattgggctttttgttttattattattatttctcagtattgttttatagcatcacaccaaagtacagttcagtaaaagcagtctctacctgtctagcttgatagaggtagatttttagagaatccaaggcaatgagtaggtaatgttcatctttcaagcagttctcgagctcaagattacacccctattctttattgtcagttacatgtaatgctttatgctttactgtcagacaacccagtgtggggttaacatcttagttgaggagcctgccttggtcatataaccaaatggaaaagtaccccacttcccctgtgagtcttaccattaagttaacaatggacgaagagatgacgctttgctttttgaagtacatgtatatgcacatgaatgcatatataaaaattgctggtttcactattagagggcattcatgaaagaacaactcttgcacctctcagagaagataactgcctcttgtacttggatgcgtagtacatcatatgtatacaatcagataaaagcatagaagtaaatcattcggatgtgatttttatttggttttcatggaaagttaaagtgataaagtatattgaatagttctttgacagaatttgtttaaactatgaaactacacacttaaaaatctaagatgtggattattgttagaatctgcaacttcattggcaaattatttcaagtatttttctataatcactttccccttctaaataaataaacttcgagaataacccatcataatccaaacaaatgatgcctcaacattttgagctgctctgtcggacaaataaacctggtcctcttgaggttatattttggatatacatttttaaactgtcagtaattattgtcagatgtggagttcaatagccagccagtgttcatttttatccttgagcttttagtaaaaacttcctggttttatttttagtcattgggtcatacagcactaaagtctgctatttatggaaactaacttttttgtttttaatccaggccaacatgtatgtaaattaaatttttagataattgattatctctttgtactacttgagatttgattatgagatgtgcatattgctttgggaagagctcgaggaaggaaataattctctcctttgttttgaacctcaaactagataaaccctaggaattgcttaactgcaacaagtaattttcattcccacaaaaacctgaggcagctcttttgcccagagcgttccctgtagccacccccaccccacttgcccttggttctttagaaggagcacacacatcccttgattcctccctgatgtggtaaactggcacactccaggggtctaaaacataaaacagttgtgtttagggaaccttaagtcatgcagacatgactgttctctttgtacaagtgtgaatcaaaatatgtatctctttttcagagtctggttaagctatgtcattgtctactgcatagtttcctgagtctgtttgtaaagtgcttatggctaacagttcagttctgtatttgttgacaggtaaataagtggagttgagtgccatctttgaaaaaattaccctctagctctaacactgaaaataataataaattgtagatctctgcaactaagtttaaagcagtgtgactgtgttgcttaaatatcaagtattgtttataaccaccaaaaaaaaaaaagccctggtagttttttggcaccttatgtttaaatcagattcttagatttggagtagacctgaccttgttatttattagataacattttgaatgtatccattggatttctaaaatgtattgtgaatttctcagacaaacaggatttatgctggagctctgttttgcttagaaataaaatatttagtagtttatttctgctctaattaaaatgttcactttacccctggataaaggcactttcactgcctgtcactgatcagcagatactgacttgttgccattaagtgaacttgacttcttatgtgtgctctatgagtttgttgtaattttcttcttgaaattgtgatttttcactgacagtaatgacaaatttaatgtatgtaattgtctatgcattttaagttaaactgcctaaaatgtgatttgagacatatacatatgtttgtattataaattgtaagcaatcagtttgagatactaggttttatcacctgctgctgtatttgtaaacaaagacaaatgttgctttaagaagtaattataattaggaataggctatggatgtgatacttggtattttttaagataaacttgtttgcttttgtgtattatacctggaaactttttttaaaaaatgtattttcatggtttcacagatttttcatgttattttattctttaggccccaattctgggcttcctctgagcaagtcccagagccctaattaactgtaaatttgttgtcaaaaaggaagaaaaaagggcctgagatacctctttgcatgtgacctgcattcacctaaggatatctggaaaccacccttcctccgcaaaccctctcagcaacatggtgtcccattgtggtgattttctcttcttttaaggctaggctactcttggtaaccagattatccgtatatatgataatatgaagtcagggaactttctctgtctgtccctactcccctcactcccccactttctgttatgaaagatagttctacttttatcattaactcctacgcatttagtgagggtcacattattaaacttggagtttaccattttcccacaggagatttcgctggcattccttggaactcccaatttcagtagggcaatgaatgaatgaatactttgcagtgctacttttggaaggaatttctgctttttgccttatgattggacaaaatgcagctgtaaaattttaaattgtttttgatatgttattcaatatcccatgaaagtattcacctaaagtggagttatgaaatggatggtgaaataataagaccattctggagcagggcca

SEQ ID NO: 300472 - DNA, 3400 bp, Homo sapiens
agcgggcttcctgttccggcgccaggaggagccgcgcgctgctggtgctgttgccgccgctgctctagctgccgtcagtcaggctgcgcccgcgtcttcagggcccagtccctcggacccatcgccgcttctagaccctactgcggtctcggatattgccgggaaagacgtatctgttttgtgttccagttggcagatgcactacctgaacactcccctgccaaaacctctgctgtgagcaatacaaaacctggccaacctcctcaaggctggccaggctccaacccttggaataatccgagtgctccatcttcagtgccatctggactcccaccaagtgcaacaccctccactgtgccttttggaccagcaccaacaggaatgtatccctccgtgcctcccaccggaccacctccaggacccccagcaccctttcctccttccggaccatcatgtcccccacctggtggtccttatccagccccaactgtgccgggccctggccccacagggccatatcctccccaagcccctggggcagcaccacctgttccatggggcaccgttccaccaggagcctggggaccaccagcaccatatcctgcccctacaggatcgtatcccacaccaggactctatcctactcccagtaatcctttccaagtgccttcaggaccttctggtgctccaccaatgcctggtggcccccattcttaccattaagttaacaatggacgaagagatgacgctttgctttttgaagtacatgtatatgcacatgaatgcatatataaaaattgctggtttcactattagagggcattcatgaaagaacaactcttgcacctctcagagaagataactgcctcttgtacttggatgcgtagtacatcatatgtatacaatcagataaaagcatagaagtaaatcattcggatgtgatttttatttggttttcatggaaagttaaagtgataaagtatattgaatagttctttgacagaatttgtttaaactatgaaactacacacttaaaaatctaagatgtggattattgttagaatctgcaacttcattggcaaattatttcaagtatttttctataatcactttccccttctaaataaataaacttcgagaataacccatcataatccaaacaaatgatgcctcaacattttgagctgctctgtcggacaaataaacctggtcctcttgaggttatattttggatatacatttttaaactgtcagtaattattgtcagatgtggagttcaatagccagccagtgttcatttttatccttgagcttttagtaaaaacttcctggttttatttttagtcattgggtcatacagcactaaagtctgctatttatggaaactaacttttttgtttttaatccaggccaacatgtatgtaaattaaatttttagataattgattatctctttgtactacttgagatttgattatgagatgtgcatattgctttgggaagagctcgaggaaggaaataattctctcctttgttttgaacctcaaactagataaaccctaggaattgcttaactgcaacaagtaattttcattcccacaaaaacctgaggcagctcttttgcccagagcgttccctgtagccacccccaccccacttgcccttggttctttagaaggagcacacacatcccttgattcctccctgatgtggtaaactggcacactccaggggtctaaaacataaaacagttgtgtttagggaaccttaagtcatgcagacatgactgttctctttgtacaagtgtgaatcaaaatatgtatctctttttcagagtctggttaagctatgtcattgtctactgcatagtttcctgagtctgtttgtaaagtgcttatggctaacagttcagttctgtatttgttgacaggtaaataagtggagttgagtgccatctttgaaaaaattaccctctagctctaacactgaaaataataataaattgtagatctctgcaactaagtttaaagcagtgtgactgtgttgcttaaatatcaagtattgtttataaccaccaaaaaaaaaaaagccctggtagttttttggcaccttatgtttaaatcagattcttagatttggagtagacctgaccttgttatttattagataacattttgaatgtatccattggatttctaaaatgtattgtgaatttctcagacaaacaggatttatgctggagctctgttttgcttagaaataaaatatttagtagtttatttctgctctaattaaaatgttcactttacccctggataaaggcactttcactgcctgtcactgatcagcagatactgacttgttgccattaagtgaacttgacttcttatgtgtgctctatgagtttgttgtaattttcttcttgaaattgtgatttttcactgacagtaatgacaaatttaatgtatgtaattgtctatgcattttaagttaaactgcctaaaatgtgatttgagacatatacatatgtttgtattataaattgtaagcaatcagtttgagatactaggttttatcacctgctgctgtatttgtaaacaaagacaaatgttgctttaagaagtaattataattaggaataggctatggatgtgatacttggtattttttaagataaacttgtttgcttttgtgtattatacctggaaactttttttaaaaaatgtattttcatggtttcacagatttttcatgttattttattctttaggccccaattctgggcttcctctgagcaagtcccagagccctaattaactgtaaatttgttgtcaaaaaggaagaaaaaagggcctgagatacctctttgcatgtgacctgcattcacctaaggatatctggaaaccacccttcctccgcaaaccctctcagcaacatggtgtcccattgtggtgattttctcttcttttaaggctaggctactcttggtaaccagattatccgtatatatgataatatgaagtcagggaactttctctgtctgtccctactcccctcactcccccactttctgttatgaaagatagttctacttttatcattaactcctacgcatttagtgagggtcacattattaaacttggagtttaccattttcccacaggagatttcgctggcattccttggaactcccaatttcagtagggcaatgaatgaatgaatactttgcagtgctacttttggaaggaatttctgctttttgccttatgattggacaaaatgcagctgtaaaattttaaattgtttttgatatgttattcaatatcccatgaaagtattcacctaaagtggagttatgaaatggatggtgaaataataagaccattctggagcagggcca

SEQ ID NO: 300473 - DNA, 3017 bp, Homo sapiens
ccagccaggaaaaaaaaaaaatctgttaactcttagtacgaaaataactagccagatctctgattagattagtcaaacatccaatccagctataaaggaaaagaaatctttaaagtacccctaaaacttcctccttgcattagtgtaatttctttcttgctatatatattatctaaaaatatttgttttgcaaagtgtatgccagagtaaatgatgtgacttgctgtttggatttattaagcaataaatttactttaagccacagtaaggagttaataaactccatttgcaaaatctagaagttgactttttcttttttctattgcagtcttaccattaagttaacaatggacgaagagatgacgctttgctttttgaagtacatgtatatgcacatgaatgcatatataaaaattgctggtttcactattagagggcattcatgaaagaacaactcttgcacctctcagagaagataactgcctcttgtacttggatgcgtagtacatcatatgtatacaatcagataaaagcatagaagtaaatcattcggatgtgatttttatttggttttcatggaaagttaaagtgataaagtatattgaatagttctttgacagaatttgtttaaactatgaaactacacacttaaaaatctaagatgtggattattgttagaatctgcaacttcattggcaaattatttcaagtatttttctataatcactttccccttctaaataaataaacttcgagaataacccatcataatccaaacaaatgatgcctcaacattttgagctgctctgtcggacaaataaacctggtcctcttgaggttatattttggatatacatttttaaactgtcagtaattattgtcagatgtggagttcaatagccagccagtgttcatttttatccttgagcttttagtaaaaacttcctggttttatttttagtcattgggtcatacagcactaaagtctgctatttatggaaactaacttttttgtttttaatccaggccaacatgtatgtaaattaaatttttagataattgattatctctttgtactacttgagatttgattatgagatgtgcatattgctttgggaagagctcgaggaaggaaataattctctcctttgttttgaacctcaaactagataaaccctaggaattgcttaactgcaacaagtaattttcattcccacaaaaacctgaggcagctcttttgcccagagcgttccctgtagccacccccaccccacttgcccttggttctttagaaggagcacacacatcccttgattcctccctgatgtggtaaactggcacactccaggggtctaaaacataaaacagttgtgtttagggaaccttaagtcatgcagacatgactgttctctttgtacaagtgtgaatcaaaatatgtatctctttttcagagtctggttaagctatgtcattgtctactgcatagtttcctgagtctgtttgtaaagtgcttatggctaacagttcagttctgtatttgttgacaggtaaataagtggagttgagtgccatctttgaaaaaattaccctctagctctaacactgaaaataataataaattgtagatctctgcaactaagtttaaagcagtgtgactgtgttgcttaaatatcaagtattgtttataaccaccaaaaaaaaaaaagccctggtagttttttggcaccttatgtttaaatcagattcttagatttggagtagacctgaccttgttatttattagataacattttgaatgtatccattggatttctaaaatgtattgtgaatttctcagacaaacaggatttatgctggagctctgttttgcttagaaataaaatatttagtagtttatttctgctctaattaaaatgttcactttacccctggataaaggcactttcactgcctgtcactgatcagcagatactgacttgttgccattaagtgaacttgacttcttatgtgtgctctatgagtttgttgtaattttcttcttgaaattgtgatttttcactgacagtaatgacaaatttaatgtatgtaattgtctatgcattttaagttaaactgcctaaaatgtgatttgagacatatacatatgtttgtattataaattgtaagcaatcagtttgagatactaggttttatcacctgctgctgtatttgtaaacaaagacaaatgttgctttaagaagtaattataattaggaataggctatggatgtgatacttggtattttttaagataaacttgtttgcttttgtgtattatacctggaaactttttttaaaaaatgtattttcatggtttcacagatttttcatgttattttattctttaggccccaattctgggcttcctctgagcaagtcccagagccctaattaactgtaaatttgttgtcaaaaaggaagaaaaaagggcctgagatacctctttgcatgtgacctgcattcacctaaggatatctggaaaccacccttcctccgcaaaccctctcagcaacatggtgtcccattgtggtgattttctcttcttttaaggctaggctactcttggtaaccagattatccgtatatatgataatatgaagtcagggaactttctctgtctgtccctactcccctcactcccccactttctgttatgaaagatagttctacttttatcattaactcctacgcatttagtgagggtcacattattaaacttggagtttaccattttcccacaggagatttcgctggcattccttggaactcccaatttcagtagggcaatgaatgaatgaatactttgcagtgctacttttggaaggaatttctgctttttgccttatgattggacaaaatgcagctgtaaaattttaaattgtttttgatatgttattcaatatcccatgaaagtattcacctaaagtggagttatgaaatggatggtgaaataataagaccattctggagcagggcca

SEQ ID NO: 300474 - DNA, 3527 bp, Homo sapiens
agcgggcttcctgttccggcgccaggaggagccgcgcgctgctggtgctgttgccgccgctgctctagctgccgtcagtcaggctgcgcccgcgtcttcagggcccagtccctcggacccatcgccgcttctagaccctactgcggtctcggatattgccgggaaaatgtctgatgaattttcgttggcagatgcactacctgaacactcccctgccaaaacctctgctgtgagcaatacaaaacctggccaacctcctcaaggctggccaggctccaacccttggaataatccgagtgctccatcttcagtgccatctggactcccaccaagtgcaacaccctccactgtgccttttggaccagcaccaacaggaatgtatccctccgtgcctcccaccggaccacctccaggacccccagcaccctttcctccttccggaccatcatgtcccccacctggtggtccttatccagccccaactgtgccgggccctggccccacagggccatatcctacaccaaatatgccctttccagagctacccagaccatatggtgcacccacagatccagctgcagctggtcctttaggtccatggggatccatgtcttctggaccttgggcgccaggaatgggagggcagtatcctacccctaatatgccatatccatctccaggcccatatcccgctcctcctcctccccaagcccctggggcagcaccacctgttccatggggcaccgttccaccaggagcctggggaccaccagcaccatatcctgcccctacaggatcgtatcccacaccaggactctatcctactcccagtaatcctttccaagtgccttcaggaccttctggtgctccaccaatgcctggtggcccccattcttaccattaagttaacaatggacgaagagatgacgctttgctttttgaagtacatgtatatgcacatgaatgcatatataaaaattgctggtttcactattagagggcattcatgaaagaacaactcttgcacctctcagagaagataactgcctcttgtacttggatgcgtagtacatcatatgtatacaatcagataaaagcatagaagtaaatcattcggatgtgatttttatttggttttcatggaaagttaaagtgataaagtatattgaatagttctttgacagaatttgtttaaactatgaaactacacacttaaaaatctaagatgtggattattgttagaatctgcaacttcattggcaaattatttcaagtatttttctataatcactttccccttctaaataaataaacttcgagaataacccatcataatccaaacaaatgatgcctcaacattttgagctgctctgtcggacaaataaacctggtcctcttgaggttatattttggatatacatttttaaactgtcagtaattattgtcagatgtggagttcaatagccagccagtgttcatttttatccttgagcttttagtaaaaacttcctggttttatttttagtcattgggtcatacagcactaaagtctgctatttatggaaactaacttttttgtttttaatccaggccaacatgtatgtaaattaaatttttagataattgattatctctttgtactacttgagatttgattatgagatgtgcatattgctttgggaagagctcgaggaaggaaataattctctcctttgttttgaacctcaaactagataaaccctaggaattgcttaactgcaacaagtaattttcattcccacaaaaacctgaggcagctcttttgcccagagcgttccctgtagccacccccaccccacttgcccttggttctttagaaggagcacacacatcccttgattcctccctgatgtggtaaactggcacactccaggggtctaaaacataaaacagttgtgtttagggaaccttaagtcatgcagacatgactgttctctttgtacaagtgtgaatctagtttcctgagtctgtttgtaaagtgcttatggctaacagttcagttctgtatttgttgacaggtaaataagtggagttgagtgccatctttgaaaaaattaccctctagctctaacactgaaaataataataaattgtagatctctgcaactaagtttaaagcagtgtgactgtgttgcttaaatatcaagtattgtttataaccaccaaaaaaaaaaaagccctggtagttttttggcaccttatgtttaaatcagattcttagatttggagtagacctgaccttgttatttattagataacattttgaatgtatccattggatttctaaaatgtattgtgaatttctcagacaaacaggatttatgctggagctctgttttgcttagaaataaaatatttagtagtttatttctgctctaattaaaatgttcactttacccctggataaaggcactttcactgcctgtcactgatcagcagatactgacttgttgccattaagtgaacttgacttcttatgtgtgctctatgagtttgttgtaattttcttcttgaaattgtgatttttcactgacagtaatgacaaatttaatgtatgtaattgtctatgcattttaagttaaactgcctaaaatgtgatttgagacatatacatatgtttgtattataaattgtaagcaatcagtttgagatactaggttttatcacctgctgctgtatttgtaaacaaagacaaatgttgctttaagaagtaattataattaggaataggctatggatgtgatacttggtattttttaagataaacttgtttgcttttgtgtattatacctggaaactttttttaaaaaatgtattttcatggtttcacagatttttcatgttattttattctttaggccccaattctgggcttcctctgagcaagtcccagagccctaattaactgtaaatttgttgtcaaaaaggaagaaaaaagggcctgagatacctctttgcatgtgacctgcattcacctaaggatatctggaaaccacccttcctccgcaaaccctctcagcaacatggtgtcccattgtggtgattttctcttcttttaaggctaggctactcttggtaaccagattatccgtatatatgataatatgaagtcagggaactttctctgtctgtccctactcccctcactcccccactttctgttatgaaagatagttctacttttatcattaactcctacgcatttagtgagggtcacattattaaacttggagtttaccattttcccacaggagatttcgctggcattccttggaactcccaatttcagtagggcaatgaatgaatgaatactttgcagtgctacttttggaaggaatttctgctttttgccttatgattggacaaaatgcagctgtaaaattttaaattgtttttgatatgttattcaatatcccatgaaagtattcacctaaagtggagttatgaaatggatggtgaaataataagaccattctggagcagggcca

SEQ ID NO: 300475 - DNA, 2916 bp, Homo sapiens
attgggataagctgacaaattagcagtatttagtttaacactggagcaaatataatttgagtaggaagaagagatagcaggtttgggaatctataattatgaagtccattgattttgggagaaaatctgttgctaaaggatttgaagggccatgaacacaatttgggattattactccctataagtataataattttgctagtgacccatactgtccagtgtgccctaaatcatactgctattgtactccctttgttttcaaggactttgcaactggtatttgggggagatttttttttttttttgagacggagtctcgctctgtcgcccatgctggagtgcagtggtgctatcttggttcactgcaagctccatctcccaggttcacaccattctcctgcctcagcctcccaagcagctgggactacaggtgcccgccaccatgcccggctaatttttttttttttttttttttagtaaaaatggggtttcactgtgttagccaggatggtctcgatctcctgacctcgtgatctgcccgccttggcttcccaaagtgctgggattacaggcgtgagccaccacgtccggccgatttttttttttttttttaatgtaagaatggagataaaagggataatataatttgcttttatattgttatttttgtaaagcatcttttcttcaattcttgttggcattctgggccaaaatatttcaggttggttcggtgtggagttaagaaaagcaggcgttttagtggagaaatggggaacagcatcaagaaaggcttttttccttttttcttttttttttggagacagagtcttgccctgtcacccaggctggagtgcaatggcgtgatcttggctcgctgcaacctctgcctccaggttcaaacgattcttctgcctcagcctcccaagtagctgggattacaggtgcccgccaccacacccatttttgtatttttagtagagacgggggtttcaccatgttggccaggtggtctgaaactcctgacctcgtgatccgcctgcctcagcctcccaaagtgctgagattacaggcgtgagccaccatgcgtgacctttttttctttttaaaagggaacaatgttgctttcaaaacaagacatgctaggctgaaactgatttatggaaaagactgcttgttagcaagtatatttggtcttgagggggatacagattatagaatatgctgacatttgggcttcagaggaagaattttcaaatctaatggaaatagttgaggtgttcaggaatgctgtttcttggagttggaagcttaggttttgaaatgttgaaaccaaaaagacaaaaattaaaacatagaccttaggtcgtcattcacacccggttctcaagaatcaagtggagcacttcaaagaccttggcttgtctgtcccatcctgccactttctcatcttttcatgcttttgaagacaccatttacagctctgactcagccctattttgtgtaaagtaatatattgattattcagaaatagacaatacattttttaattacccaaggactgactgttttgtgcattttactgttggttgtcttcagtagagaatagtaatagggcagagaaaagtatatattttgcctcagtcagtcccaccaccacaatggactattgggatattttctaaaaaaccaatcaatttgcccatgattacctcacaaataattagtgctacctggggtactctcaaatatacagcttttgaaactgtagatgaaaaaagctctactcagagtttttgtcaagactgtgcctgggttgaatatcagtcaattgcctacacttctaaacaataagtgccaatgtctcaattttctcaccctgaatgatagaagctagctttatcaaatgccaaggttagaaagcctggaaataaaacttaagcacagacattcaagtttttgaaaagcataagcctaaattcagataaatcacactgatatattgtactatgcatagaaagttgtaggtggcgttcagggaagactttgattttaataaagcaatatttagtattgaagacaaacactttttattttcagatttctgccaagtaaaacagaaattgccaataaaataatcagtattttgtaaatggcaggcaagcttctggctgtcgaaaacatctgagtcatttattcagtagacaatatgtccttgatccaggttctttgccagctataagggaatccctgtccttgagaggctcatagtctataagtaacattacagaatttgttagcatacccattcattattagttttacctaaacgtgttaggatcactactggtggaaattgtaaccagcctttgggcatcttaaagggtgacatgtggcatgccttttttttttttaagaatttaatgtttttcaagattgtagtgttgatcagcgcaacaattcaagtgtgcaaagtaacaggatagtttgcctcttcactttacccctggataaaggcactttcactgcctgtcactgatcagcagatactgacttgttgccattaagtgaacttgacttcttatgtgtgctctatgagtttgttgtaattttcttcttgaaattgtgatttttcactgacagtaatgacaaatttaatgtatgtaattgtctatgcattttaagttaaactgcctaaaatgtgatttgagacatatacatatgtttgtattataaattgtaagcaatcagtttgagatactaggttttatcacctgctgctgtatttgtaaacaaagacaaatgttgctttaagaagtaattataattaggaataggctatggatgtgatacttggtattttttaagataaacttgtttgcttttgtgtattatacctggaaactttttttaaaaaat

SEQ ID NO: 300476 - DNA, 3592 bp, Homo sapiens
attgggataagctgacaaattagcagtatttagtttaacactggagcaaatataatttgagtaggaagaagagatagcaggtttgggaatctataattatgaagtccattgattttgggagaaaatctgttgctaaaggatttgaagggccatgaacacaatttgggattattactccctataagtataataattttgctagtgacccatactgtccagtgtgccctaaatcatactgctattgtactccctttgttttcaaggactttgcaactggtatttgggggagatttttttttttttttgagacggagtctcgctctgtcgcccatgctggagtgcagtggtgctatcttggttcactgcaagctccatctcccaggttcacaccattctcctgcctcagcctcccaagcagctgggactacaggtgcccgccaccatgcccggctaatttttttttttttttttttttagtaaaaatggggtttcactgtgttagccaggatggtctcgatctcctgacctcgtgatctgcccgccttggcttcccaaagtgctgggattacaggcgtgagccaccacgtccggccgatttttttttttttttttaatgtaagaatggagataaaagggataatataatttgcttttatattgttatttttgtaaagcatcttttcttcaattcttgttggcattctgggccaaaatatttcaggttggttcggtgtggagttaagaaaagcaggcgttttagtggagaaatggggaacagcatcaagaaaggcttttttccttttttcttttttttttggagacagagtcttgccctgtcacccaggctggagtgcaatggcgtgatcttggctcgctgcaacctctgcctccaggttcaaacgattcttctgcctcagcctcccaagtagctgggattacaggtgcccgccaccacacccatttttgtatttttagtagagacgggggtttcaccatgttggccaggtggtctgaaactcctgacctcgtgatccgcctgcctcagcctcccaaagtgctgagattacaggcgtgagccaccatgcgtgacctttttttctttttaaaagggaacaatgttgctttcaaaacaagacatgctaggctgaaactgatttatggaaaagactgcttgttagcaagtatatttggtcttgagggggatacagattatagaatatgctgacatttgggcttcagaggaagaattttcaaatctaatggaaatagttgaggtgttcaggaatgctgtttcttggagttggaagcttaggttttgaaatgttgaaaccaaaaagacaaaaattaaaacatagaccttaggtcgtcattcacacccggttctcaagaatcaagtggagcacttcaaagaccttggcttgtctgtcccatcctgccactttctcatcttttcatgcttttgaagacaccatttacagctctgactcagccctattttgtgtaaagtaatatattgattattcagaaatagacaatacattttttaattacccaaggactgactgttttgtgcattttactgttggttgtcttcagtagagaatagtaatagggcagagaaaagtatatattttgcctcagtcagtcccaccaccacaatggactattgggatattttctaaaaaaccaatcaatttgcccatgattacctcacaaataattagtgctacctggggtactctcaaatatacagcttttgaaactgtagatgaaaaaagctctactcagagtttttgtcaagactgtgcctgggttgaatatcagtcaattgcctacacttctaaacaataagtgccaatgtctcaattttctcaccctgaatgatagaagctagctttatcaaatgccaaggttagaaagcctggaaataaaacttaagcacagacattcaagtttttgaaaagcataagcctaaattcagataaatcacactgatatattgtactatgcatagaaagttgtaggtggcgttcagggaagactttgattttaataaagcaatatttagtattgaagacaaacactttttattttcagatttctgccaagtaaaacagaaattgccaataaaataatcagtattttgtaaatggcaggcaagcttctggctgtcgaaaacatctgagtcatttattcagtagacaatatgtccttgatccaggttctttgccagctataagggaatccctgtccttgagaggctcatagtctataagtaacattacagaatttgttagcatacccattcattattagttttacctaaacgtgttaggatcactactggtggaaattgtaaccagcctttgggcatcttaaagggtgacatgtggcatgccttttttttttttaagaatttaatgtttttcaagattgtagtgttgatcagcgcaacaattcaagtgtgcaaagtaacaggatagtttgcctcttcactttacccctggataaaggcactttcactgcctgtcactgatcagcagatactgacttgttgccattaagtgaacttgacttcttatgtgtgctctatgagtttgttgtaattttcttcttgaaattgtgatttttcactgacagtaatgacaaatttaatgtatgtaattgtctatgcattttaagttaaactgcctaaaatgtgatttgagacatatacatatgtttgtattataaattgtaagcaatcagtttgagatactaggttttatcacctgctgctgtatttgtaaacaaagacaaatgttgctttaagaagtaattataattaggaataggctatggatgtgatacttggtattttttaagataaacttgtttgcttttgtgtattatacctggaaactttttttaaaaaatgtattttcatggtttcacagatttttcatgttattttattctttaggccccaattctgggcttcctctgagcaagtcccagagccctaattaactgtaaatttgttgtcaaaaaggaagaaaaaagggcctgagatacctctttgcatgtgacctgcattcacctaaggatatctggaaaccacccttcctccgcaaaccctctcagcaacatggtgtcccattgtggtgattttctcttcttttaaggctaggctactcttggtaaccagattatccgtatatatgataatatgaagtcagggaactttctctgtctgtccctactcccctcactcccccactttctgttatgaaagatagttctacttttatcattaactcctacgcatttagtgagggtcacattattaaacttggagtttaccattttcccacaggagatttcgctggcattccttggaactcccaatttcagtagggcaatgaatgaatgaatactttgcagtgctacttttggaaggaatttctgctttttgccttatgattggacaaaatgcagctgtaaaattttaaattgtttttgatatgttattcaatatcccatgaaagtattcacctaaagtggagttatgaaatggatggtgaaataataagaccattctggagcagggcca

SEQ ID NO: 300477 - DNA, 2862 bp, Homo sapiens
attgggataagctgacaaattagcagtatttagtttaacactggagcaaatataatttgagtaggaagaagagatagcaggtttgggaatctataattatgaagtccattgattttgggagaaaatctgttgctaaaggatttgaagggccatgaacacaatttgggattattactccctataagtataataattttgctagtgacccatactgtccagtgtgccctaaatcatactgctattgtactccctttgttttcaaggactttgcaactggtatttgggggagatttttttttttttttgagacggagtctcgctctgtcgcccatgctggagtgcagtggtgctatcttggttcactgcaagctccatctcccaggttcacaccattctcctgcctcagcctcccaagcagctgggactacaggtgcccgccaccatgcccggctaatttttttttttttttttttttagtaaaaatggggtttcactgtgttagccaggatggtctcgatctcctgacctcgtgatctgcccgccttggcttcccaaagtgctgggattacaggcgtgagccaccacgtccggccgatttttttttttttttttaatgtaagaatggagataaaagggataatataatttgcttttatattgttatttttgtaaagcatcttttcttcaattcttgttggcattctgggccaaaatatttcaggttggttcggtgtggagttaagaaaagcaggcgttttagtggagaaatggggaacagcatcaagaaaggcttttttccttttttcttttttttttggagacagagtcttgccctgtcacccaggctggagtgcaatggcgtgatcttggctcgctgcaacctctgcctccaggttcaaacgattcttctgcctcagcctcccaagtagctgggattacaggtgcccgccaccacacccatttttgtatttttagtagagacgggggtttcaccatgttggccaggtggtctgaaactcctgacctcgtgatccgcctgcctcagcctcccaaagtgctgagattacaggcgtgagccaccatgcgtgacctttttttctttttaaaagggaacaatgttgctttcaaaacaagacatgctaggctgaaactgatttatggaaaagactgcttgttagcaagtatatttggtcttgagggggatacagattatagaatatgctgacatttgggcttcagaggaagaattttcaaatctaatggaaatagttgaggtgttcaggaatgctgtttcttggagttggaagcttaggttttgaaatgttgaaaccaaaaagacaaaaattcacttcaaagaccttggcttgtctgtcccatcctgccactttctcatcttttcatgcttttgaagacaccatttacagctctgactcagccctattttgtgtaaagtaatatattgattattcagaaatagacaatacattttttaattacccaaggactgactgttttgtgcattttactgttggttgtcttcagtagagaatagtaatagggcagagaaaagtatatattttgcctcagtcagtcccaccaccacaatggactattgggatattttctaaaaaaccaatcaatttgcccatgattacctcacaaataattagtgctacctggggtactctcaaatatacagcttttgaaactgtagatgaaaaaagctctactcagagtttttgtcaagactgtgcctgggttgaatatcagtcaattgcctacacttctaaacaataagtgccaatgtctcaattttctcaccctgaatgatagaagctagctttatcaaatgccaaggttagaaagcctggaaataaaacttaagcacagacattcaagtttttgaaaagcataagcctaaattcagataaatcacactgatatattgtactatgcatagaaagttgtaggtggcgttcagggaagactttgattttaataaagcaatatttagtattgaagacaaacactttttattttcagatttctgccaagtaaaacagaaattgccaataaaataatcagtattttgtaaatggcaggcaagcttctggctgtcgaaaacatctgagtcatttattcagtagacaatatgtccttgatccaggttctttgccagctataagggaatccctgtccttgagaggctcatagtctataagtaacattacagaatttgttagcatacccattcattattagttttacctaaacgtgttaggatcactactggtggaaattgtaaccagcctttgggcatcttaaagggtgacatgtggcatgccttttttttttttaagaatttaatgtttttcaagattgtagtgttgatcagcgcaacaattcaagtgtgcaaagtaacaggatagtttgcctcttcactttacccctggataaaggcactttcactgcctgtcactgatcagcagatactgacttgttgccattaagtgaacttgacttcttatgtgtgctctatgagtttgttgtaattttcttcttgaaattgtgatttttcactgacagtaatgacaaatttaatgtatgtaattgtctatgcattttaagttaaactgcctaaaatgtgatttgagacatatacatatgtttgtattataaattgtaagcaatcagtttgagatactaggttttatcacctgctgctgtatttgtaaacaaagacaaatgttgctttaagaagtaattataattaggaataggctatggatgtgatacttggtattttttaagataaacttgtttgcttttgtgtattatacctggaaactttttttaaaaaat

SEQ ID NO: 300478 - DNA, 2861 bp, Homo sapiens
attgggataagctgacaaattagcagtatttagtttaacactggagcaaatataatttgagtaggaagaagagatagcaggtttgggaatctataattatgaagtccattgattttgggagaaaatctgttgctaaaggatttgaagggccatgaacacaatttgggattattactccctataagtataataattttgctagtgacccatactgtccagtgtgccctaaatcatactgctattgtactccctttgttttcaaggactttgcaactggtatttgggggagatttttttttttttttgagacggagtctcgctctgtcgcccatgctggagtgcagtggtgctatcttggttcactgcaagctccatctcccaggttcacaccattctcctgcctcagcctcccaagcagctgggactacaggtgcccgccaccatgcccggctaatttttttttttttttttttttagtaaaaatggggtttcactgtgttagccaggatggtctcgatctcctgacctcgtgatctgcccgccttggcttcccaaagtgctgggattacaggcgtgagccaccacgtccggccgatttttttttttttttttaatgtaagaatggagataaaagggataatataatttgcttttatattgttatttttgtaaagcatcttttcttcaattcttgttggcattctgggccaaaatatttcaggttggttcggtgtggagttaagaaaagcaggcgttttagtggagaaatggggaacagcatcaagaaaggcttttttccttttttcttttttttttggagacagagtcttgccctgtcacccaggctggagtgcaatggcgtgatcttggctcgctgcaacctctgcctccaggttcaaacgattcttctgcctcagcctcccaagtagctgggattacaggtgcccgccaccacacccatttttgtatttttagtagagacgggggtttcaccatgttggccaggtggtctgaaactcctgacctcgtgatccgcctgcctcagcctcccaaagtgctgagattacaggcgtgagccaccatgcgtgacctttttttctttttaaaagggaacaatgttgctttcaaaacaagacatgctaggctgaaactgatttatggaaaagactgcttgttagcaagtatatttggtcttgagggggatacagattatagaatatgctgacatttgggcttcagaggaagaattttcaaatctaatggaaatagttgaggtgttcaggaatgctgtttcttggagttggaagcttaggttttgaaatgttgaaaccaaaaagacaaaaattaaaacatagaccttaggtcgtcattcacacccggttctcaagaatcaagtggagcacttcaaagaccttggcttgtctgtcccatcctgccactttctcatcttttcatgcttttgaagacaccatttacagctctgactcagccctattttgtgtaaagtaatatattgattattcagaaatagacaatacattttttaattacccaaggactgactgttttgtgcattttactgttggttgtcttcagtagagaatagtaatagggcagagaaaagtatatattttgcctcagtcagtcccaccaccacaatggactattgggatattttctaaaaaaccaatcaatttgcccatgattacctcacaaataattagtgctacctggggtactctcaaatatacagcttttgaaactgtagatgaaaaaagctctactcagagtttttgtcaagactgtgcctgggttgaatatcagtcaattgcctacacttctaaacaataagtgccaatgtctcaattttctcaccctgaatgatagaagctagctttatcaaatgccaaggttagaaagcctggaaataaaacttaagcacagacattcaagtttttgaaaattgtaggtggcgttcagggaagactttgattttaataaagcaatatttagtattgaagacaaacactttttattttcagatttctgccaagtaaaacagaaattgccaataaaataatcagtattttgtaaatggcaggcaagcttctggctgtcgaaaacatctgagtcatttattcagtagacaatatgtccttgatccaggttctttgccagctataagggaatccctgtccttgagaggctcatagtctataagtaacattacagaatttgttagcatacccattcattattagttttacctaaacgtgttaggatcactactggtggaaattgtaaccagcctttgggcatcttaaagggtgacatgtggcatgccttttttttttttaagaatttaatgtttttcaagattgtagtgttgatcagcgcaacaattcaagtgtgcaaagtaacaggatagtttgcctcttcactttacccctggataaaggcactttcactgcctgtcactgatcagcagatactgacttgttgccattaagtgaacttgacttcttatgtgtgctctatgagtttgttgtaattttcttcttgaaattgtgatttttcactgacagtaatgacaaatttaatgtatgtaattgtctatgcattttaagttaaactgcctaaaatgtgatttgagacatatacatatgtttgtattataaattgtaagcaatcagtttgagatactaggttttatcacctgctgctgtatttgtaaacaaagacaaatgttgctttaagaagtaattataattaggaataggctatggatgtgatacttggtattttttaagataaacttgtttgcttttgtgtattatacctggaaactttttttaaaaaat

SEQ ID NO: 300479 - DNA, 1642 bp, Homo sapiens
agcgggcttcctgttccggcgccaggaggagccgcgcgctgctggtgctgttgccgccgctgctctagctgccgtcagtcaggctgcgcccgcgtcttcagggcccagtccctcggacccatcgccgcttctagaccctactgcggtctcggatattgccgggaaaatgtctgatgaattttcgttggcagatgcactacctgaacactcccctgccaaaacctctgctgtgagcaatacaaaacctggccaacctcctcaaggctggccaggctccaacccttggaataatccgagtgctccatcttcagtgccatctggactcccaccaagtgcaacaccctccactgtgccttttggaccagcaccaacaggaatgtatccctccgtgcctcccaccggaccacctccaggacccccagcaccctttcctccttccggaccatcatgtcccccacctggtggtccttatccagccccaactgtgccgggccctggccccacagggccatatcctacaccaaatatgccctttccagagctacccagaccatatggtgcacccacagatccagctgcagctggtcctttaggtccatggggatccatgtcttctggaccttgggcgccaggaatgggagggcagtatcctacccctaatatgccatatccatctccaggcccatatcccgctcctcctcctccccaagcccctggggcagcaccacctgttccatggggcaccgttccaccaggagcctggggaccaccagcaccatatcctgcccctacaggatcgtatcccacaccaggactctatcctactcccagtaatcctttccaagtgccttcaggaccttctggtgctccaccaatgcctggtggcccccatgtgagtgttcaatttgttatttaaagtgtactaattgtacatagcacaactgacattgtttctccccagttttggatggaagattaagaaggcttttaagtttttaaaagagggtgtgtgtatattaaataagtaaatttcaaaccttcaggtaaagcatttaaaaggatgaaagcactgttttaagtattccttgtgctaaaaagaagaattttccaaagatccccaaagactttgtaatgtagtaagcagtgtcctcaatagcatcctttaggtaaactctgagattcatttcattgggctttttgttttattattattatttctcagtattgttttatagcatcacaccaaagtacagttcagtaaaagcagtctctacctgtctagcttgatagaggtagatttttagagaatccaaggcaatgagtaggtaatgttcatctttcaagcagttctcgagctcaagattacacccctattctttattgtcagttacatgtaatgctttatgctttactgtcagacaacccagtgtggggttaacatcttagttgaggagcctgccttggtcatataaccaaatggaaaagtaccccacttcccctgtgaggtaagccaaacgagtatccaaacgcagagtaaagattttccttaggaaaaaaaatctgttaactcttttttttttttttttttttttttttttttgagacagtcttgctctgtcacccaggcaagagtgcagtctct

SEQ ID NO: 300480 - DNA, 1144 bp, Homo sapiens
  misc_feature (42)..(42): n is a, c, g, or t
  misc_feature (51)..(51): n is a, c, g, or t
  misc_feature (54)..(55): n is a, c, g, or t
  misc_feature (66)..(67): n is a, c, g, or t
  misc_feature (72)..(72): n is a, c, g, or t
  misc_feature (74)..(75): n is a, c, g, or t
actgcatctacaagtcactctagagcgatcccaccaggcttnggcccctanatnnatgtcatgacnngtgancnncttgcgtaactgatcagcagatactgacttgttgccattaagtgaacttgacttcttatgtgtgctctatgagtttgttgtaattttcttcttgaaattgtgatttttcactgacagtaatgacaaatttaatgtatgtaattgtctatgcattttaagttaaactgcctaaaatgtgatttgagacatatacatatgtttgtattataaattgtaagcaatcagtttgagatactaggttttatcacctgctgctgtatttgtaaacaaagacaaatgttgctttaagaagtaattataattaggaataggctatggatgtgatacttggtattttttaagataaacttgtttgcttttgtgtattatacctggaaactttttttaaaaaatgtattttcatggtttcacagatttttcatgttattttattctttaggccccaattctgggcttcctctgagcaagtcccagagccctaattaactgtaaatttgttgtcaaaaaggaagaaaaaagggcctgagatacctctttgcatgtgacctgcattcacctaaggatatctggaaaccacccttcctccgcaaaccctctcagcaacatggtgtcccattgtggtgattttctcttcttttaaggctaggctactcttggtaaccagattatccgtatatatgataatatgaagtcagggaactttctctgtctgtccctactcccctcactcccccactttctgttatgaaagatagttctacttttatcattaactcctacgcatttagtgagggtcacattattaaacttggagtttaccattttcccacaggagatttcgctggcattccttggaactcccaatttcagtagggcaatgaatgaatgaatactttgcagtgctacttttggaaggaatttctgctttttgccttatgattggacaaaatgcagctgtaaaattttaaattgtttttgatatgttattcaatatcccatgaaagtattcacctaaagtggagttatgaaatggatggtgaaataataagaccattctggagcagggcca

SEQ ID NO: 300481 - DNA, 1138 bp, Homo sapiens
gtgcaccttgcattcctgctagcctgtctctagagtatccccagccaggctcgggccagattaagatgtcaagtcccactgatcagcagatactgacttgttgccattaagtgaacttgacttcttatgtgtgctctatgagtttgttgtaattttcttcttgaaattgtgatttttcactgacagtaatgacaaatttaatgtatgtaattgtctatgcattttaagttaaactgcctaaaatgtgatttgagacatatacatatgtttgtattataaattgtaagcaatcagtttgagatactaggttttatcacctgctgctgtatttgtaaacaaagacaaatgttgctttaagaagtaattataattaggaataggctatggatgtgatacttggtattttttaagataaacttgtttgcttttgtgtattatacctggaaactttttttaaaaaatgtattttcatggtttcacagatttttcatgttattttattctttaggccccaattctgggcttcctctgagcaagtcccagagccctaattaactgtaaatttgttgtcaaaaaggaagaaaaaagggcctgagatacctctttgcatgtgacctgcattcacctaaggatatctggaaaccacccttcctccgcaaaccctctcagcaacatggtgtcccattgtggtgattttctcttcttttaaggctaggctactcttggtaaccagattatccgtatatatgataatatgaagtcagggaactttctctgtctgtccctactcccctcactcccccactttctgttatgaaagatagttctacttttatcattaactcctacgcatttagtgagggtcacattattaaacttggagtttaccattttcccacaggagatttcgctggcattccttggaactcccaatttcagtagggcaatgaatgaatgaatactttgcagtgctacttttggaaggaatttctgctttttgccttatgattggacaaaatgcagctgtaaaattttaaattgtttttgatatgttattcaatatcccatgaaagtattcacctaaagtggagttatgaaatggatggtgaaataataagaccattctggagcagggcca

SEQ ID NO: 300482 - DNA, 2905 bp, Homo sapiens
agcgggcttcctgttccggcgccaggaggagccgcgcgctgctggtgctgttgccgccgctgctctagctgccgtcagtcaggctgcgcccgcgtcttcagggcccagtccctcggacccatcgccgcttctagaccctactgcggtctcggatattgccgggaaaatgtctgatgaattttcgttggcagatgcactacctgaacactcccctgccaaaacctctgctgtgagcaatacaaaacctggccaacctcctcaaggctggccaggctccaacccttggaataatccgagtgctccatcttcagtgccatctggactcccaccaagtgcaacaccctccactgtgccttttggaccagcaccaacaggaatgtatccctccgtgcctcccaccggaccacctccaggacccccagcaccctttcctccttccggaccatcatgtcccccacctggtggtccttatccagccccaactgtgccgggccctggccccacagggccatatcctacaccaaatatgccctttccagagctacccagaccatatggtgcacccacagatccagctgcagctggtcctttaggtccatggggatccatgtcttctggaccttgggcgccaggaatgggagggcagtatcctacccctaatatgccatatccatctccaggcccatatcccgctcctcctcctccccaagcccctggggcagcaccacctgttccatggggcaccgttccaccaggagcctggggaccaccagcaccatatcctgcccctacaggatcgtatcccacaccaggactctatcctactcccagtaatcctttccaagtgccttcaggaccttctggtgctccaccaatgcctggtggcccccattcttaccattaagttaacaatggacgaagagatgacgctttgctttttgaagtacatgtatatgcacatgaatgcatatataaaaattgctggtttcactattagagggcattcatgaaagaacaactcttgcacctctcagagaagataactgcctcttgtacttggatgcgtagtacatcatatgtatacaatcagataaaagcatagaagtaaatcattcggatgtgatttttatttggttttcatggaaagttaaagtgataaagtatattgaatagttctttgacagaatttgtttaaactatgaaactacacacttaaaaatctaagatgtggattattgttagaatctgcaacttcattggcaaattatttcaagtatttttctataatcactttccccttctaaataaataaacttcgagaataacccatcataatccaaacaaatgatgcctcaacattttgagctgctctgtcggacaaataaacctggtcctcttgaggttatattttggatatacatttttaaactgtcagtaattattgtcagatgtggagttcaatagccagccagtgttcatttttatccttgagcttttagtaaaaacttcctggttttatttttagtcattgggtcatacagcactaaagtctgctatttatggaaactaacttttttgtttttaatccaggccaacatgtatgtaaattaaatttttagataattgattatctctttgtactacttgagatttgattatgagatgtgcatattgctttgggaagagctcgaggaaggaaataattctctcctttgttttgaacctcaaactagataaaccctaggaattgcttaactgcaacaagtaattttcattcccacaaaaacctgaggcagctcttttgcccagagcgttccctgtagccacccccaccccacttgcccttggttctttagaaggagcacacacatcccttgattcctccctgatgtggtaaactggcacactccaggggtctaaaacataaaacagttgtgtttagggaaccttaagtcatgcagacatgactgttctctttgtacaagtgtgaatcaaaatatgtatctctttttcagagtctggttaagctatgtcattgtctactgcatagtttcctgagtctgtttgtaaagtgcttatggctaacagttcagttctgtatttgttgacaggtaaataagtggagttgagtgccatctttgaaaaaattaccctctagctctaacactgaaaataataataaattgtagatctctgcaactaagtttaaagcagtgtgactgtgttgcttaaatatcaagtattgtttataaccaccaaaaaaaaaaaagccctggtagttttttggcaccttatgtttaaatcagattcttagatttggagtagacctgaccttgttatttattagataacattttgaatgtatccattggatttctaaaatgtattgtgaatttctcagacaaacaggatttatgctggagctctgttttgcttagaaataaaatatttagtagtttatttctgctctaattaaaatgttcactttacccctggataaaggcactttcactgcctgtcactgatcagcagatactgacttgttgccattaagtgaacttgacttcttatgtgtgctctatgagtttgttgtaattttcttcttgaaattgtgatttttcactgacagtaatgacaaatttaatgtatgtaattgtctatgcattttaagttaaactgcctaaaatgtgatttgagacatatacatatgtttgtattataaattgtaagcaatcagtttgagatactaggttttatcacctgctgctgtatttgtaaacaaagacaaatgttgctttaagaagtaattataattaggaataggctatggatgtgatacttggtattttttaagataaacttgtttgcttttgtgtattatacctggaaactttttttaaaaaat

SEQ ID NO: 300483 - DNA, 3455 bp, Homo sapiens
agcgggcttcctgttccggcgccaggaggagccgcgcgctgctggtgctgttgccgccgctgctctagctgccgtcagtcaggctgcgcccgcgtcttcagggcccagtccctcggacccatcgccgcttctagaccctactgcggtctcggatattgccgggaaaatgtctgatgaattttcgttggcagatgcactacctgaacactcccctgccaaaacctctgctgtgagcaatacaaaacctggccaacctcctcaaggctggccaggctccaacccttggaataatccgagtgctccatcttcagtgccatctggactcccaccaagtgcaacaccctccactgtgccttttggaccagcaccaacaggaatgtatccctccgtgcctcccaccggaccacctccaggacccccagcaccctttcctccttccggaccatcatgtcccccacctggtggtccttatccagccccaactgtgccgggccctggccccacagggccatatcctacaccaaatatgccctttccagagctacccagaccatatggtgcacccacagatccagctgcagctggtcctttaggtccatggggatccatgtcttctggaccttgggcgccaggaatgggagggcagtatcctacccctaatatgccatatccatctccaggcccatatcccgctcctcctcctccccaagcccctggggcagcaccacctgttccatggggcaccgttccaccaggagcctggggaccaccagcaccatatcctgcccctacaggatcgtatcccacaccaggactctatcctactcccagtaatcctttccaagtgccttcaggaccttctggtgctccaccaatgcctggtggcccccattcttaccattaagttaacaatggacgaagagatgacgctttgctttttgaagtacatgtatatgcacatgaatgcatatataaaaattgctggtttcactattagagggcattcatgaaagaacaactcttgcacctctcagagaagataactgcctcttgtacttggatgcgtagtacatcatatgtatacaatcagataaaagcatagaagtaaatcattcggatgtgatttttatttggttttcatggaaagttaaagtgataaagtatattgaatagttctttgacagaatttgtttaaactatgaaactacacacttaaaaatctaagatgtggattattgttagaatctgcaacttcattggcaaattatttcaagtatttttctataatcactttccccttctaaataaataaacttcgagaataacccatcataatccaaacaaatgatgcctcaacattttgagctgctctgtcggacaaataaacctggtcctcttgaggttatattttggatatacatttttaaactgtcagtaattattgtcagatgtggagttcaatagccagccagtgttcatttttatccttgagcttttagtaaaaacttcctggttttatttttagtcattgggtcatacagcactaaagtctgctatttatggaaactaacttttttgtttttaatccaggccaacatgtatgtaaattaaatttttagataattgattatctctttgtactacttgagatttgattatgagatgtgcatattgctttgggaagagctcgaggaaggaaataattctctcctttgttttgaacctcaaactagataaaccctaggaattgcttaactgcaacaagtaattttcattcccacaaaaacctgaggcagctcttttgcccagagcgttccctgtagccacccccaccccacttgcccttggttctttagaaggagcacacacatcccttgattcctccctgatgtggtaaactggcacactccaggggtctaaaacataaaacagttgtgtttagggaaccttaagtcatgcagacatgactgttctctttgtacaagtgtgaatcaaaatatgtatctctttttcagagtctggttaagctatgtcattgtctactgcatagtttcctgagtctgtttgtaaagtgcttatggctaacagttcagttctgtatttgttgacaggtaaataagtggagttgagtgccatctttgaaaaaattaccctctagctctaacactgaaaataataataaattgtagatctctgcaactaagtttaaagcagtgtgactgtgttgcttaaatatcaagtattgtttataaccaccaaaaaaaaaaaagccctggtagttttttggcaccttatgtttaaatcagattcttagatttggagtagacctgaccttgttatttattagataacattttgaatgtatccattggatttctaaaatgtattgtgaatttctcagacaaacaggatttatgctggagctctgttttgcttagaaataaaatatttagtagtttatttctgctctaattaaaatgttcactttacccctggataaaggcactttcactgcctgtcactgatcagcagatactgacttgttgccattaagtgaacttgacttcttatgtgtgctctatgagtttgttgtaattttcttcttgaaattgtgatttttcactgacagtaatgacaaatttaatgtatgtaattgtctatgcattttaagttaaactgcctaaaatgtgatttgagacatatacatatgtttgtattataaattgtaagcaatcagtttgagatactaggttttatcacctgctgctgtatttgtaaacaaagacaaatgttgctttaagaagtaattataattaggaataggctatggatgtgatacttggtattttttaagataaacttgtttgcttttgtgtattatacctggaaactttttttaaaaaatggcctgagatacctctttgcatgtgacctgcattcacctaaggatatctggaaaccacccttcctccgcaaaccctctcagcaacatggtgtcccattgtggtgattttctcttcttttaaggctaggctactcttggtaaccagattatccgtatatatgataatatgaagtcagggaactttctctgtctgtccctactcccctcactcccccactttctgttatgaaagatagttctacttttatcattaactcctacgcatttagtgagggtcacattattaaacttggagtttaccattttcccacaggagatttcgctggcattccttggaactcccaatttcagtagggcaatgaatgaatgaatactttgcagtgctacttttggaaggaatttctgctttttgccttatgattggacaaaatgcagctgtaaaattttaaattgtttttgatatgttattcaatatcccatgaaagtattcacctaaagtggagttatgaaatggatggtgaaataataagaccattctggagcagggcca

SEQ ID NO: 300484 - DNA, 3559 bp, Homo sapiens
agcgggcttcctgttccggcgccaggaggagccgcgcgctgctggtgctgttgccgccgctgctctagctgccgtcagtcaggctgcgcccgcgtcttcagggcccagtccctcggacccatcgccgcttctagaccctactgcggtctcggatattgccggttggcagatgcactacctgaacactcccctgccaaaacctctgctgtgagcaatacaaaacctggccaacctcctcaaggctggccaggctccaacccttggaataatccgagtgctccatcttcagtgccatctggactcccaccaagtgcaacaccctccactgtgccttttggaccagcaccaacaggaatgtatccctccgtgcctcccaccggaccacctccaggacccccagcaccctttcctccttccggaccatcatgtcccccacctggtggtccttatccagccccaactgtgccgggccctggccccacagggccatatcctacaccaaatatgccctttccagagctacccagaccatatggtgcacccacagatccagctgcagctggtcctttaggtccatggggatccatgtcttctggaccttgggcgccaggaatgggagggcagtatcctacccctaatatgccatatccatctccaggcccatatcccgctcctcctcctccccaagcccctggggcagcaccacctgttccatggggcaccgttccaccaggagcctggggaccaccagcaccatatcctgcccctacaggatcgtatcccacaccaggactctatcctactcccagtaatcctttccaagtgccttcaggaccttctggtgctccaccaatgcctggtggcccccattcttaccattaagttaacaatggacgaagagatgacgctttgctttttgaagtacatgtatatgcacatgaatgcatatataaaaattgctggtttcactattagagggcattcatgaaagaacaactcttgcacctctcagagaagataactgcctcttgtacttggatgcgtagtacatcatatgtatacaatcagataaaagcatagaagtaaatcattcggatgtgatttttatttggttttcatggaaagttaaagtgataaagtatattgaatagttctttgacagaatttgtttaaactatgaaactacacacttaaaaatctaagatgtggattattgttagaatctgcaacttcattggcaaattatttcaagtatttttctataatcactttccccttctaaataaataaacttcgagaataacccatcataatccaaacaaatgatgcctcaacattttgagctgctctgtcggacaaataaacctggtcctcttgaggttatattttggatatacatttttaaactgtcagtaattattgtcagatgtggagttcaatagccagccagtgttcatttttatccttgagcttttagtaaaaacttcctggttttatttttagtcattgggtcatacagcactaaagtctgctatttatggaaactaacttttttgtttttaatccaggccaacatgtatgtaaattaaatttttagataattgattatctctttgtactacttgagatttgattatgagatgtgcatattgctttgggaagagctcgaggaaggaaataattctctcctttgttttgaacctcaaactagataaaccctaggaattgcttaactgcaacaagtaattttcattcccacaaaaacctgaggcagctcttttgcccagagcgttccctgtagccacccccaccccacttgcccttggttctttagaaggagcacacacatcccttgattcctccctgatgtggtaaactggcacactccaggggtctaaaacataaaacagttgtgtttagggaaccttaagtcatgcagacatgactgttctctttgtacaagtgtgaatcaaaatatgtatctctttttcagagtctggttaagctatgtcattgtctactgcatagtttcctgagtctgtttgtaaagtgcttatggctaacagttcagttctgtatttgttgacaggtaaataagtggagttgagtgccatctttgaaaaaattaccctctagctctaacactgaaaataataataaattgtagatctctgcaactaagtttaaagcagtgtgactgtgttgcttaaatatcaagtattgtttataaccaccaaaaaaaaaaaagccctggtagttttttggcaccttatgtttaaatcagattcttagatttggagtagacctgaccttgttatttattagataacattttgaatgtatccattggatttctaaaatgtattgtgaatttctcagacaaacaggatttatgctggagctctgttttgcttagaaataaaatatttagtagtttatttctgctctaattaaaatgttcactttacccctggataaaggcactttcactgcctgtcactgatcagcagatactgacttgttgccattaagtgaacttgacttcttatgtgtgctctatgagtttgttgtaattttcttcttgaaattgtgatttttcactgacagtaatgacaaatttaatgtatgtaattgtctatgcattttaagttaaactgcctaaaatgtgatttgagacatatacatatgtttgtattataaattgtaagcaatcagtttgagatactaggttttatcacctgctgctgtatttgtaaacaaagacaaatgttgctttaagaagtaattataattaggaataggctatggatgtgatacttggtattttttaagataaacttgtttgcttttgtgtattatacctggaaactttttttaaaaaatgtattttcatggtttcacagatttttcatgttattttattctttaggccccaattctgggcttcctctgagcaagtcccagagccctaattaactgtaaatttgttgtcaaaaaggaagaaaaaagggcctgagatacctctttgcatgtgacctgcattcacctaaggatatctggaaaccacccttcctccgcaaaccctctcagcaacatggtgtcccattgtggtgattttctcttcttttaaggctaggctactcttggtaaccagattatccgtatatatgataatatgaagtcagggaactttctctgtctgtccctactcccctcactcccccactttctgttatgaaagatagttctacttttatcattaactcctacgcatttagtgagggtcacattattaaacttggagtttaccattttcccacaggagatttcgctggcattccttggaactcccaatttcagtagggcaatgaatgaatgaatactttgcagtgctacttttggaaggaatttctgctttttgccttatgattggacaaaatgcagctgtaaaattttaaattgtttttgatatgttattcaatatcccatgaaagtattcacctaaagtggagttatgaaatggatggtgaaataataagaccattctggagcagggcca

SEQ ID NO: 300485 - DNA, 3375 bp, Homo sapiens
tcggatattgccgggaaaatgtctgatgaattttcgttggcagatgcactacctgaacactcccctgcccctctgctgtgagcaatacgagtgctccatcttcagtgccatctggactcccaccaagtgcaacaccctccactgtgccttttggaccagcaccaacaggaatgtatccctccgtgcctcccaccggaccacctccaggacccccagcaccctttcctccttccggaccatcatgtcccccacctggtggtccttatccagccccaactgtgccgggccctggccccacagggccatatcctacaccaaatatgccctttccagagctacccagaccatatggtgcacccacagatccagctgcagctggtcctttaggtccatggggatccatgtcttctggaccttgggcgccaggaatgggagggcagtatcctacccctaatatgccatatccatctccaggcccatatcccgctcctcctcctccccaagcccctggggcagcaccacctgttccatggggcaccgttccaccaggagcctggggaccaccagcaccatatcctgcccctacaggatcgtatcccacaccaggactctatcctactcccagtaatcctttccaagtgccttcaggaccttctggtgctccaccaatgcctggtggcccccattcttaccattaagttaacaatggacgaagagatgacgctttgctttttgaagtacatgtatatgcacatgaatgcatatataaaaattgctggtttcactattagagggcattcatgaaagaacaactcttgcacctctcagagaagataactgcctcttgtacttggatgcgtagtacatcatatgtatacaatcagataaaagcatagaagtaaatcattcggatgtgatttttatttggttttcatggaaagttaaagtgataaagtatattgaatagttctttgacagaatttgtttaaactatgaaactacacacttaaaaatctaagatgtggattattgttagaatctgcaacttcattggcaaattatttcaagtatttttctataatcactttccccttctaaataaataaacttcgagaataacccatcataatccaaacaaatgatgcctcaacattttgagctgctctgtcggacaaataaacctggtcctcttgaggttatattttggatatacatttttaaactgtcagtaattattgtcagatgtggagttcaatagccagccagtgttcatttttatccttgagcttttagtaaaaacttcctggttttatttttagtcattgggtcatacagcactaaagtctgctatttatggaaactaacttttttgtttttaatccaggccaacatgtatgtaaattaaatttttagataattgattatctctttgtactacttgagatttgattatgagatgtgcatattgctttgggaagagctcgaggaaggaaataattctctcctttgttttgaacctcaaactagataaaccctaggaattgcttaactgcaacaagtaattttcattcccacaaaaacctgaggcagctcttttgcccagagcgttccctgtagccacccccaccccacttgcccttggttctttagaaggagcacacacatcccttgattcctccctgatgtggtaaactggcacactccaggggtctaaaacataaaacagttgtgtttagggaaccttaagtcatgcagacatgactgttctctttgtacaagtgtgaatcaaaatatgtatctctttttcagagtctggttaagctatgtcattgtctactgcatagtttcctgagtctgtttgtaaagtgcttatggctaacagttcagttctgtatttgttgacaggtaaataagtggagttgagtgccatctttgaaaaaattaccctctagctctaacactgaaaataataataaattgtagatctctgcaactaagtttaaagcagtgtgactgtgttgcttaaatatcaagtattgtttataaccaccaaaaaaaaaaaagccctggtagttttttggcaccttatgtttaaatcagattcttagatttggagtagacctgaccttgttatttattagataacattttgaatgtatccattggatttctaaaatgtattgtgaatttctcagacaaacaggatttatgctggagctctgttttgcttagaaataaaatatttagtagtttatttctgctctaattaaaatgttcactttacccctggataaaggcactttcactgcctgtcactgatcagcagatactgacttgttgccattaagtgaacttgacttcttatgtgtgctctatgagtttgttgtaattttcttcttgaaattgtgatttttcactgacagtaatgacaaatttaatgtatgtaattgtctatgcattttaagttaaactgcctaaaatgtgatttgagacatatacatatgtttgtattataaattgtaagcaatcagtttgagatactaggttttatcacctgctgctgtatttgtaaacaaagacaaatgttgctttaagaagtaattataattaggaataggctatggatgtgatacttggtattttttaagataaacttgtttgcttttgtgtattatacctggaaactttttttaaaaaatgtattttcatggtttcacagatttttcatgttattttattctttaggccccaattctgggcttcctctgagcaagtcccagagccctaattaactgtaaatttgttgtcaaaaaggaagaaaaaagggcctgagatacctctttgcatgtgacctgcattcacctaaggatatctggaaaccacccttcctccgcaaaccctctcagcaacatggtgtcccattgtggtgattttctcttcttttaaggctaggctactcttggtaaccagattatccgtatatatgataatatgaagtcagggaactttctctgtctgtccctactcccctcactcccccactttctgttatgaaagatagttctacttttatcattaactcctacgcatttagtgagggtcacattattaaacttggagtttaccattttcccacaggagatttcgctggcattccttggaactcccaatttcagtagggcaatgaatgaatgaatactttgcagtgctacttttggaaggaatttctgctttttgccttatgattggacaaaatgcagctgtaaaattttaaattgtttttgatatgttattcaatatcccatgaaagtattcacctaaagtggagttatgaaatggatggtgaaataataagaccattctggagcagggcca

SEQ ID NO: 300486 - DNA, 2864 bp, Homo sapiens
agcgggcttcctgttccggcgccaggaggagccgcgcgctgctggtgctgttgccgccgctgctctagctgccgtcagtcaggctgcgcccgcgtcttcagggcccagtccctcggacccatcgccgcttctagaccctactgcggtctcggatattgccgggaaaatgtctgatgaattttcgttggcagatgcactacctgaacactcccctgccaaaacctctgctgtgagcaatacaaaacctggccaacctcctcaaggctggccaggctccaacccttggaataatccgagtgctccatcttcagtgccatctggactcccaccaagtgcaacaccctccactgtgccttttggaccagcaccaacaggaatgtatccctccgtgcctcccaccggaccacctccaggacccccagcaccctttcctccttccggaccatcatgtcccccacctggtggtccttatccagccccaactgtgccgggccctggccccacagggccatatcctacaccaaatatgccctttccagagctacccagaccatatggtgcacccacagatccagctgcagctggtcctttaggtccatggggatccatgtcttctggaccttgggcgccaggaatgggagggcagtatcctacccctaatatgccatatccatctccaggcccatatcccgctcctcctcctccccaagcccctggggcagcaccacctgttccatggggcaccgttccaccaggagcctggggaccaccagcaccatatcctgcccctacaggatcgtatcccacaccaggactctatcctactcccagtaatcctttccaagtgccttcaggaccttctggtgctccaccaatgcctggtggcccccattcttaccattaagttaacaatggacgaagagatgacgctttgctttttgaagtacatgtatatgcacatgaatgcatatataaaaattgctggtttcactattagagggcattcatgaaagaacaactcttgcacctctcagagaagataactgcctcttgtacttggatgcgtagtacatcatatgtatacaatcagataaaagcatagaagtaaatcattcggatgtgatttttatttggttttcatggaaagttaaagtgataaagtatattgaatagttctttgacagaatttgtttaaactatgaaactacacacttaaaaatctaagatgtggattattgttagaatctgcaacttcattggcaaattatttcaagtatttttctataatcactttccccttctaaataaataaacttcgagaataacccatcataatccaaacaaatgatgcctcaacattttgagctgctctgtcggacaaataaacctggtcctcttgaggttatattttggatatacatttttaaactgtcagtaattattgtcagatgtggagttcaatagccagccagtgttcatttttatccttgagcttttagtaaaaacttcctggttttatttttagtcattgggtcatacagcactaaagtctgctatttatggaaactaacttttttgtttttaatccaggccaacatgtatgtaaattaaatttttagataattgattatctctttgtactacttgagatttgattatgagatgtgcatattgctttgggaagagctcgaggaaggaaataattctctcctttgttttgaacctcaaactagataaaccctaggaattgcttaactgcaacaagtaattttcattcccacaaaaacctgaggcagctcttttgcccagagcgttccctgtagccacccccaccccacttgcccttggttctttagaaggagcacacacatcccttgattcctccctgatgtggtaaactggcacactccaggggtctaaaacataaaacagttgtgtttagggaaccttaagtcatgcagacatgactgttctctttgtacaagtgtgaatcaaaatatgtatctctttttcagagtctggttaagctatgtcattgtctactgcatagtttcctgagtctgtttgtaaagtgcttatggctaacagttcagttctgtatttgttgacaggtaaataagtggagttgagtgccatctttgaaaaaattaccctctagctctaacactgaaaataataataaattgtagatctctgcaactaagtttaaagcagtgtgactgtgttgcttaaatatcaagtattgtttataaccaccaaaaaaaaaaaagccctggtagttttttggcaccttatgtttaaatcagattcttagatttggagtagacctgaccttgttatttattagataacattttgaatgtatccattggatttctaaaatgtattgtgaatttctcagacaaacaggatttatgctggagctctgttttgcttagaaataaaatatttagtagtttatttctgctctaattaaaatgtcaagaatgccaaatgctgccagttttttggtttgatagctacctccttctaagaaagcaaaatggttacctttgagaggaacattcagtgtttaatcatcccttatgttaactagatgatagattcaagcttttagaaatgagaaagtagaaactaatttgttaagatattttcagactgcggaatgttgttagctttttctttcacttctcttcaaggacaggtgttagctgtctacaatactgttgaactctgttgtcaaagtagcccccttagtctacaaggcaggtagccttggcttgaattatcaatatcaaaatgtcagttaaccatggagggataaagtaatgtgaaaagtgagatggctgcaaagatagctctcc

SEQ ID NO: 300487 - DNA, 2931 bp, Homo sapiens
ggggcataaacaactgttccagtggccgcaccgcttccacacaggtgaagtctggagtaccaccctagcatgcatactccatgcaccacttactagggtatctgtaatcacgcagccatctcgaggtatcttcctatcactaacatccacaggtcaactgcgctgtgtcacaacggtagccgtttcagtgaacctatactggatgactgccagtcaattgaccgtggatggacctcgccatttcttaccattaagttaacaatggacgaagagatgacgctttgctttttgaagtacatgtatatgcacatgaatgcatatataaaaattgctggtttcactattagagggcattcatgaaagaacaactcttgcacctctcagagaagataactgcctcttgtacttggatgcgtagtacatcatatgtatacaatcagataaaagcatagaagtaaatcattcggatgtgatttttatttggttttcatggaaagttaaagtgataaagtatattgaatagttctttgacagaatttgtttaaactatgaaactacacacttaaaaatctaagatgtggattattgttagaatctgcaacttcattggcaaattatttcaagtatttttctataatcactttccccttctaaataaataaacttcgagaataacccatcataatccaaacaaatgatgcctcaacattttgagctgctctgtcggacaaataaacctggtcctcttgaggttatattttggatatacatttttaaactgtcagtaattattgtcagatgtggagttcaatagccagccagtgttcatttttatccttgagcttttagtaaaaacttcctggttttatttttagtcattgggtcatacagcactaaagtctgctatttatggaaactaacttttttgtttttaatccaggccaacatgtatgtaaattaaatttttagataattgattatctctttgtactacttgagatttgattatgagatgtgcatattgctttgggaagagctcgaggaaggaaataattctctcctttgttttgaacctcaaactagataaaccctaggaattgcttaactgcaacaagtaattttcattcccacaaaaacctgaggcagctcttttgcccagagcgttccctgtagccacccccaccccacttgcccttggttctttagaaggagcacacacatcccttgattcctccctgatgtggtaaactggcacactccaggggtctaaaacataaaacagttgtgtttagggaaccttaagtcatgcagacatgactgttctctttgtacaagtgtgaatcaaaatatgtatctctttttcagagtctggttaagctatgtcattgtctactgcatagtttcctgagtctgtttgtaaagtgcttatggctaacagttcagttctgtatttgttgacaggtaaataagtggagttgagtgccatctttgaaaaaattaccctctagctctaacactgaaaataataataaattgtagatctctgcaactaagtttaaagcagtgtgactgtgttgcttaaatatcaagtattgtttataaccaccaaaaaaaaaaaagccctggtagttttttggcaccttatgtttaaatcagattcttagatttggagtagacctgaccttgttatttattagataacattttgaatgtatccattggatttctaaaatgtattgtgaatttctcagacaaacaggatttatgctggagctctgttttgcttagaaataaaatatttagtagtttatttctgctctaattaaaatgttcactttacccctggataaaggcactttcactgcctgtcactgatcagcagatactgacttgttgccattaagtgaacttgacttcttatgtgtgctctatgagtttgttgtaattttcttcttgaaattgtgatttttcactgacagtaatgacaaatttaatgtatgtaattgtctatgcattttaagttaaactgcctaaaatgtgatttgagacatatacatatgtttgtattataaattgtaagcaatcagtttgagatactaggttttatcacctgctgctgtatttgtaaacaaagacaaatgttgctttaagaagtaattataattaggaataggctatggatgtgatacttggtattttttaagataaacttgtttgcttttgtgtattatacctggaaactttttttaaaaaatgtattttcatggtttcacagatttttcatgttattttattctttaggccccaattctgggcttcctctgagcaagtcccagagccctaattaactgtaaatttgttgtcaaaaaggaagaaaaaagggcctgagatacctctttgcatgtgacctgcattcacctaaggatatctggaaaccacccttcctccgcaaaccctctcagcaacatggtgtcccattgtggtgattttctcttcttttaaggctaggctactcttggtaaccagattatccgtatatatgataatatgaagtcagggaactttctctgtctgtccctactcccctcactcccccactttctgttatgaaagatagttctacttttatcattaactcctacgcatttagtgagggtcacattattaaacttggagtttaccattttcccacaggagatttcgctggcattccttggaactcccaatttcagtagggcaatgaatgaatgaatactttgcagtgctacttttggaaggaatttctgctttttgccttatgattggacaaaatgcagctgtaaaattttaaattgtttttgatatgttattcaatatcccatgaaagtattcacctaaagtggagttatgaaatggatggtgaaataataagaccattctggagcagggcca

SEQ ID NO: 300488 - DNA, 1107 bp, Homo sapiens
agcgggcttcctgttccggcgccaggaggagccgcgcgctgctggtgctgttgccgccgctgctctagctgccgtcagtcaggctgcgcccgcgtcttcagggcccagtccctcggacccatcgccgcttctagaccctactgcggtctcggatattgccgggaaaatgtctgatgaattttcgttggcagatgcactacctgaacactcccctgccaaaacctctgctgtgagcaatacaaaacctggccaacctcctcaaggctggccaggctccaacccttggaataatccgagtgctccatcttcagtgccatctggactcccaccaagtgcaacaccctccactgtgccttttggaccagcaccaacaggaatgtatccctccgtgcctcccaccggaccacctccaggacccccagcaccctttcctccttccggaccatcatgtcccccacctggtggtccttatccagccccaactgtgccgggccctggccccacagggccatatcctacaccaaatatgccctttccagagctacccagaccatatggtgcacccacagatccagctgcagctggtcctttaggtccatggggatccatgtcttctggaccttgggcgccaggaatgggagggcagtatcctacccctaatatgccatatccatctccaggcccatatcccgctcctcctcctccccaagcccctggggcagcaccacctgttccatggggcaccgttccaccaggagcctggggaccaccagcaccatatcctgcccctacaggatcgtatcccacaccaggactctatcctactcccagtaatcctttccaagtgccttcaggaccttctggtgctccaccaatgcctggtggcccccattcttaccattaagttaacaatggacgaagagatgacgctttgctttttgaagtacatgtatatgcacatgaatgcatatataaaaattgctggtttcactattagagggcattcatgaaagaacaactcttgcacctctcagagaagataactgcctcttgtacttggatgcgtagtacatcatatgtatacaatcagataaaagcatagaagta

SEQ ID NO: 300489 - DNA, 757 bp, Homo sapiens
agtgtatgtatctgcctgttgcttatgattcacagtattcctgctggaagggttcatttttctgaggcttgaggagaagttgcttgtccaggattctgttcttccttgggtccttggattctcacgctgctgtcgtttttcctgttcagtcctaatccagacctctgtggtctgtcacatagcaccctcctccctctctgtgagtctcctgcttggctctgtcatattcctctttttttccttttctagaaagaaaagtcaaaatcgaacagttcagcagcccgagaacctaatggctttccttctgatgcctcagccaattcctctctccttcttgaattccaggacgaaaacagcaaccagagttccgtgtctgacgtctatcagcttaaggtggacagcagcaccaactcaagccccagcccccagcagagtgagtccctgagcccagcacacacatctgcacacacgcagctttgttctcacctctacctgtcattccagcatccctgcctcttgtcacaaactgccccagcaagaatttgaggttctgacaacagtacccatcccccacagtaccccttcagctcagtttctagaaagctcccttttctttgaaatctgcatgttgaattgaactttgtgattttattttttgtttcaaaaaagtttaagaaaatggaaatgggcaacagtgagtgaagacatattttagcactgaatagaatatttttaaaattaaactatttgaaatatg

SEQ ID NO: 300490 - DNA, 837 bp, Homo sapiens
tgactttaagccttcaggcagaactcccaggtgctaatccgtcagtccggcagccgaagcctgagctcaccaccttcagacaccaccagcctccttcagatgcccaaggatgcctgacaaatgtcattttctacacatcttatgatgtgagaaggattgagaagtactgaccagagacacagctacatccctcccttccacaagctgcaatcagtggataataaagaagagtttaataagcatatcctgaccttcctaaagtgtaatgttgcataaacataaagattctggctgcctctggtgcttagaatctatgtcgtgtaggccgggcacaatgattattatactcagttgtatccttggctgcctaaagtgatgccaggcccttggctctgtccagagttcctcttgaggaaaatgaccacgctcagctgctgcctttgttctgtttggttttcagacgaaaacagcaaccagagttccgtgtctgacgtctatcagcttaaggtggacagcagcaccaactcaagccccagcccccagcagagtgagtccctgagcccagcacacacctccgacttccgcacggatgactcccagcccccaacgctgggccaggagatcctggagggtgagtcgtggttggccgaggatgagtttcctagaagggccttgctttctgctcttgttgtgtctcgtctttagagtaacaggctcgagagagcacctcagagccaggcagcaccaagccctttctcgatagcttaggaatgattatagtttcccctttcacagagggaagggagaaaacaagcattagagttgcgtgccaggctg

SEQ ID NO: 300491 - DNA, 191 bp, Homo sapiens
gcggccgcctactactactactactgctcgaattcaagcttctaacgatgtacggggacatgttgaattgaactttgtgattttattttttgtttcaaaaaagtttaagaaaatggaaatgggcaacagtgagtgaagacatattttagcactgaatagaatatttttaaaattaaactatttgaaatatg

SEQ ID NO: 300492 - DNA, 1967 bp, Homo sapiens
gagatggcgcaggagtgcggttccacagggtcaggttcctaacacgctggccagagcagggagccgacctccaaactctcagggaagagaaccaggttgcccaccggcggcacctcgcacctcgccctgaccacaagcacgtgcgcccaacccgcctcgcaccccggcccgggtagggggctcaggggactcccggggcactcaggagggacgccccgggcggggcgcgcaggcgcgctgaggccgtgagccccaaggggcgggcgggtgcgcgcgctttctcgcgcacgcgcgcacggagggggcgacggccgctgtgacgctgcggcggcggcgggcgggcggcggcgcgtgaggcgcgcgatccccggtgtcttgggagcagtgccccggcccccgccgctcccgccgccgccatgtcgggccggtcggtccgggcggagacccgcagccgggccaaggacgacatcaagaaggtgatggcggccatcgagaaagtgcggaaatgggagaagaagtgggtgactgtgggtgacacgtccctgaggatatttaagtgggttcctgtgacagacagcaaggagaaagaaaagtcaaaatcgaacagttcagcagcccgagaacctaatggctttccttctgatgcctcagccaattcctctctccttcttgaattccaggacgaaaacagcaaccagagttccgtgtctgacgtctatcagcttaaggtggacagcagcaccaactcaagccccagcccccagcagagtgagtccctgagcccagcacacacctccgacttccgcacggatgactcccagcccccaacgctgggccaggagatcctggaggagccctccctgccctcctcggaagttgctgatgaacctcctaccctcaccaaggaagaaccagttccactagagacacaggtcgttgaggaagaggaagactcaggtgccccgcccctgaagcgcttctgtgtggaccaacccacagtgccgcagacggcgtcagaaagctagcaccatcccggccctccgcctcctggccctgcctctatttattgcattctggttctggccgcgccgcgttgctggggtaagggcaagcactggggtcaagagcctgcacacatgagccttccgggctggaaggctggcgtaggacttggggctgtagcatcatcttcctgaccctggcacctgtgtctacttgctcccgagaagaggagcgctcatgtcttttttgcaccccaagttggctggagcatcggccaccccaagattcatctgtgacctccaggcagcagtctctgctccagaatctctggacggagctgctggcagcttctgcgagaagagagagatgtggaaggcaccttctagaagagagcgtgcctcaggttacttgaacttgaacggagactgtagactcccggactttcccctaggactgggggccctgtaggctgctgttggaggactgggtagagacattggagggaagggaagggcttttctccacacaagggcagagagtccgtctagatttcttgctgtcctgccagctctgcccatgcctgaggtggtcctacctctcacgggcaccctagctgctgacagccctttgtggccgccgtccccatcccctgccctcagcacacacatctgcacacacgcagctttgttctcacctctacctgtcattccagcatccctgcctcttgtcacaaactgccccagcaagaatttgaggttctgacaacagtacccatcccccacagtaccccttcagctcagtttctagaaagctcccttttctttgaaatctgcatgttgaattgaactttgtgattttattttttgtttcaaaaaagtttaagaaaatggaaatgggcaacagtgagtgaagacatattttagcactgaatagaatatttttaaaattaaactatttgaaatatg

SEQ ID NO: 300493 - DNA, 2184 bp, Homo sapiens
gagatggcgcaggagtgcggttccacagggtcaggttcctaacacgctggccagagcagggagccgacctccaaactctcagggaagagaaccaggttgcccaccggcggcacctcgcacctcgccctgaccacaagcacgtgcgcccaacccgcctcgcaccccggcccgggtagggggctcaggggactcccggggcactcaggagggacgccccgggcggggcgcgcaggcgcgctgaggccgtgagccccaaggggcgggcgggtgcgcgcgctttctcgcgcacgcgcgcacggagggggcgacggccgctgtgacgctgcggcggcggcgggcgggcggcggcgcgtgaggcgcgcgatccccggtgtcttgggagcagtgccccggcccccgccgctcccgccgccgccatgtcgggccggtcggtccgggcggagacccgcagccgggccaaggacgacatcaagaaggtgatggcggccatcgagaaagtgcggaaatgggagaagaagtgggtgactgtgggtgacacgtccctgaggatatttaagtgggttcctgtgacagacagcaaggagaaagaaaagtcaaaatcgaacagttcagcagcccgagaacctaatggctttccttctgatgcctcagccaattcctctctccttcttgaattccaggacgaaaacagcaaccagagttccgtgtctgacgtctatcagcttaaggtggacagcagcaccaactcaagccccagcccccagcagagtgagtccctgagcccagcacacacctccgacttccgcacggatgactcccagcccccaacgctgggccaggagatcctggaggagccctccctgccctcctcggaagttgctgatgaacctcctaccctcaccaaggaagaaccagttccactagagacacaggtcgttgaggaagaggaagactcaggtgccccgcccctgaagcgcttctgtgtggaccaacccacagtgccgcagacggcgtcagaaagctagcaccatcccggccctccgcctcctggccctgcctctatttattgcattctggttctggccgcgccgcgttgctggggtaagggcaagcactggggtcaagagcctgcacacatgagccttccgggctggaaggctggcgtaggacttggggctgtagcatcatcttcctgaccctggcacctgtgtctacttgctcccgagaagaggagcgctcatgtcttttttgcaccccaagttggctggagcatcggccaccccaagattcatctgtgacctccaggcagcagtctctgctccagaatctctggacggagctgctggcagcttctgcgagaagagagagatgtggaaggcaccttctagaagagagcgtgcctcaggttacttgaacttgaacggagactgtagactcccggactttcccctaggactgggggccctgtaggctgctgttggaggactgggtagagacattggagggaagggaagggcttttctccacacaagggcagagagtccgtctagatttcttgctgtcctgccagctctgcccatgcctgaggtggtcctacctctcacgggcaccctagctgctgacagccctttgtggccgccgtccccatcccctgccctcagcacacacatctgcacacacgcagctttgttctcacctctacctgtcattccagcatccctgcctcttgtcacaaactgccccagcaagaatttgaggttctgacaacagtacccatcccccacagtaccccttcagctcagtttctagaaagctcccttttctttgaaatctgcatgttgaattgaactttgtgattttattttttgtttcaaaaaagtttaagaaaatggaaatgggcaacagtgagtgaagacatattttagcactgaatagaatatttttaaaattaaactatttgaaatatgaaaaaaaaaaagataataaaaaaaaaatttaaaagtaaaaaaaaaaaaaaaaaaccttgagggggggcccgtgcccaaatttgccctatatgggagccgttttacattccattggccgtctttaaaaaacgtcgtgacctggaaaaaccctgggtttcccaaattaaagcgctttgaaaaaaattcccctttttccccagttgcgtaaataccaaaa

SEQ ID NO: 300494 - DNA, 1877 bp, Homo sapiens
aggggattccggcttccggcccggactggagctgcctggcgtcggtgcccgcgcccggcccagcccggggcccgccctcccctcttcctgggcagtggccccgcctgcgtttccaggcttcctcttgataatagcgagtagccctggagtggtgtcagcccgccaggctgagcgctctgcgtattcaggcgttgaagttggggagaagaagtgggtgactgtgggtgacacgtccctgaggatatttaagtgggttcctgtgacagacagcaaggagaaagaaaagtcaaaatcgaacagttcagcagcccgagaacctaatggctttccttctgatgcctcagccaattcctctctccttcttgaattccaggacgaaaacagcaaccagagttccgtgtctgacgtctatcagcttaaggtggacagcagcaccaactcaagccccagcccccagcagagtgagtccctgagcccagcacacacctccgacttccgcacggatgactcccagcccccaacgctgggccaggagatcctggaggagccctccctgccctcctcggaagttgctgatgaacctcctaccctcaccaaggaagaaccagttccactagagacacaggtcgttgaggaagaggaagactcaggtgccccgcccctgaagcgcttctgtgtggaccaacccacagtgccgcagacggcgtcagaaagctagcaccatcccggccctccgcctcctggccctgcctctatttattgcattctggttctggccgcgccgcgttgctggggtaagggcaagcactggggtcaagagcctgcacacatgagccttccgggctggaaggctggcgtaggacttggggctgtagcatcatcttcctgaccctggcacctgtgtctacttgctcccgagaagaggagcgctcatgtcttttttgcaccccaagttggctggagcatcggccaccccaagattcatctgtgacctccaggcagcagtctctgctccagaatctctggacggagctgctggcagcttctgcgagaagagagagatgtggaaggcaccttctagaagagagcgtgcctcaggttacttgaacttgaacggagactgtagactcccggactttcccctaggactgggggccctgtaggctgctgttggaggactgggtagagacattggagggaagggaagggcttttctccacacaagggcagagagtccgtctagatttcttgctgtcctgccagctctgcccatgcctgaggtggtcctacctctcacgggcaccctagctgctgacagccctttgtggccgccgtccccatcccctgccctcagcacacacatctgcacacacgcagctttgttctcacctctacctgtcattccagcatccctgcctcttgtcacaaactgccccagcaagaatttgaggttctgacaacagtacccatcccccacagtaccccttcagctcagtttctagaaagctcccttttctttgaaatctgcatgttgaattgaactttgtgattttattttttgtttcaaaaaagtttaagaaaatggaaatgggcaacagtgagtgaagacatattttagcactgaatagaatatttttaaaattaaactatttgaaatatgaaaaaaaaaaagataataaaaaaaaaatttaaaagtaaaaaaaaaaaaaaaaaaccttgagggggggcccgtgcccaaatttgccctatatgggagccgttttacattccattggccgtctttaaaaaacgtcgtgacctggaaaaaccctgggtttcccaaattaaagcgctttgaaaaaaattcccctttttccccagttgcgtaaataccaaaa

SEQ ID NO: 300495 - DNA, 2306 bp, Homo sapiens
gagatggcgcaggagtgcggttccacagggtcaggttcctaacacgctggccagagcagggagccgacctccaaactctcagggaagagaaccaggttgcccaccggcggcacctcgcacctcgccctgaccacaagcacgtgcgcccaacccgcctcgcaccccggcccgggtagggggctcaggggactcccggggcactcaggagggacgccccgggcggggcgcgcaggcgcgctgaggccgtgagccccaaggggcgggcgggtgcgcgcgctttctcgcgcacgcgcgcacggagggggcgacggccgctgtgacgctgcggcggcggcgggcgggcggcggcgcgtgaggcgcgcgatccccggtgtcttgggagcagtgccccggcccccgccgctcccgccgccgccatgtcgggccggtcggtccgggcggagacccgcagccgggccaaggacgacatcaagaaggtgatggcggccatcgagaaagtgcggaaatgacggaatctcgctctgtcacccaggctggagtgcattggcgcaatctcggctcactgcaacctctgcctctcaggttcaagcaattctcctgcctcagcctcctgagtagctgggactacagggagaagaagtgggtgactgtgggtgacacgtccctgaggatatttaagtgggttcctgtgacagacagcaaggagaaagaaaagtcaaaatcgaacagttcagcagcccgagaacctaatggctttccttctgatgcctcagccaattcctctctccttcttgaattccaggacgaaaacagcaaccagagttccgtgtctgacgtctatcagcttaaggtggacagcagcaccaactcaagccccagcccccagcagagtgagtccctgagcccagcacacacctccgacttccgcacggatgactcccagcccccaacgctgggccaggagatcctggaggagccctccctgccctcctcggaagttgctgatgaacctcctaccctcaccaaggaagaaccagttccactagagacacaggtcgttgaggaagaggaagactcaggtgccccgcccctgaagcgcttctgtgtggaccaacccacagtgccgcagacggcgtcagaaagctagcaccatcccggccctccgcctcctggccctgcctctatttattgcattctggttctggccgcgccgcgttgctggggtaagggcaagcactggggtcaagagcctgcacacatgagccttccgggctggaaggctggcgtaggacttggggctgtagcatcatcttcctgaccctggcacctgtgtctacttgctcccgagaagaggagcgctcatgtcttttttgcaccccaagttggctggagcatcggccaccccaagattcatctgtgacctccaggcagcagtctctgctccagaatctctggacggagctgctggcagcttctgcgagaagagagagatgtggaaggcaccttctagaagagagcgtgcctcaggttacttgaacttgaacggagactgtagactcccggactttcccctaggactgggggccctgtaggctgctgttggaggactgggtagagacattggagggaagggaagggcttttctccacacaagggcagagagtccgtctagatttcttgctgtcctgccagctctgcccatgcctgaggtggtcctacctctcacgggcaccctagctgctgacagccctttgtggccgccgtccccatcccctgccctcagcacacacatctgcacacacgcagctttgttctcacctctacctgtcattccagcatccctgcctcttgtcacaaactgccccagcaagaatttgaggttctgacaacagtacccatcccccacagtaccccttcagctcagtttctagaaagctcccttttctttgaaatctgcatgttgaattgaactttgtgattttattttttgtttcaaaaaagtttaagaaaatggaaatgggcaacagtgagtgaagacatattttagcactgaatagaatatttttaaaattaaactatttgaaatatgaaaaaaaaaaagataataaaaaaaaaatttaaaagtaaaaaaaaaaaaaaaaaaccttgagggggggcccgtgcccaaatttgccctatatgggagccgttttacattccattggccgtctttaaaaaacgtcgtgacctggaaaaaccctgggtttcccaaattaaagcgctttgaaaaaaattcccctttttccccagttgcgtaaataccaaaa

SEQ ID NO: 300496 - DNA, 2152 bp, Homo sapiens
gagatggcgcaggagtgcggttccacagggtcaggttcctaacacgctggccagagcagggagccgacctccaaactctcagggaagagaaccaggttgcccaccggcggcacctcgcacctcgccctgaccacaagcacgtgcgcccaacccgcctcgcaccccggcccgggtagggggctcaggggactcccggggcactcaggagggacgccccgggcggggcgcgcaggcgcgctgaggccgtgagccccaaggggcgggcgggtgcgcgcgctttctcgcgcacgcgcgcacggagggggcgacggccgctgtgacgctgcggcggcggcgggcgggcggcggcgcgtgaggcgcgcgatccccggtgtcttgggagcagtgccccggcccccgccgctcccgccgccgccatgtcgggccggtcggtccgggcggagacccgcagccgggccaaggacgacatcaagaagggagaagaagtgggtgactgtgggtgacacgtccctgaggatatttaagtgggttcctgtgacagacagcaaggagaaagaaaagtcaaaatcgaacagttcagcagcccgagaacctaatggctttccttctgatgcctcagccaattcctctctccttcttgaattccaggacgaaaacagcaaccagagttccgtgtctgacgtctatcagcttaaggtggacagcagcaccaactcaagccccagcccccagcagagtgagtccctgagcccagcacacacctccgacttccgcacggatgactcccagcccccaacgctgggccaggagatcctggaggagccctccctgccctcctcggaagttgctgatgaacctcctaccctcaccaaggaagaaccagttccactagagacacaggtcgttgaggaagaggaagactcaggtgccccgcccctgaagcgcttctgtgtggaccaacccacagtgccgcagacggcgtcagaaagctagcaccatcccggccctccgcctcctggccctgcctctatttattgcattctggttctggccgcgccgcgttgctggggtaagggcaagcactggggtcaagagcctgcacacatgagccttccgggctggaaggctggcgtaggacttggggctgtagcatcatcttcctgaccctggcacctgtgtctacttgctcccgagaagaggagcgctcatgtcttttttgcaccccaagttggctggagcatcggccaccccaagattcatctgtgacctccaggcagcagtctctgctccagaatctctggacggagctgctggcagcttctgcgagaagagagagatgtggaaggcaccttctagaagagagcgtgcctcaggttacttgaacttgaacggagactgtagactcccggactttcccctaggactgggggccctgtaggctgctgttggaggactgggtagagacattggagggaagggaagggcttttctccacacaagggcagagagtccgtctagatttcttgctgtcctgccagctctgcccatgcctgaggtggtcctacctctcacgggcaccctagctgctgacagccctttgtggccgccgtccccatcccctgccctcagcacacacatctgcacacacgcagctttgttctcacctctacctgtcattccagcatccctgcctcttgtcacaaactgccccagcaagaatttgaggttctgacaacagtacccatcccccacagtaccccttcagctcagtttctagaaagctcccttttctttgaaatctgcatgttgaattgaactttgtgattttattttttgtttcaaaaaagtttaagaaaatggaaatgggcaacagtgagtgaagacatattttagcactgaatagaatatttttaaaattaaactatttgaaatatgaaaaaaaaaaagataataaaaaaaaaatttaaaagtaaaaaaaaaaaaaaaaaaccttgagggggggcccgtgcccaaatttgccctatatgggagccgttttacattccattggccgtctttaaaaaacgtcgtgacctggaaaaaccctgggtttcccaaattaaagcgctttgaaaaaaattcccctttttccccagttgcgtaaataccaaaa

SEQ ID NO: 300497 - DNA, 2282 bp, Homo sapiens
gagatggcgcaggagtgcggttccacagggtcaggttcctaacacgctggccagagcagggagccgacctccaaactctcagggaagagaaccaggttgcccaccggcggcacctcgcacctcgccctgaccacaagcacgtgcgcccaacccgcctcgcaccccggcccgggtagggggctcaggggactcccggggcactcaggagggacgccccgggcggggcgcgcaggcgcgctgaggccgtgagccccaaggggcgggcgggtgcgcgcgctttctcgcgcacgcgcgcacggagggggcgacggccgctgtgacgctgcggcggcggcgggcgggcggcggcgcgtgaggcgcgcgatccccggtgtcttgggagcagtgccccggcccccgccgctcccgccgccgccatgtcgggccggtcggtccgggcggagacccgcagccgggccaaggacgacatcaagaaggtgatggcggccatcgagaaagtgcggaaatggctggagtgcattggcgcaatctcggctcactgcaacctctgcctctcaggttcaagcaattctcctgcctcagcctcctgagtagctgggactacagggagaagaagtgggtgactgtgggtgacacgtccctgaggatatttaagtgggttcctgtgacagacagcaaggagaaagaaaagtcaaaatcgaacagttcagcagcccgagaacctaatggctttccttctgatgcctcagccaattcctctctccttcttgaattccaggacgaaaacagcaaccagagttccgtgtctgacgtctatcagcttaaggtggacagcagcaccaactcaagccccagcccccagcagagtgagtccctgagcccagcacacacctccgacttccgcacggatgactcccagcccccaacgctgggccaggagatcctggaggagccctccctgccctcctcggaagttgctgatgaacctcctaccctcaccaaggaagaaccagttccactagagacacaggtcgttgaggaagaggaagactcaggtgccccgcccctgaagcgcttctgtgtggaccaacccacagtgccgcagacggcgtcagaaagctagcaccatcccggccctccgcctcctggccctgcctctatttattgcattctggttctggccgcgccgcgttgctggggtaagggcaagcactggggtcaagagcctgcacacatgagccttccgggctggaaggctggcgtaggacttggggctgtagcatcatcttcctgaccctggcacctgtgtctacttgctcccgagaagaggagcgctcatgtcttttttgcaccccaagttggctggagcatcggccaccccaagattcatctgtgacctccaggcagcagtctctgctccagaatctctggacggagctgctggcagcttctgcgagaagagagagatgtggaaggcaccttctagaagagagcgtgcctcaggttacttgaacttgaacggagactgtagactcccggactttcccctaggactgggggccctgtaggctgctgttggaggactgggtagagacattggagggaagggaagggcttttctccacacaagggcagagagtccgtctagatttcttgctgtcctgccagctctgcccatgcctgaggtggtcctacctctcacgggcaccctagctgctgacagccctttgtggccgccgtccccatcccctgccctcagcacacacatctgcacacacgcagctttgttctcacctctacctgtcattccagcatccctgcctcttgtcacaaactgccccagcaagaatttgaggttctgacaacagtacccatcccccacagtaccccttcagctcagtttctagaaagctcccttttctttgaaatctgcatgttgaattgaactttgtgattttattttttgtttcaaaaaagtttaagaaaatggaaatgggcaacagtgagtgaagacatattttagcactgaatagaatatttttaaaattaaactatttgaaatatgaaaaaaaaaaagataataaaaaaaaaatttaaaagtaaaaaaaaaaaaaaaaaaccttgagggggggcccgtgcccaaatttgccctatatgggagccgttttacattccattggccgtctttaaaaaacgtcgtgacctggaaaaaccctgggtttcccaaattaaagcgctttgaaaaaaattcccctttttccccagttgcgtaaataccaaaa

SEQ ID NO: 300498 - DNA, 1849 bp, Homo sapiens
agtgtatgtatctgcctgttgcttatgattcacagtattcctgctggaagggttcatttttctgaggcttgaggagaagttgcttgtccaggattctgttcttccttgggtccttggattctcacgctgctgtcgtttttcctgttcagtcctaatccagacctctgtggtctgtcacatagcaccctcctccctctctgtgagtctcctgcttggctctgtcatattcctctttttttccttttctagaaagaaaagtcaaaatcgaacagttcagcagcccgagaacctaatggctttccttctgatgcctcagccaattcctctctccttcttgaattccaggacgaaaacagcaaccagagttccgtgtctgacgtctatcagcttaaggtggacagcagcaccaactcaagccccagcccccagcagagtgagtccctgagcccagcacacacctccgacttccgcacggatgactcccagcccccaacgctgggccaggagatcctggaggagccctccctgccctcctcggaagttgctgatgaacctcctaccctcaccaaggaagaaccagttccactagagacacaggtcgttgaggaagaggaagactcaggtgccccgcccctgaagcgcttctgtgtggaccaacccacagtgccgcagacggcgtcagaaagctagcaccatcccggccctccgcctcctggccctgcctctatttattgcattctggttctggccgcgccgcgttgctggggtaagggcaagcactggggtcaagagcctgcacacatgagccttccgggctggaaggctggcgtaggacttggggctgtagcatcatcttcctgaccctggcacctgtgtctacttgctcccgagaagaggagcgctcatgtcttttttgcaccccaagttggctggagcatcggccaccccaagattcatctgtgacctccaggcagcagtctctgctccagaatctctggacggagctgctggcagcttctgcgagaagagagagatgtggaaggcaccttctagaagagagcgtgcctcaggttacttgaacttgaacggagactgtagactcccggactttcccctaggactgggggccctgtaggctgctgttggaggactgggtagagacattggagggaagggaagggcttttctccacacaagggcagagagtccgtctagatttcttgctgtcctgccagctctgcccatgcctgaggtggtcctacctctcacgggcaccctagctgctgacagccctttgtggccgccgtccccatcccctgccctcagcacacacatctgcacacacgcagctttgttctcacctctacctgtcattccagcatccctgcctcttgtcacaaactgccccagcaagaatttgaggttctgacaacagtacccatcccccacagtaccccttcagctcagtttctagaaagctcccttttctttgaaatctgcatgttgaattgaactttgtgattttattttttgtttcaaaaaagtttaagaaaatggaaatgggcaacagtgagtgaagacatattttagcactgaatagaatatttttaaaattaaactatttgaaatatgaaaaaaaaaaagataataaaaaaaaaatttaaaagtaaaaaaaaaaaaaaaaaaccttgagggggggcccgtgcccaaatttgccctatatgggagccgttttacattccattggccgtctttaaaaaacgtcgtgacctggaaaaaccctgggtttcccaaattaaagcgctttgaaaaaaattcccctttttccccagttgcgtaaataccaaaa

SEQ ID NO: 300499 - DNA, 2013 bp, Homo sapiens
gagatggcgcaggagtgcggttccacagggtcaggttcctaacacgctggccagagcagggagccgacctccaaactctcagggaagagaaccaggttgcccaccggcggcacctcgcacctcgccctgaccacaagcacgtgcgcccaacccgcctcgcaccccggcccgggtagggggctcaggggactcccggggcactcaggagggacgccccgggcggggcgcgcaggcgcgctgaggccgtgagccccaaggggcgggcgggtgcgcgcgctttctcgcgcacgcgcgcacggagggggcgacggccgctgtgacgctgcggcggcggcgggcgggcggcggcgcgtgaggcgcgcgatccccggtgtcttgggagcagtgccccggcccccgccgctcccgccgccgccatgtcgggccggtcggtccgggcggagacccgcagccgggccaaggacgacatcaagaaggtgatggcggccatcgagaaagtgcggaaatgggagaagaagtgggtgactgtgggtgacacgtccctgaggatatttaagtgggttcctgtgacagacagcaaggagaaagaaaagtcaaaatcgaacagttcagcagcccgagaacctaatggctttccttctgatgcctcagccaattcctctctccttcttgaattccaggagccctccctgccctcctcggaagttgctgatgaacctcctaccctcaccaaggaagaaccagttccactagagacacaggtcgttgaggaagaggaagactcaggtgccccgcccctgaagcgcttctgtgtggaccaacccacagtgccgcagacggcgtcagaaagctagcaccatcccggccctccgcctcctggccctgcctctatttattgcattctggttctggccgcgccgcgttgctggggtaagggcaagcactggggtcaagagcctgcacacatgagccttccgggctggaaggctggcgtaggacttggggctgtagcatcatcttcctgaccctggcacctgtgtctacttgctcccgagaagaggagcgctcatgtcttttttgcaccccaagttggctggagcatcggccaccccaagattcatctgtgacctccaggcagcagtctctgctccagaatctctggacggagctgctggcagcttctgcgagaagagagagatgtggaaggcaccttctagaagagagcgtgcctcaggttacttgaacttgaacggagactgtagactcccggactttcccctaggactgggggccctgtaggctgctgttggaggactgggtagagacattggagggaagggaagggcttttctccacacaagggcagagagtccgtctagatttcttgctgtcctgccagctctgcccatgcctgaggtggtcctacctctcacgggcaccctagctgctgacagccctttgtggccgccgtccccatcccctgccctcagcacacacatctgcacacacgcagctttgttctcacctctacctgtcattccagcatccctgcctcttgtcacaaactgccccagcaagaatttgaggttctgacaacagtacccatcccccacagtaccccttcagctcagtttctagaaagctcccttttctttgaaatctgcatgttgaattgaactttgtgattttattttttgtttcaaaaaagtttaagaaaatggaaatgggcaacagtgagtgaagacatattttagcactgaatagaatatttttaaaattaaactatttgaaatatgaaaaaaaaaaagataataaaaaaaaaatttaaaagtaaaaaaaaaaaaaaaaaaccttgagggggggcccgtgcccaaatttgccctatatgggagccgttttacattccattggccgtctttaaaaaacgtcgtgacctggaaaaaccctgggtttcccaaattaaagcgctttgaaaaaaattcccctttttccccagttgcgtaaataccaaaa

SEQ ID NO: 300500 - DNA, 2087 bp, Homo sapiens
gagatggcgcaggagtgcggttccacagggtcaggttcctaacacgctggccagagcagggagccgacctccaaactctcagggaagagaaccaggttgcccaccggcggcacctcgcacctcgccctgaccacaagcacgtgcgcccaacccgcctcgcaccccggcccgggtagggggctcaggggactcccggggcactcaggagggacgccccgggcggggcgcgcaggcgcgctgaggccgtgagccccaaggggcgggcgggtgcgcgcgctttctcgcgcacgcgcgcacggagggggcgacggccgctgtgacgctgcggcggcggcgggcgggcggcggcgcgtgaggcgcgcgatccccggtgtcttgggagcagtgccccggcccccgccgctcccgccgccgccatgtcgggccggtcggtccgggcggagacccgcagccgggccaaggacgacatcaagaaggtgatggcggccatcgagaaagtgcggaaatgggagaagaagtgggtgactgtgggtgacacgtccctgaggatatttaagtgggttcctgtgacagacagcaaggagacgaaaacagcaaccagagttccgtgtctgacgtctatcagcttaaggtggacagcagcaccaactcaagccccagcccccagcagagtgagtccctgagcccagcacacacctccgacttccgcacggatgactcccagcccccaacgctgggccaggagatcctggaggagccctccctgccctcctcggaagttgctgatgaacctcctaccctcaccaaggaagaaccagttccactagagacacaggtcgttgaggaagaggaagactcaggtgccccgcccctgaagcgcttctgtgtggaccaacccacagtgccgcagacggcgtcagaaagctagcaccatcccggccctccgcctcctggccctgcctctatttattgcattctggttctggccgcgccgcgttgctggggtaagggcaagcactggggtcaagagcctgcacacatgagccttccgggctggaaggctggcgtaggacttggggctgtagcatcatcttcctgaccctggcacctgtgtctacttgctcccgagaagaggagcgctcatgtcttttttgcaccccaagttggctggagcatcggccaccccaagattcatctgtgacctccaggcagcagtctctgctccagaatctctggacggagctgctggcagcttctgcgagaagagagagatgtggaaggcaccttctagaagagagcgtgcctcaggttacttgaacttgaacggagactgtagactcccggactttcccctaggactgggggccctgtaggctgctgttggaggactgggtagagacattggagggaagggaagggcttttctccacacaagggcagagagtccgtctagatttcttgctgtcctgccagctctgcccatgcctgaggtggtcctacctctcacgggcaccctagctgctgacagccctttgtggccgccgtccccatcccctgccctcagcacacacatctgcacacacgcagctttgttctcacctctacctgtcattccagcatccctgcctcttgtcacaaactgccccagcaagaatttgaggttctgacaacagtacccatcccccacagtaccccttcagctcagtttctagaaagctcccttttctttgaaatctgcatgttgaattgaactttgtgattttattttttgtttcaaaaaagtttaagaaaatggaaatgggcaacagtgagtgaagacatattttagcactgaatagaatatttttaaaattaaactatttgaaatatgaaaaaaaaaaagataataaaaaaaaaatttaaaagtaaaaaaaaaaaaaaaaaaccttgagggggggcccgtgcccaaatttgccctatatgggagccgttttacattccattggccgtctttaaaaaacgtcgtgacctggaaaaaccctgggtttcccaaattaaagcgctttgaaaaaaattcccctttttccccagttgcgtaaataccaaaa

SEQ ID NO: 300501 - DNA, 1780 bp, Homo sapiens
aggggattccggcttccggcccggactggagctgcctggcgtcggtgcccgcgcccggcccagcccggggcccgccctcccctcttcctgggcagtggccccgcctgcgtttccaggcttcctcttgataatagcgagtagccctggagtggtgtcagcccgccaggctgagcgctctgcgtattcaggcgttgaagttggggagaagaagtgggtgactgtgggtgacacgtccctgaggatatttaagtgggttcctgtgacagacagcaaggagacgaaaacagcaaccagagttccgtgtctgacgtctatcagcttaaggtggacagcagcaccaactcaagccccagcccccagcagagtgagtccctgagcccagcacacacctccgacttccgcacggatgactcccagcccccaacgctgggccaggagatcctggaggagccctccctgccctcctcggaagttgctgatgaacctcctaccctcaccaaggaagaaccagttccactagagacacaggtcgttgaggaagaggaagactcaggtgccccgcccctgaagcgcttctgtgtggaccaacccacagtgccgcagacggcgtcagaaagctagcaccatcccggccctccgcctcctggccctgcctctatttattgcattctggttctggccgcgccgcgttgctggggtaagggcaagcactggggtcaagagcctgcacacatgagccttccgggctggaaggctggcgtaggacttggggctgtagcatcatcttcctgaccctggcacctgtgtctacttgctcccgagaagaggagcgctcatgtcttttttgcaccccaagttggctggagcatcggccaccccaagattcatctgtgacctccaggcagcagtctctgctccagaatctctggacggagctgctggcagcttctgcgagaagagagagatgtggaaggcaccttctagaagagagcgtgcctcaggttacttgaacttgaacggagactgtagactcccggactttcccctaggactgggggccctgtaggctgctgttggaggactgggtagagacattggagggaagggaagggcttttctccacacaagggcagagagtccgtctagatttcttgctgtcctgccagctctgcccatgcctgaggtggtcctacctctcacgggcaccctagctgctgacagccctttgtggccgccgtccccatcccctgccctcagcacacacatctgcacacacgcagctttgttctcacctctacctgtcattccagcatccctgcctcttgtcacaaactgccccagcaagaatttgaggttctgacaacagtacccatcccccacagtaccccttcagctcagtttctagaaagctcccttttctttgaaatctgcatgttgaattgaactttgtgattttattttttgtttcaaaaaagtttaagaaaatggaaatgggcaacagtgagtgaagacatattttagcactgaatagaatatttttaaaattaaactatttgaaatatgaaaaaaaaaaagataataaaaaaaaaatttaaaagtaaaaaaaaaaaaaaaaaaccttgagggggggcccgtgcccaaatttgccctatatgggagccgttttacattccattggccgtctttaaaaaacgtcgtgacctggaaaaaccctgggtttcccaaattaaagcgctttgaaaaaaattcccctttttccccagttgcgtaaataccaaaa

SEQ ID NO: 300502 - DNA, 1963 bp, Homo sapiens
tgactttaagccttcaggcagaactcccaggtgctaatccgtcagtccggcagccgaagcctgagctcaccaccttcagacaccaccagcctccttcagatgcccaaggatgcctgacaaatgtcattttctacacatcttatgatgtgagaaggattgagaagtactgaccagagacacagctacatccctcccttccacaagctgcaatcagtggataataaagaagagtttaataagcatatcctgaccttcctaaagtgtaatgttgcataaacataaagattctggctgcctctggtgcttagaatctatgtcgtgtaggccgggcacaatgattattatactcagttgtatccttggctgcctaaagtgatgccaggcccttggctctgtccagagttcctcttgaggaaaatgaccacgctcagctgctgcctttgttctgtttggttttcagacgaaaacagcaaccagagttccgtgtctgacgtctatcagcttaaggtggacagcagcaccaactcaagccccagcccccagcagagtgagtccctgagcccagcacacacctccgacttccgcacggatgactcccagcccccaacgctgggccaggagatcctggaggagccctccctgccctcctcggaagttgctgatgaacctcctaccctcaccaaggaagaaccagttccactagagacacaggtcgttgaggaagaggaagactcaggtgccccgcccctgaagcgcttctgtgtggaccaacccacagtgccgcagacggcgtcagaaagctagcaccatcccggccctccgcctcctggccctgcctctatttattgcattctggttctggccgcgccgcgttgctggggtaagggcaagcactggggtcaagagcctgcacacatgagccttccgggctggaaggctggcgtaggacttggggctgtagcatcatcttcctgaccctggcacctgtgtctacttgctcccgagaagaggagcgctcatgtcttttttgcaccccaagttggctggagcatcggccaccccaagattcatctgtgacctccaggcagcagtctctgctccagaatctctggacggagctgctggcagcttctgcgagaagagagagatgtggaaggcaccttctagaagagagcgtgcctcaggttacttgaacttgaacggagactgtagactcccggactttcccctaggactgggggccctgtaggctgctgttggaggactgggtagagacattggagggaagggaagggcttttctccacacaagggcagagagtccgtctagatttcttgctgtcctgccagctctgcccatgcctgaggtggtcctacctctcacgggcaccctagctgctgacagccctttgtggccgccgtccccatcccctgccctcagcacacacatctgcacacacgcagctttgttctcacctctacctgtcattccagcatccctgcctcttgtcacaaactgccccagcaagaatttgaggttctgacaacagtacccatcccccacagtaccccttcagctcagtttctagaaagctcccttttctttgaaatctgcatgttgaattgaactttgtgattttattttttgtttcaaaaaagtttaagaaaatggaaatgggcaacagtgagtgaagacatattttagcactgaatagaatatttttaaaattaaactatttgaaatatgaaaaaaaaaaagataataaaaaaaaaatttaaaagtaaaaaaaaaaaaaaaaaaccttgagggggggcccgtgcccaaatttgccctatatgggagccgttttacattccattggccgtctttaaaaaacgtcgtgacctggaaaaaccctgggtttcccaaattaaagcgctttgaaaaaaattcccctttttccccagttgcgtaaataccaaaa

SEQ ID NO: 300503 - DNA, 2243 bp, Homo sapiens
gagatggcgcaggagtgcggttccacagggtcaggttcctaacacgctggccagagcagggagccgacctccaaactctcagggaagagaaccaggttgcccaccggcggcacctcgcacctcgccctgaccacaagcacgtgcgcccaacccgcctcgcaccccggcccgggtagggggctcaggggactcccggggcactcaggagggacgccccgggcggggcgcgcaggcgcgctgaggccgtgagccccaaggggcgggcgggtgcgcgcgctttctcgcgcacgcgcgcacggagggggcgacggccgctgtgacgctgcggcggcggcgggcgggcggcggcgcgtgaggcgcgcgatccccggtgtcttgggagcagtgccccggcccccgccgctcccgccgccgccatgtcgggccggtcggtccgggcggagacccgcagccgggccaaggacgacatcaagaaggtgatggcggccatcgagaaagtgcggaaatgacggaatctcgctctgtcacccaggctggagtgcattggcgcaatctcggctcactgcaacctctgcctctcaggttcaagcaattctcctgcctcagcctcctgagtagctgggactacagggagaagaagtgggtgactgtgggtgacacgtccctgaggatatttaagtgggttcctgtgacagacagcaaggagaaagaaaagtcaaaatcgaacagttcagcagcccgagaacctaatggctttccttctgatgcctcagccaattcctctctccttcttgaattccaggactcaagccccagcccccagcagagtgagtccctgagcccagcacacacctccgacttccgcacggatgactcccagcccccaacgctgggccaggagatcctggaggagccctccctgccctcctcggaagttgctgatgaacctcctaccctcaccaaggaagaaccagttccactagagacacaggtcgttgaggaagaggaagactcaggtgccccgcccctgaagcgcttctgtgtggaccaacccacagtgccgcagacggcgtcagaaagctagcaccatcccggccctccgcctcctggccctgcctctatttattgcattctggttctggccgcgccgcgttgctggggtaagggcaagcactggggtcaagagcctgcacacatgagccttccgggctggaaggctggcgtaggacttggggctgtagcatcatcttcctgaccctggcacctgtgtctacttgctcccgagaagaggagcgctcatgtcttttttgcaccccaagttggctggagcatcggccaccccaagattcatctgtgacctccaggcagcagtctctgctccagaatctctggacggagctgctggcagcttctgcgagaagagagagatgtggaaggcaccttctagaagagagcgtgcctcaggttacttgaacttgaacggagactgtagactcccggactttcccctaggactgggggccctgtaggctgctgttggaggactgggtagagacattggagggaagggaagggcttttctccacacaagggcagagagtccgtctagatttcttgctgtcctgccagctctgcccatgcctgaggtggtcctacctctcacgggcaccctagctgctgacagccctttgtggccgccgtccccatcccctgccctcagcacacacatctgcacacacgcagctttgttctcacctctacctgtcattccagcatccctgcctcttgtcacaaactgccccagcaagaatttgaggttctgacaacagtacccatcccccacagtaccccttcagctcagtttctagaaagctcccttttctttgaaatctgcatgttgaattgaactttgtgattttattttttgtttcaaaaaagtttaagaaaatggaaatgggcaacagtgagtgaagacatattttagcactgaatagaatatttttaaaattaaactatttgaaatatgaaaaaaaaaaagataataaaaaaaaaatttaaaagtaaaaaaaaaaaaaaaaaaccttgagggggggcccgtgcccaaatttgccctatatgggagccgttttacattccattggccgtctttaaaaaacgtcgtgacctggaaaaaccctgggtttcccaaattaaagcgctttgaaaaaaattcccctttttccccagttgcgtaaataccaaaa

SEQ ID NO: 300504 - DNA, 1877 bp, Homo sapiens
gagatggcgcaggagtgcggttccacagggtcaggttcctaacacgctggccagagcagggagccgacctccaaactctcagggaagagaaccaggttgcccaccggcggcacctcgcacctcgccctgaccacaagcacgtgcgcccaacccgcctcgcaccccggcccgggtagggggctcaggggactcccggggcactcaggagggacgccccgggcggggcgcgcaggcgcgctgaggccgtgagccccaaggggcgggcgggtgcgcgcgctttctcgcgcacgcgcgcacggagggggcgacggccgctgtgacgctgcggcggcggcgggcgggcggcggcgcgtgaggcgcgcgatccccggtgtcttgggagcagtgccccggcccccgccgctcccgccgccgccatgtcgggccggtcggtccgggcggagacccgcagccgggccaaggacgacatcaagaaggtgatggcggccatcgagaaagtgcggaaatgggagaagaagtgggtgactgtgggtgacacgtccctgaggatatttaagtgggttcctgtgacagacagcaaggagaaagaaaagtcaaaatcgaacagttcagcagcccgagaacctaatggctttccttctgatgcctcagccaattcctctctccttcttgaattccaggacgaaaacagcaaccagagttccgtgtctgacgtctatcagcttaaggtggacagcagcaccaactcaagccccagcccccagcagagtgagtccctgagcccagcacacacctccgacttccgcacggatgactcccagcccccaacgctgggccaggagatcctggaggagccctccctgccctcctcggaagttgctgatgaacctcctaccctcaccaaggaagaaccagttccactagagacacaggtcgttgaggaagaggaagactcaggtgccccgcccctgaagcgcttctgtgtggaccaacccacagtgccgcagacggcgtcagaaagctagcaccatcccggccctccgcctcctggccctgcctctatttattgcattctggttctggccgcgccgcgttgctggggtaagggcaagcactggggtcaagagcctgcacacatgagccttccgggctggaaggctggcgtaggacttggggctgtagcatcatcttcctgaccctggcacctgtgtctacttgctcccgagaagaggagcgctcatgtcttttttgcaccccaagttggctggagcatcggccaccccaagattcatctgtgacctccaggcagcagtctctgctccagaatctctggacggagctgctggcagcttctgcgagaagagagagatgtggaaggcaccttctagaagagagcgtgcctcaggttacttgaacttgaacggagactgtagactcccggactttcccctaggactgggggccctgtaggctgctgttggaggactgggtagagacattggagggaagggaagggcttttctccacacaagggcagagagtccgtctagatttcttgctgtcctgccagctctgcccatgcctgaggtggtcctacctctcacgggcaccctagctgctgacacatccctgcctcttgtcacaaactgccccagcaagaatttgaggttctgacaacagtacccatcccccacagtaccccttcagctcagtttctagaaagctcccttttctttgaaatctgcatgttgaattgaactttgtgattttattttttgtttcaaaaaagtttaagaaaatggaaatgggcaacagtgagtgaagacatattttagcactgaatagaatatttttaaaattaaactatttgaaatatg

SEQ ID NO: 300505 - DNA, 1704 bp, Homo sapiens
gagatggcgcaggagtgcggttccacagggtcaggttcctaacacgctggccagagcagggagccgacctccaaactctcagggaagagaaccaggttgcccaccggcggcacctcgcacctcgccctgaccacaagcacgtgcgcccaacccgcctcgcaccccggcccgggtagggggctcaggggactcccggggcactcaggagggacgccccgggcggggcgcgcaggcgcgctgaggccgtgagccccaaggggcgggcgggtgcgcgcgctttctcgcgcacgcgcgcacggagggggcgacggccgctgtgacgctgcggcggcggcgggcgggcggcggcgcgtgaggcgcgcgatccccggtgtcttgggagcagtgccccggcccccgccgctcccgccgccgccatgtcgggccggtcggtccgggcggagacccgcagccgggccaaggacgacatcaagaaggtgatggcggccatcgagaaagtgcggaaatgggagaagaagtgggtgactgtgggtgacacgtccctgaggatatttaagtgggttcctgtgacagacagcaaggagaaagaaaagtcaaaatcgaacagttcagcagcccgagaacctaatggctttccttctgatgcctcagccaattcctctctccttcttgaattccaggacgaaaacagcaaccagagttccgtgtctgacgtctatcagcttaaggtggacagcagcaccaactcaagccccagcccccagcagagtgagtccctgagcccagcacacacctccgacttccgcacggatgactcccagcccccaacgctgggccaggagatcctggaggagccctccctgccctcctcggaagttgctgatgaacctcctaccctcaccttctagaagagagcgtgcctcaggttacttgaacttgaacggagactgtagactcccggactttcccctaggactgggggccctgtaggctgctgttggaggactgggtagagacattggagggaagggaagggcttttctccacacaagggcagagagtccgtctagatttcttgctgtcctgccagctctgcccatgcctgaggtggtcctacctctcacgggcaccctagctgctgacagccctttgtggccgccgtccccatcccctgccctcagcacacacatctgcacacacgcagctttgttctcacctctacctgtcattccagcatccctgcctcttgtcacaaactgccccagcaagaatttgaggttctgacaacagtacccatcccccacagtaccccttcagctcagtttctagaaagctcccttttctttgaaatctgcatgttgaattgaactttgtgattttattttttgtttcaaaaaagtttaagaaaatggaaatgggcaacagtgagtgaagacatattttagcactgaatagaatatttttaaaattaaactatttgaaatatgaaaaaaaaaaagataataaaaaaaaaatttaaaagtaaaaaaaaaaaaaaaaaaccttgagggggggcccgtgcccaaatttgccctatatgggagccgttttacattccattggccgtctttaaaaaacgtcgtgacctggaaaaaccctgggtttcccaaattaaagcgctttgaaaaaaattcccctttttccccagttgcgtaaataccaaaa

SEQ ID NO: 300506 - DNA, 1487 bp, Homo sapiens
gagatggcgcaggagtgcggttccacagggtcaggttcctaacacgctggccagagcagggagccgacctccaaactctcagggaagagaaccaggttgcccaccggcggcacctcgcacctcgccctgaccacaagcacgtgcgcccaacccgcctcgcaccccggcccgggtagggggctcaggggactcccggggcactcaggagggacgccccgggcggggcgcgcaggcgcgctgaggccgtgagccccaaggggcgggcgggtgcgcgcgctttctcgcgcacgcgcgcacggagggggcgacggccgctgtgacgctgcggcggcggcgggcgggcggcggcgcgtgaggcgcgcgatccccggtgtcttgggagcagtgccccggcccccgccgctcccgccgccgccatgtcgggccggtcggtccgggcggagacccgcagccgggccaaggacgacatcaagaaggtgatggcggccatcgagaaagtgcggaaatgggagaagaagtgggtgactgtgggtgacacgtccctgaggatatttaagtgggttcctgtgacagacagcaaggagaaagaaaagtcaaaatcgaacagttcagcagcccgagaacctaatggctttccttctgatgcctcagccaattcctctctccttcttgaattccaggacgaaaacagcaaccagagttccgtgtctgacgtctatcagcttaaggtggacagcagcaccaactcaagccccagcccccagcagagtgagtccctgagcccagcacacacctccgacttccgcacggatgactcccagcccccaacgctgggccaggagatcctggaggagccctccctgccctcctcggaagttgctgatgaacctcctaccctcaccttctagaagagagcgtgcctcaggttacttgaacttgaacggagactgtagactcccggactttcccctaggactgggggccctgtaggctgctgttggaggactgggtagagacattggagggaagggaagggcttttctccacacaagggcagagagtccgtctagatttcttgctgtcctgccagctctgcccatgcctgaggtggtcctacctctcacgggcaccctagctgctgacagccctttgtggccgccgtccccatcccctgccctcagcacacacatctgcacacacgcagctttgttctcacctctacctgtcattccagcatccctgcctcttgtcacaaactgccccagcaagaatttgaggttctgacaacagtacccatcccccacagtaccccttcagctcagtttctagaaagctcccttttctttgaaatctgcatgttgaattgaactttgtgattttattttttgtttcaaaaaagtttaagaaaatggaaatgggcaacagtgagtgaagacatattttagcactgaatagaatatttttaaaattaaactatttgaaatatg

SEQ ID NO: 300507 - DNA, 1010 bp, Homo sapiens
gagatggcgcaggagtgcggttccacagggtcaggttcctaacacgctggccagagcagggagccgacctccaaactctcagggaagagaaccaggttgcccaccggcggcacctcgcacctcgccctgaccacaagcacgtgcgcccaacccgcctcgcaccccggcccgggtagggggctcaggggactcccggggcactcaggagggacgccccgggcggggcgcgcaggcgcgctgaggccgtgagccccaaggggcgggcgggtgcgcgcgctttctcgcgcacgcgcgcacggagggggcgacggccgctgtgacgctgcggcggcggcgggcgggcggcggcgcgtgaggcgcgcgatccccggtgtcttgggagcagtgccccggcccccgccgctcccgccgccgccatgtcgggccggtcggtccgggcggagacccgcagccgggccaaggacgacatcaagaaggtgatggcggccatcgagaaagtgcggaaatgggagaagaagtgggtgactgtgggtgacacgtccctgaggatatttaagtgggttcctgtgacagacagcaaggagaaagaaaagtcaaaatcgaacagttcagcagcccgagaacctaatggctttccttctgatgcctcagccaattcctctctccttcttgaattccaggacgaaaacagcaaccagagttccgtgtctgacgtctatcagcttaaggtggacagcagcaccaactcaagccccagcccccagcagagtgagtccctgagcccagcacacacctccgacttccgcacggatgactcccagcccccaacgctgggccaggagatcctggaggagccctccctgccctcctcggaagttgctgatgaacctcctaccctctgcaaggaacccactcaggctcatgctggaagacagcccctggatgcgcatgaccttgctttcgttcatgccgccggccaccagctcctggcgcgagggggtaccgagctc

SEQ ID NO: 300508 - DNA, 7968 bp, Homo sapiens
  misc_feature (6244)..(6244): n is a, c, g, or t
tgttgagcatgaaatctctgctcccttaaaaaattattctcggaaaaagatatcccccccgttttccaggttttgagccgcctctccttagggcctggtcgggggaggaaaagttgtaaacaaattgccaccttaaattcgcggtgcgagtctgcggagctgccgggttcattgtgtttacgaggctcgctgaaatgtgtggaatccagggaaggcgagcacccagacgggggcccgccggggccgcggccagcgccggggaaatgccgcgccggggagcagcctgcgccggcctgagcccttccctttgcactcggctgttttttacgtttaaccagaaaggaagggagaggagggaaagatccatgtggctgccctcttccgatcacaaatattgtcgggaaggctactggccggaaagcgccgctgtggctgagagcgaagtttcagagactcttatttaaactgggttgttacattcaaaaaaactgcggcaagttcttggttgtgggcctcctcatatttggggccttcgcggtgggattaaaagcagcgaacctcgagaccaacgtggaggagctgtgggtggaagttggaggacgagtaagtcgtgaattaaattatactcgccagaagattggagaagaggctatgtttaatcctcaactcatgatacagacccctaaagaagaaggtgctaatgtcctgaccacagaagcgctcctacaacacctggactcggcactccaggccagccgtgtccatgtatacatgtacaacaggcagtggaaattggaacatttgtgttacaaatcaggagagcttatcacagaaacaggttacatggatcagataatagaatatctttacccttgtttgattattacacctttggactgcttctgggaaggggcgaaattacagtctgggacagcatacctcctaggtaaacctcctttgcggtggacaaacttcgaccctttggaattcctggaagagttaaagaaaataaactatcaagtggacagctgggaggaaatgctgaataaggctgaggttggtcatggttacatggaccgcccctgcctcaatccggccgatccagactgccccgccacagcccccaacaaaaattcaaccaaacctcttgatatggcccttgttttgaatggtggatgtcatggcttatccagaaagtatatgcactggcaggaggagttgattgtgggtggcacagtcaagaacagcactggaaaactcgtcagcgcccatgccctgcagaccatgttccagttaatgactcccaagcaaatgtacgagcacttcaaggggtacgagtatgtctcacacatcaactggaacgaggacaaagcggcagccatcctggaggcctggcagaggacatatgtggaggtggttcatcagagtgtcgcacagaactccactcaaaaggtgctttccttcaccaccacgaccctggacgacatcctgaaatccttctctgacgtcagtgtcatccgcgtggccagcggctacttactcatgctcgcctatgcctgtctaaccatgctgcgctgggactgctccaagtcccagggtgccgtggggctggctggcgtcctgctggttgcactgtcagtggctgcaggactgggcctgtgctcattgatcggaatttcctttaacgctgcaacaactcaggttttgccatttctcgctcttggtgttggtgtggatgatgtttttcttctggcccacgccttcagtgaaacaggacagaataaaagaatcccttttgaggacaggaccggggagtgcctgaagcgcacaggagccagcgtggccctcacgtccatcagcaatgtcacagccttcttcatggccgcgttaatcccaattcccgctctgcgggcgttctccctccaggcagcggtagtagtggtgttcaattttgccatggttctgctcatttttcctgcaattctcagcatggatttatatcgacgcgaggacaggagactggatattttctgctgttttacaagcccctgcgtcagcagagtgattcaggttgaacctcaggcctacaccgacacacacgacaatacccgctacagccccccacctccctacagcagccacagctttgcccatgaaacgcagattaccatgcagtccactgtccagctccgcacggagtacgacccccacacgcacgtgtactacaccaccgctgagccgcgctccgagatctctgtgcagcccgtcaccgtgacacaggacaccctcagctgccagagcccagagagcaccagctccacaagggacctgctctcccagttctccgactccagcctccactgcctcgagcccccctgtacgaagtggacactctcatcttttgctgagaagcactatgctcctttcctcttgaaaccaaaagccaaggtagtggtgatcttcctttttctgggcttgctgggggtcagcctttatggcaccacccgagtgagagacgggctggaccttacggacattgtacctcgggaaaccagagaatatgactttattgctgcacaattcaaatacttttctttctacaacatgtatatagtcacccagaaagcagactacccgaatatccagcacttactttacgacctacacaggagtttcagtaacgtgaagtatgtcatgttggaagaaaacaaacagcttcccaaaatgtggctgcactacttcagagactggcttcagggacttcaggatgcatttgacagtgactgggaaaccgggaaaatcatgccaaacaattacaagaatggatcagacgatggagtccttgcctacaaactcctggtgcaaaccggcagccgcgataagcccatcgacatcagccagttgactaaacagcgtctggtggatgcagatggcatcattaatcccagcgctttctacatctacctgacggcttgggtcagcaacgaccccgtcgcgtatgctgcctcccaggccaacatccggccacaccgaccagaatgggtccacgacaaagccgactacatgcctgaaacaaggctgagaatcccggcagcagagcccatcgagtatgcccagttccctttctacctcaacggcttgcgggacacctcagactttgtggaggcaattgaaaaagtaaggaccatctgcagcaactatacgagcctggggctgtccagttaccccaacggctaccccttcctcttctgggagcagtacatcggcctccgccactggctgctgctgttcatcagcgtggtgttggcctgcacattcctcgtgtgcgctgtcttccttctgaacccctggacggccgggatcattgtgatggtcctggcgctgatgacggtcgagctgttcggcatgatgggcctcatcggaatcaagctcagtgccgtgcccgtggtcatcctgatcgcttctgttggcataggagtggagttcaccgttcacgttgctttggcctttctgacggccatcggcgacaagaaccgcagggctgtgcttgccctggagcacatgtttgcacccgtcctggatggcgccgtgtccactctgctgggagtgctgatgctggcgggatctgagttcgacttcattgtcaggtatttctttgctgtgctggcgatcctcaccatcctcggcgttctcaatgggctggttttgcttcccgtgcttttgtctttctttggaccatatcctgaggtgtctccagccaacggcttgaaccgcctgcccacaccctcccctgagccaccccccagcgtggtccgcttcgccatgccgcccggccacacgcacagcgggtctgattcctccgactcggagtatagttcccagacgacagtgtcaggcctcagcgaggagcttcggcactacgaggcccagcagggcgcgggaggccctgcccaccaagtgatcgtggaagccacagaaaaccccgtcttcgcccactccactgtggtccatcccgaatccaggcatcacccaccctcgaacccgagacagcagccccacctggactcagggtccctgcctcccggacggcaaggccagcagccccgcagggacccccccagagaaggcttgtggccacccctctacagaccgcgcagagacgcttttgaaatttctactgaagggcattctggccctagcaatagggcccgctggggccctcgcggggcccgttctcacaaccctcggaacccagcgtccactgccatgggcagctccgtgcccggctactgccagcccatcaccactgtgacggcttctgcctccgtgactgtcgccgtgcacccgccgcctgtccctgggcctgggcggaacccccgagggggactctgcccaggctaccctgagactgaccacggcctgtttgaggacccccacgtgcctttccacgtccggtgtgagaggagggattcgaaggtggaagtcattgagctgcaggacgtggaatgcgaggagaggccccggggaagcagctccaactgagggtgattaaaatctgaagcaaagaggccaaagattggaaaccccccacccccacctctttccagaactgcttgaagagaactggttggagttatggaaaagatgccctgtgccaggacagcagttcattgttactgtaaccgattgtattattttgttaaatatttctataaatatttaagagatgtacacatgtgtaatataggaaggaaggatgtaaagtggtatgatctggggcttctccactcctgccccagagtgtggaggccacagtggggcctctccgtatttgtgcattgggctccgtgccacaaccaagcttcattagtcttaaatttcagcatatgttgctgctgcttaaatattgtataatttacttgtataattctatgcaaatattgcttatgtaataggattattttgtaaaggtttctgtttaaaatattttaaatttgcatatcacaaccctgtggtagtatgaaatgttactgttaactttcaaacacgctatgcgtgataatttttttgtttaatgagcagatatgaagaaagcacgttaatcctggtggcttctctaggtgtcgttgtgtgcggtcctcttgtttggctgtgcgtgtgaacacgtgtgtgagttcaccatgtactgtactgtgattttttttttgtcttgttttgtttctctacactgtctgtaacctgtagtaggctctgacctagtcaggctggaagcgtcaggatatcttttcttcgtgctggtgagggctggccctaaacatccacctaatcctttcaaatcagcccggcaaaagctagactctcctcgtgtctacggcatctcttatgatcattggctgccatccaggaccccaatttgtgcttcagggggataatctccttctctcggatcattgtgatggatgctggaacctcagggtatggagctcacatcagttcatcatggtgggtgttagagaattcggtgacatgcctagtgctgagccttggctgggccatgagagtctgtatactctaaaaagcatgcagcatggtgcccctcttctgaccaacacacacacgacccctcccccaacacccccaaattcaagagtggatgtggccctgtcacaggtagaaaaacctatttagttaattctttcttggcccacagtctcccagaaatgatgttttgagtccctatagtttaaactccctctcttaaatggagcagctggttgaggctttctagatctgtttgcatcttctttaaaactaagtggtgagcatgcattgtggtgtagaggcaggcattatgtaggataagagctccggggggattcttcatgcaccagtgtttagggtacgtgcttcctaagtaaatccaaacattgtctccatcctccccgtcattagtgctctttcaatgtgatgtgggaaagcaggaggatggacacaccccactgaaagatgtaggcaggggcaggtctctcaaccaggcatatttttaaaagttgcttctgtactggttctcttcttttgctctgaggtgtgggctccctcatctcgtaaccagagaccagcacatgtcagggaagcacccagtgtcggctccccatccaaatccacaccagcaccttgttacagacaagaagtcagaggaaagggcggggtccctgcagggctgaagcctaagctactgtgaggngctcacgagtggcagctcctgttactcccttttaaattacctgggaaatcttaacagaaaggtaatgggcccccagaaatacccacagcatagtgacctcagaccctgatactcaccacaaaacttttaagatgctgattgggagccgcttgtggctgctggtgtgtgtgtgtgtgtgtgtgtgtcgtgcgtgcgtgtgtgtgtgtctctgctggggaccctggccacccccctgctgctgtcttggtgcctgtcacccacatggtctgccatcctaacacccagctctgctcagaaaacgtcctgcgtggaggagggatgatgcagaattctgaagtcgacttccctctggctcctggcgtgccctcgctcccttcctgagcccagctcgtgttgcgccggaggctgcgcggcccctgatttctgcatggtgtagaactttctccaatagtcacattggcaaagggagaactggggtgggcggggggtggggctggcagggaattagaatttctctctctcttttaatagttttattttgtctgtcctgtttgttcatttggatgttttaatttttaaaaaaaaaaaaactttgctgatatttataattttgtatcataagaatgttttcctctacagtatttgtcatgccagtttataacaaaaaaaaatgcagggattttatttctattggaaacattacagctatgttttacttttggacagaatttttatttgtatagagtgcttactaatgttaaatagttcagagtatataacatttacattaaggactcatggtaggttttagggtaaggagtttaaaggaaataaatattcaaactgggtctcattgccaattttggtggaaatgagtttgtgtcatttcaattacaaagataaaagtatgccatataatttatttatatgaagatttatttttgtagtgtacatagtagtcatcaagtcttttgacagaagtatatttttaaagaatttatatgtgatgaatccataatgtctggaactttgctgagacatgagtgggcacagttttcattgtaaattacagcaaggaaagaaaatgtttaacagtgttaagagagtcagagcagagtggatattcatgcgattatgaagtgtttattagttaccattggcgacctagcatgcttctcatttcaaaccttggaaggtgaaaatgtacaaactctctaaataattaatgttcaaacactgatagaaattctaacatgaataaaaaataatataacttgttggttatatctttgtttgtagaatgctttttttctttaaaatacttgggagagacagttagtgttggagccatcagaaactgttgtttcatcttgctgaccttgtgacactcttcttttttgctctatctgatggagagagttttaggttttcctcctttttgttttgtataaatagtgggtataagcatagctctgttacatggatgtattacaaagtgggggctgagcttttagtgtgatcatcacccaaatagtgtacattgtacccattaattaatttcttatcacctgaccctatttttgttttctcataccaagaaacttcctaagttaaccatcaaaattagtccttctgtcatctctcttagcatacttatttcccttatgtgatgcctaataatgagggaacataaataaagccaaattcaagatgattatcatcag

SEQ ID NO: 300509 - DNA, 1009 bp, Homo sapiens
tgttgagcatgaaatctctgctcccttaaaaaattattctcggaaaaagatatcccccccgttttccaggttttgagccgcctctccttagggcctggtcgggggaggaaaagttgtaaacaaattgccaccttaaattcgcggtgcgagtctgcggagctgccgggttcattgtgtttacgaggctcgctgaaatgtgtggaatccagggaaggcgagcacccagacgggggcccgccggggccgcggccagcgccggggaaatgccgcgccggggagcagcctgcgccggcctgagcccttccctttgcactcggctgttttttacgtttaaccagaaaggaagggagaggagggaaagatccatgtggctgccctcttccgatcacaaatattgtcgtaagttgcagctggctgccccacttcctaattcagctcacacagcctctccccacgctatggaaatgcgtcgggagtgaactccggcggccgcgctcaccacgtggatccccacttactaccattctcggcgggggtccagttgggggaacccgcaatatgttgttccaaagagcgctcgcccctagcgcccgtccccgagggtgatggacagagcaggactggtttgctggctcctgaaccttgggctccatcgctgggattacgcagcccctcccttctcagctctggggtgaatattgtctgtgtcgagtggtttctctcctctctacctcggcttcctcttctgtattgcagccccagtgccccaagtcgctcagggatcccgcgggtgggggcgccctgatgtccccgaggtgcagctcccacgctgcggcccggctttatgaccgagccccccatgacgctcagatccgccggggctgcagtctcgagggcgagtccgtgtgccgcggccacccgcgcccccacggctgttgggggctcaccgggcgggtgcgcgcaagcgggcgtgggcgcgcgggccgcgactccccggcgctcactcctc

SEQ ID NO: 300510 - DNA, 7976 bp, Homo sapiens
  misc_feature (6252)..(6252): n is a, c, g, or t
gcggccgcagcggcagcagcgcccgccgtgtgagcagcagcagcggctggtctgtcaaccggagcccgagcccgagcagcctgcggccagcagcgtcctcgcaagccgagcgcccaggcgcgccaggagcccgcagcagcggcagcagcgcgccgggccgcccgggaagcctccgtccccgcggcggcggcggcggcggcggcaacatggcctcggctggtaacgccgccgagccccaggaccgcggcggcggcggcagcggctgtatcggtgccccgggacggccggctggaggcgggaggcgcagacggacgggggggctgcgccgtgctgccgcgccggaccgggactatctgcaccggcccagctactgcgacgccgccttcgctctggagcagatttccaaggggaaggctactggccggaaagcgccgctgtggctgagagcgaagtttcagagactcttatttaaactgggttgttacattcaaaaaaactgcggcaagttcttggttgtgggcctcctcatatttggggccttcgcggtgggattaaaagcagcgaacctcgagaccaacgtggaggagctgtgggtggaagttggaggacgagtaagtcgtgaattaaattatactcgccagaagattggagaagaggctatgtttaatcctcaactcatgatacagacccctaaagaagaaggtgctaatgtcctgaccacagaagcgctcctacaacacctggactcggcactccaggccagccgtgtccatgtatacatgtacaacaggcagtggaaattggaacatttgtgttacaaatcaggagagcttatcacagaaacaggttacatggatcagataatagaatatctttacccttgtttgattattacacctttggactgcttctgggaaggggcgaaattacagtctgggacagcatacctcctaggtaaacctcctttgcggtggacaaacttcgaccctttggaattcctggaagagttaaagaaaataaactatcaagtggacagctgggaggaaatgctgaataaggctgaggttggtcatggttacatggaccgcccctgcctcaatccggccgatccagactgccccgccacagcccccaacaaaaattcaaccaaacctcttgatatggcccttgttttgaatggtggatgtcatggcttatccagaaagtatatgcactggcaggaggagttgattgtgggtggcacagtcaagaacagcactggaaaactcgtcagcgcccatgccctgcagaccatgttccagttaatgactcccaagcaaatgtacgagcacttcaaggggtacgagtatgtctcacacatcaactggaacgaggacaaagcggcagccatcctggaggcctggcagaggacatatgtggaggtggttcatcagagtgtcgcacagaactccactcaaaaggtgctttccttcaccaccacgaccctggacgacatcctgaaatccttctctgacgtcagtgtcatccgcgtggccagcggctacttactcatgctcgcctatgcctgtctaaccatgctgcgctgggactgctccaagtcccagggtgccgtggggctggctggcgtcctgctggttgcactgtcagtggctgcaggactgggcctgtgctcattgatcggaatttcctttaacgctgcaacaactcaggttttgccatttctcgctcttggtgttggtgtggatgatgtttttcttctggcccacgccttcagtgaaacaggacagaataaaagaatcccttttgaggacaggaccggggagtgcctgaagcgcacaggagccagcgtggccctcacgtccatcagcaatgtcacagccttcttcatggccgcgttaatcccaattcccgctctgcgggcgttctccctccaggcagcggtagtagtggtgttcaattttgccatggttctgctcatttttcctgcaattctcagcatggatttatatcgacgcgaggacaggagactggatattttctgctgttttacaagcccctgcgtcagcagagtgattcaggttgaacctcaggcctacaccgacacacacgacaatacccgctacagccccccacctccctacagcagccacagctttgcccatgaaacgcagattaccatgcagtccactgtccagctccgcacggagtacgacccccacacgcacgtgtactacaccaccgctgagccgcgctccgagatctctgtgcagcccgtcaccgtgacacaggacaccctcagctgccagagcccagagagcaccagctccacaagggacctgctctcccagttctccgactccagcctccactgcctcgagcccccctgtacgaagtggacactctcatcttttgctgagaagcactatgctcctttcctcttgaaaccaaaagccaaggtagtggtgatcttcctttttctgggcttgctgggggtcagcctttatggcaccacccgagtgagagacgggctggaccttacggacattgtacctcgggaaaccagagaatatgactttattgctgcacaattcaaatacttttctttctacaacatgtatatagtcacccagaaagcagactacccgaatatccagcacttactttacgacctacacaggagtttcagtaacgtgaagtatgtcatgttggaagaaaacaaacagcttcccaaaatgtggctgcactacttcagagactggcttcagggacttcaggatgcatttgacagtgactgggaaaccgggaaaatcatgccaaacaattacaagaatggatcagacgatggagtccttgcctacaaactcctggtgcaaaccggcagccgcgataagcccatcgacatcagccagttgactaaacagcgtctggtggatgcagatggcatcattaatcccagcgctttctacatctacctgacggcttgggtcagcaacgaccccgtcgcgtatgctgcctcccaggccaacatccggccacaccgaccagaatgggtccacgacaaagccgactacatgcctgaaacaaggctgagaatcccggcagcagagcccatcgagtatgcccagttccctttctacctcaacggcttgcgggacacctcagactttgtggaggcaattgaaaaagtaaggaccatctgcagcaactatacgagcctggggctgtccagttaccccaacggctaccccttcctcttctgggagcagtacatcggcctccgccactggctgctgctgttcatcagcgtggtgttggcctgcacattcctcgtgtgcgctgtcttccttctgaacccctggacggccgggatcattgtgatggtcctggcgctgatgacggtcgagctgttcggcatgatgggcctcatcggaatcaagctcagtgccgtgcccgtggtcatcctgatcgcttctgttggcataggagtggagttcaccgttcacgttgctttggcctttctgacggccatcggcgacaagaaccgcagggctgtgcttgccctggagcacatgtttgcacccgtcctggatggcgccgtgtccactctgctgggagtgctgatgctggcgggatctgagttcgacttcattgtcaggtatttctttgctgtgctggcgatcctcaccatcctcggcgttctcaatgggctggttttgcttcccgtgcttttgtctttctttggaccatatcctgaggtgtctccagccaacggcttgaaccgcctgcccacaccctcccctgagccaccccccagcgtggtccgcttcgccatgccgcccggccacacgcacagcgggtctgattcctccgactcggagtatagttcccagacgacagtgtcaggcctcagcgaggagcttcggcactacgaggcccagcagggcgcgggaggccctgcccaccaagtgatcgtggaagccacagaaaaccccgtcttcgcccactccactgtggtccatcccgaatccaggcatcacccaccctcgaacccgagacagcagccccacctggactcagggtccctgcctcccggacggcaaggccagcagccccgcagggacccccccagagaaggcttgtggccacccctctacagaccgcgcagagacgcttttgaaatttctactgaagggcattctggccctagcaatagggcccgctggggccctcgcggggcccgttctcacaaccctcggaacccagcgtccactgccatgggcagctccgtgcccggctactgccagcccatcaccactgtgacggcttctgcctccgtgactgtcgccgtgcacccgccgcctgtccctgggcctgggcggaacccccgagggggactctgcccaggctaccctgagactgaccacggcctgtttgaggacccccacgtgcctttccacgtccggtgtgagaggagggattcgaaggtggaagtcattgagctgcaggacgtggaatgcgaggagaggccccggggaagcagctccaactgagggtgattaaaatctgaagcaaagaggccaaagattggaaaccccccacccccacctctttccagaactgcttgaagagaactggttggagttatggaaaagatgccctgtgccaggacagcagttcattgttactgtaaccgattgtattattttgttaaatatttctataaatatttaagagatgtacacatgtgtaatataggaaggaaggatgtaaagtggtatgatctggggcttctccactcctgccccagagtgtggaggccacagtggggcctctccgtatttgtgcattgggctccgtgccacaaccaagcttcattagtcttaaatttcagcatatgttgctgctgcttaaatattgtataatttacttgtataattctatgcaaatattgcttatgtaataggattattttgtaaaggtttctgtttaaaatattttaaatttgcatatcacaaccctgtggtagtatgaaatgttactgttaactttcaaacacgctatgcgtgataatttttttgtttaatgagcagatatgaagaaagcacgttaatcctggtggcttctctaggtgtcgttgtgtgcggtcctcttgtttggctgtgcgtgtgaacacgtgtgtgagttcaccatgtactgtactgtgattttttttttgtcttgttttgtttctctacactgtctgtaacctgtagtaggctctgacctagtcaggctggaagcgtcaggatatcttttcttcgtgctggtgagggctggccctaaacatccacctaatcctttcaaatcagcccggcaaaagctagactctcctcgtgtctacggcatctcttatgatcattggctgccatccaggaccccaatttgtgcttcagggggataatctccttctctcggatcattgtgatggatgctggaacctcagggtatggagctcacatcagttcatcatggtgggtgttagagaattcggtgacatgcctagtgctgagccttggctgggccatgagagtctgtatactctaaaaagcatgcagcatggtgcccctcttctgaccaacacacacacgacccctcccccaacacccccaaattcaagagtggatgtggccctgtcacaggtagaaaaacctatttagttaattctttcttggcccacagtctcccagaaatgatgttttgagtccctatagtttaaactccctctcttaaatggagcagctggttgaggctttctagatctgtttgcatcttctttaaaactaagtggtgagcatgcattgtggtgtagaggcaggcattatgtaggataagagctccggggggattcttcatgcaccagtgtttagggtacgtgcttcctaagtaaatccaaacattgtctccatcctccccgtcattagtgctctttcaatgtgatgtgggaaagcaggaggatggacacaccccactgaaagatgtaggcaggggcaggtctctcaaccaggcatatttttaaaagttgcttctgtactggttctcttcttttgctctgaggtgtgggctccctcatctcgtaaccagagaccagcacatgtcagggaagcacccagtgtcggctccccatccaaatccacaccagcaccttgttacagacaagaagtcagaggaaagggcggggtccctgcagggctgaagcctaagctactgtgaggngctcacgagtggcagctcctgttactcccttttaaattacctgggaaatcttaacagaaaggtaatgggcccccagaaatacccacagcatagtgacctcagaccctgatactcaccacaaaacttttaagatgctgattgggagccgcttgtggctgctggtgtgtgtgtgtgtgtgtgtgtgtcgtgcgtgcgtgtgtgtgtgtctctgctggggaccctggccacccccctgctgctgtcttggtgcctgtcacccacatggtctgccatcctaacacccagctctgctcagaaaacgtcctgcgtggaggagggatgatgcagaattctgaagtcgacttccctctggctcctggcgtgccctcgctcccttcctgagcccagctcgtgttgcgccggaggctgcgcggcccctgatttctgcatggtgtagaactttctccaatagtcacattggcaaagggagaactggggtgggcggggggtggggctggcagggaattagaatttctctctctcttttaatagttttattttgtctgtcctgtttgttcatttggatgttttaatttttaaaaaaaaaaaaactttgctgatatttataattttgtatcataagaatgttttcctctacagtatttgtcatgccagtttataacaaaaaaaaatgcagggattttatttctattggaaacattacagctatgttttacttttggacagaatttttatttgtatagagtgcttactaatgttaaatagttcagagtatataacatttacattaaggactcatggtaggttttagggtaaggagtttaaaggaaataaatattcaaactgggtctcattgccaattttggtggaaatgagtttgtgtcatttcaattacaaagataaaagtatgccatataatttatttatatgaagatttatttttgtagtgtacatagtagtcatcaagtcttttgacagaagtatatttttaaagaatttatatgtgatgaatccataatgtctggaactttgctgagacatgagtgggcacagttttcattgtaaattacagcaaggaaagaaaatgtttaacagtgttaagagagtcagagcagagtggatattcatgcgattatgaagtgtttattagttaccattggcgacctagcatgcttctcatttcaaaccttggaaggtgaaaatgtacaaactctctaaataattaatgttcaaacactgatagaaattctaacatgaataaaaaataatataacttgttggttatatctttgtttgtagaatgctttttttctttaaaatacttgggagagacagttagtgttggagccatcagaaactgttgtttcatcttgctgaccttgtgacactcttcttttttgctctatctgatggagagagttttaggttttcctcctttttgttttgtataaatagtgggtataagcatagctctgttacatggatgtattacaaagtgggggctgagcttttagtgtgatcatcacccaaatagtgtacattgtacccattaattaatttcttatcacctgaccctatttttgttttctcataccaagaaacttcctaagttaaccatcaaaattagtccttctgtcatctctcttagcatacttatttcccttatgtgatgcctaataatgagggaacataaataaagccaaattcaagatgattatcatcag

SEQ ID NO: 300511 - DNA, 7820 bp, Homo sapiens
  misc_feature (6096)..(6096): n is a, c, g, or t
gcggccgcagcggcagcagcgcccgccgtgtgagcagcagcagcggctggtctgtcaaccggagcccgagcccgagcagcctgcggccagcagcgtcctcgcaagccgagcgcccaggcgcgccaggagcccgcagcagcggcagcagcgcgccgggccgcccgggaagcctccgtccccgcggcggcggcggcggcggcggcaacatggcctcggctggtaacgccgccgagccccaggaccgcggcggcggcggcagcggctgtatcggtgccccgggacggccggctggaggcgggaggcgcagacggacgggggggctgcgccgtgctgccgcgccggaccgggactatctgcaccggcccagctactgcgacgccgccttcgctctggagcagatttccaaggggaaggctactggccggaaagcgccgctgtggctgagagcgaagtttcagagactcttatttaaactgggttgttacattcaaaaaaactgcggcaagttcttggttgtgggcctcctcatatttggggccttcgcggtgggattaaaagcagcgaacctcgagaccaacgtggaggagctgtgggtggaagttggaggacgagtaagtcgtgaattaaattatactcgccagaagattggagaagaggctatgtttaatcctcaactcatgatacagacccctaaagaagaaggtgctaatgtcctgaccacagaagcgctcctacaacacctggactcggcactccaggccagccgtgtccatgtatacatgtacaacaggcagtggaaattggaacatttgtgttacaaatcaggagagcttatcacagaaacaggttacatggatcagataatagaatatctttacccttgtttgattattacacctttggactgcttctgggaaggggcgaaattacagtctgggacagcatacctcctaggtaaacctcctttgcggtggacaaacttcgaccctttggaattcctggaagagttaaagaaaataaactatcaagtggacagctgggaggaaatgctgaataaggctgaggttggtcatggttacatggaccgcccctgcctcaatccggccgatccagactgccccgccacagcccccaacaaaaattcaaccaaacctcttgatatggcccttgttttgaatggtggatgtcatggcttatccagaaagtatatgcactggcaggaggagttgattgtgggtggcacagtcaagaacagcactggaaaactcgtcagcgcccatgccctgcagaccatgttccagttaatgactcccaagcaaatgtacgagcacttcaaggggtacgagtatgtctcacacatcaactggaacgaggacaaagcggcagccatcctggaggcctggcagaggacatatgtggaggtggttcatcagagtgtcgcacagaactccactcaaaaggtgctttccttcaccaccacgaccctggacgacatcctgaaatccttctctgacgtcagtgtcatccgcgtggccagcggctacttactcatggttttgccatttctcgctcttggtgttggtgtggatgatgtttttcttctggcccacgccttcagtgaaacaggacagaataaaagaatcccttttgaggacaggaccggggagtgcctgaagcgcacaggagccagcgtggccctcacgtccatcagcaatgtcacagccttcttcatggccgcgttaatcccaattcccgctctgcgggcgttctccctccaggcagcggtagtagtggtgttcaattttgccatggttctgctcatttttcctgcaattctcagcatggatttatatcgacgcgaggacaggagactggatattttctgctgttttacaagcccctgcgtcagcagagtgattcaggttgaacctcaggcctacaccgacacacacgacaatacccgctacagccccccacctccctacagcagccacagctttgcccatgaaacgcagattaccatgcagtccactgtccagctccgcacggagtacgacccccacacgcacgtgtactacaccaccgctgagccgcgctccgagatctctgtgcagcccgtcaccgtgacacaggacaccctcagctgccagagcccagagagcaccagctccacaagggacctgctctcccagttctccgactccagcctccactgcctcgagcccccctgtacgaagtggacactctcatcttttgctgagaagcactatgctcctttcctcttgaaaccaaaagccaaggtagtggtgatcttcctttttctgggcttgctgggggtcagcctttatggcaccacccgagtgagagacgggctggaccttacggacattgtacctcgggaaaccagagaatatgactttattgctgcacaattcaaatacttttctttctacaacatgtatatagtcacccagaaagcagactacccgaatatccagcacttactttacgacctacacaggagtttcagtaacgtgaagtatgtcatgttggaagaaaacaaacagcttcccaaaatgtggctgcactacttcagagactggcttcagggacttcaggatgcatttgacagtgactgggaaaccgggaaaatcatgccaaacaattacaagaatggatcagacgatggagtccttgcctacaaactcctggtgcaaaccggcagccgcgataagcccatcgacatcagccagttgactaaacagcgtctggtggatgcagatggcatcattaatcccagcgctttctacatctacctgacggcttgggtcagcaacgaccccgtcgcgtatgctgcctcccaggccaacatccggccacaccgaccagaatgggtccacgacaaagccgactacatgcctgaaacaaggctgagaatcccggcagcagagcccatcgagtatgcccagttccctttctacctcaacggcttgcgggacacctcagactttgtggaggcaattgaaaaagtaaggaccatctgcagcaactatacgagcctggggctgtccagttaccccaacggctaccccttcctcttctgggagcagtacatcggcctccgccactggctgctgctgttcatcagcgtggtgttggcctgcacattcctcgtgtgcgctgtcttccttctgaacccctggacggccgggatcattgtgatggtcctggcgctgatgacggtcgagctgttcggcatgatgggcctcatcggaatcaagctcagtgccgtgcccgtggtcatcctgatcgcttctgttggcataggagtggagttcaccgttcacgttgctttggcctttctgacggccatcggcgacaagaaccgcagggctgtgcttgccctggagcacatgtttgcacccgtcctggatggcgccgtgtccactctgctgggagtgctgatgctggcgggatctgagttcgacttcattgtcaggtatttctttgctgtgctggcgatcctcaccatcctcggcgttctcaatgggctggttttgcttcccgtgcttttgtctttctttggaccatatcctgaggtgtctccagccaacggcttgaaccgcctgcccacaccctcccctgagccaccccccagcgtggtccgcttcgccatgccgcccggccacacgcacagcgggtctgattcctccgactcggagtatagttcccagacgacagtgtcaggcctcagcgaggagcttcggcactacgaggcccagcagggcgcgggaggccctgcccaccaagtgatcgtggaagccacagaaaaccccgtcttcgcccactccactgtggtccatcccgaatccaggcatcacccaccctcgaacccgagacagcagccccacctggactcagggtccctgcctcccggacggcaaggccagcagccccgcagggacccccccagagaaggcttgtggccacccctctacagaccgcgcagagacgcttttgaaatttctactgaagggcattctggccctagcaatagggcccgctggggccctcgcggggcccgttctcacaaccctcggaacccagcgtccactgccatgggcagctccgtgcccggctactgccagcccatcaccactgtgacggcttctgcctccgtgactgtcgccgtgcacccgccgcctgtccctgggcctgggcggaacccccgagggggactctgcccaggctaccctgagactgaccacggcctgtttgaggacccccacgtgcctttccacgtccggtgtgagaggagggattcgaaggtggaagtcattgagctgcaggacgtggaatgcgaggagaggccccggggaagcagctccaactgagggtgattaaaatctgaagcaaagaggccaaagattggaaaccccccacccccacctctttccagaactgcttgaagagaactggttggagttatggaaaagatgccctgtgccaggacagcagttcattgttactgtaaccgattgtattattttgttaaatatttctataaatatttaagagatgtacacatgtgtaatataggaaggaaggatgtaaagtggtatgatctggggcttctccactcctgccccagagtgtggaggccacagtggggcctctccgtatttgtgcattgggctccgtgccacaaccaagcttcattagtcttaaatttcagcatatgttgctgctgcttaaatattgtataatttacttgtataattctatgcaaatattgcttatgtaataggattattttgtaaaggtttctgtttaaaatattttaaatttgcatatcacaaccctgtggtagtatgaaatgttactgttaactttcaaacacgctatgcgtgataatttttttgtttaatgagcagatatgaagaaagcacgttaatcctggtggcttctctaggtgtcgttgtgtgcggtcctcttgtttggctgtgcgtgtgaacacgtgtgtgagttcaccatgtactgtactgtgattttttttttgtcttgttttgtttctctacactgtctgtaacctgtagtaggctctgacctagtcaggctggaagcgtcaggatatcttttcttcgtgctggtgagggctggccctaaacatccacctaatcctttcaaatcagcccggcaaaagctagactctcctcgtgtctacggcatctcttatgatcattggctgccatccaggaccccaatttgtgcttcagggggataatctccttctctcggatcattgtgatggatgctggaacctcagggtatggagctcacatcagttcatcatggtgggtgttagagaattcggtgacatgcctagtgctgagccttggctgggccatgagagtctgtatactctaaaaagcatgcagcatggtgcccctcttctgaccaacacacacacgacccctcccccaacacccccaaattcaagagtggatgtggccctgtcacaggtagaaaaacctatttagttaattctttcttggcccacagtctcccagaaatgatgttttgagtccctatagtttaaactccctctcttaaatggagcagctggttgaggctttctagatctgtttgcatcttctttaaaactaagtggtgagcatgcattgtggtgtagaggcaggcattatgtaggataagagctccggggggattcttcatgcaccagtgtttagggtacgtgcttcctaagtaaatccaaacattgtctccatcctccccgtcattagtgctctttcaatgtgatgtgggaaagcaggaggatggacacaccccactgaaagatgtaggcaggggcaggtctctcaaccaggcatatttttaaaagttgcttctgtactggttctcttcttttgctctgaggtgtgggctccctcatctcgtaaccagagaccagcacatgtcagggaagcacccagtgtcggctccccatccaaatccacaccagcaccttgttacagacaagaagtcagaggaaagggcggggtccctgcagggctgaagcctaagctactgtgaggngctcacgagtggcagctcctgttactcccttttaaattacctgggaaatcttaacagaaaggtaatgggcccccagaaatacccacagcatagtgacctcagaccctgatactcaccacaaaacttttaagatgctgattgggagccgcttgtggctgctggtgtgtgtgtgtgtgtgtgtgtgtcgtgcgtgcgtgtgtgtgtgtctctgctggggaccctggccacccccctgctgctgtcttggtgcctgtcacccacatggtctgccatcctaacacccagctctgctcagaaaacgtcctgcgtggaggagggatgatgcagaattctgaagtcgacttccctctggctcctggcgtgccctcgctcccttcctgagcccagctcgtgttgcgccggaggctgcgcggcccctgatttctgcatggtgtagaactttctccaatagtcacattggcaaagggagaactggggtgggcggggggtggggctggcagggaattagaatttctctctctcttttaatagttttattttgtctgtcctgtttgttcatttggatgttttaatttttaaaaaaaaaaaaactttgctgatatttataattttgtatcataagaatgttttcctctacagtatttgtcatgccagtttataacaaaaaaaaatgcagggattttatttctattggaaacattacagctatgttttacttttggacagaatttttatttgtatagagtgcttactaatgttaaatagttcagagtatataacatttacattaaggactcatggtaggttttagggtaaggagtttaaaggaaataaatattcaaactgggtctcattgccaattttggtggaaatgagtttgtgtcatttcaattacaaagataaaagtatgccatataatttatttatatgaagatttatttttgtagtgtacatagtagtcatcaagtcttttgacagaagtatatttttaaagaatttatatgtgatgaatccataatgtctggaactttgctgagacatgagtgggcacagttttcattgtaaattacagcaaggaaagaaaatgtttaacagtgttaagagagtcagagcagagtggatattcatgcgattatgaagtgtttattagttaccattggcgacctagcatgcttctcatttcaaaccttggaaggtgaaaatgtacaaactctctaaataattaatgttcaaacactgatagaaattctaacatgaataaaaaataatataacttgttggttatatctttgtttgtagaatgctttttttctttaaaatacttgggagagacagttagtgttggagccatcagaaactgttgtttcatcttgctgaccttgtgacactcttcttttttgctctatctgatggagagagttttaggttttcctcctttttgttttgtataaatagtgggtataagcatagctctgttacatggatgtattacaaagtgggggctgagcttttagtgtgatcatcacccaaatagtgtacattgtacccattaattaatttcttatcacctgaccctatttttgttttctcataccaagaaacttcctaagttaaccatcaaaattagtccttctgtcatctctcttagcatacttatttcccttatgtgatgcctaataatgagggaacataaataaagccaaattcaagatgattatcatcag

SEQ ID NO: 300512 - DNA, 8002 bp, Homo sapiens
  misc_feature (6278)..(6278): n is a, c, g, or t
cggccgcggggggcggggagagggtggctaggctcgcgggagctcgccgggcagggcgcctcccaggaaggcggggaggggagcgcctgtttacccaggagggctgtgctgatagcacgttcctcgagtttactttgctttccttgagtttattgtaaaggggtaaagttttcggatccgtcacgtgaccctgacaggtcctgcctatggcgcggcagaccacccacgccgagggccatggaactgcttaatagaaacaggcttgtaattgtgagtccgcgctgcactccgccgaaagcctccggcggcccagcgcgccggggtttttacactttccgttccttttgtaaagacggaggaggaggagaagaagaagaagaaaacggaggagaagaaaaagacgacaggggagacaaagagacccgcagcgacaaggcaagggggagacgagggaagactgggagaagacggaggagcggaggacgaggaaaggggggccagggaaaaaaaaggaattgatgtgaaatccaagcccagcgtccgcgccatcggcacccgcgctccgagcaggggttgacggccggctatggggaaggctactggccggaaagcgccgctgtggctgagagcgaagtttcagagactcttatttaaactgggttgttacattcaaaaaaactgcggcaagttcttggttgtgggcctcctcatatttggggccttcgcggtgggattaaaagcagcgaacctcgagaccaacgtggaggagctgtgggtggaagttggaggacgagtaagtcgtgaattaaattatactcgccagaagattggagaagaggctatgtttaatcctcaactcatgatacagacccctaaagaagaaggtgctaatgtcctgaccacagaagcgctcctacaacacctggactcggcactccaggccagccgtgtccatgtatacatgtacaacaggcagtggaaattggaacatttgtgttacaaatcaggagagcttatcacagaaacaggttacatggatcagataatagaatatctttacccttgtttgattattacacctttggactgcttctgggaaggggcgaaattacagtctgggacagcatacctcctaggtaaacctcctttgcggtggacaaacttcgaccctttggaattcctggaagagttaaagaaaataaactatcaagtggacagctgggaggaaatgctgaataaggctgaggttggtcatggttacatggaccgcccctgcctcaatccggccgatccagactgccccgccacagcccccaacaaaaattcaaccaaacctcttgatatggcccttgttttgaatggtggatgtcatggcttatccagaaagtatatgcactggcaggaggagttgattgtgggtggcacagtcaagaacagcactggaaaactcgtcagcgcccatgccctgcagaccatgttccagttaatgactcccaagcaaatgtacgagcacttcaaggggtacgagtatgtctcacacatcaactggaacgaggacaaagcggcagccatcctggaggcctggcagaggacatatgtggaggtggttcatcagagtgtcgcacagaactccactcaaaaggtgctttccttcaccaccacgaccctggacgacatcctgaaatccttctctgacgtcagtgtcatccgcgtggccagcggctacttactcatggttttgccatttctcgctcttggtgttggtgtggatgatgtttttcttctggcccacgccttcagtgaaacaggacagaataaaagaatcccttttgaggacaggaccggggagtgcctgaagcgcacaggagccagcgtggccctcacgtccatcagcaatgtcacagccttcttcatggccgcgttaatcccaattcccgctctgcgggcgttctccctccaggcagcggtagtagtggtgttcaattttgccatggttctgctcatttttcctgcaattctcagcatggatttatatcgacgcgaggacaggagactggatattttctgctgttttacaagcccctgcgtcagcagagtgattcaggttgaacctcaggcctacaccgacacacacgacaatacccgctacagccccccacctccctacagcagccacagctttgcccatgaaacgcagattaccatgcagtccactgtccagctccgcacggagtacgacccccacacgcacgtgtactacaccaccgctgagccgcgctccgagatctctgtgcagcccgtcaccgtgacacaggacaccctcagctgccagagcccagagagcaccagctccacaagggacctgctctcccagttctccgactccagcctccactgcctcgagcccccctgtacgaagtggacactctcatcttttgctgagaagcactatgctcctttcctcttgaaaccaaaagccaaggtagtggtgatcttcctttttctgggcttgctgggggtcagcctttatggcaccacccgagtgagagacgggctggaccttacggacattgtacctcgggaaaccagagaatatgactttattgctgcacaattcaaatacttttctttctacaacatgtatatagtcacccagaaagcagactacccgaatatccagcacttactttacgacctacacaggagtttcagtaacgtgaagtatgtcatgttggaagaaaacaaacagcttcccaaaatgtggctgcactacttcagagactggcttcagggacttcaggatgcatttgacagtgactgggaaaccgggaaaatcatgccaaacaattacaagaatggatcagacgatggagtccttgcctacaaactcctggtgcaaaccggcagccgcgataagcccatcgacatcagccagttgactaaacagcgtctggtggatgcagatggcatcattaatcccagcgctttctacatctacctgacggcttgggtcagcaacgaccccgtcgcgtatgctgcctcccaggccaacatccggccacaccgaccagaatgggtccacgacaaagccgactacatgcctgaaacaaggctgagaatcccggcagcagagcccatcgagtatgcccagttccctttctacctcaacggcttgcgggacacctcagactttgtggaggcaattgaaaaagtaaggaccatctgcagcaactatacgagcctggggctgtccagttaccccaacggctaccccttcctcttctgggagcagtacatcggcctccgccactggctgctgctgttcatcagcgtggtgttggcctgcacattcctcgtgtgcgctgtcttccttctgaacccctggacggccgggatcattgtgatggtcctggcgctgatgacggtcgagctgttcggcatgatgggcctcatcggaatcaagctcagtgccgtgcccgtggtcatcctgatcgcttctgttggcataggagtggagttcaccgttcacgttgctttggcctttctgacggccatcggcgacaagaaccgcagggctgtgcttgccctggagcacatgtttgcacccgtcctggatggcgccgtgtccactctgctgggagtgctgatgctggcgggatctgagttcgacttcattgtcaggtatttctttgctgtgctggcgatcctcaccatcctcggcgttctcaatgggctggttttgcttcccgtgcttttgtctttctttggaccatatcctgaggtgtctccagccaacggcttgaaccgcctgcccacaccctcccctgagccaccccccagcgtggtccgcttcgccatgccgcccggccacacgcacagcgggtctgattcctccgactcggagtatagttcccagacgacagtgtcaggcctcagcgaggagcttcggcactacgaggcccagcagggcgcgggaggccctgcccaccaagtgatcgtggaagccacagaaaaccccgtcttcgcccactccactgtggtccatcccgaatccaggcatcacccaccctcgaacccgagacagcagccccacctggactcagggtccctgcctcccggacggcaaggccagcagccccgcagggacccccccagagaaggcttgtggccacccctctacagaccgcgcagagacgcttttgaaatttctactgaagggcattctggccctagcaatagggcccgctggggccctcgcggggcccgttctcacaaccctcggaacccagcgtccactgccatgggcagctccgtgcccggctactgccagcccatcaccactgtgacggcttctgcctccgtgactgtcgccgtgcacccgccgcctgtccctgggcctgggcggaacccccgagggggactctgcccaggctaccctgagactgaccacggcctgtttgaggacccccacgtgcctttccacgtccggtgtgagaggagggattcgaaggtggaagtcattgagctgcaggacgtggaatgcgaggagaggccccggggaagcagctccaactgagggtgattaaaatctgaagcaaagaggccaaagattggaaaccccccacccccacctctttccagaactgcttgaagagaactggttggagttatggaaaagatgccctgtgccaggacagcagttcattgttactgtaaccgattgtattattttgttaaatatttctataaatatttaagagatgtacacatgtgtaatataggaaggaaggatgtaaagtggtatgatctggggcttctccactcctgccccagagtgtggaggccacagtggggcctctccgtatttgtgcattgggctccgtgccacaaccaagcttcattagtcttaaatttcagcatatgttgctgctgcttaaatattgtataatttacttgtataattctatgcaaatattgcttatgtaataggattattttgtaaaggtttctgtttaaaatattttaaatttgcatatcacaaccctgtggtagtatgaaatgttactgttaactttcaaacacgctatgcgtgataatttttttgtttaatgagcagatatgaagaaagcacgttaatcctggtggcttctctaggtgtcgttgtgtgcggtcctcttgtttggctgtgcgtgtgaacacgtgtgtgagttcaccatgtactgtactgtgattttttttttgtcttgttttgtttctctacactgtctgtaacctgtagtaggctctgacctagtcaggctggaagcgtcaggatatcttttcttcgtgctggtgagggctggccctaaacatccacctaatcctttcaaatcagcccggcaaaagctagactctcctcgtgtctacggcatctcttatgatcattggctgccatccaggaccccaatttgtgcttcagggggataatctccttctctcggatcattgtgatggatgctggaacctcagggtatggagctcacatcagttcatcatggtgggtgttagagaattcggtgacatgcctagtgctgagccttggctgggccatgagagtctgtatactctaaaaagcatgcagcatggtgcccctcttctgaccaacacacacacgacccctcccccaacacccccaaattcaagagtggatgtggccctgtcacaggtagaaaaacctatttagttaattctttcttggcccacagtctcccagaaatgatgttttgagtccctatagtttaaactccctctcttaaatggagcagctggttgaggctttctagatctgtttgcatcttctttaaaactaagtggtgagcatgcattgtggtgtagaggcaggcattatgtaggataagagctccggggggattcttcatgcaccagtgtttagggtacgtgcttcctaagtaaatccaaacattgtctccatcctccccgtcattagtgctctttcaatgtgatgtgggaaagcaggaggatggacacaccccactgaaagatgtaggcaggggcaggtctctcaaccaggcatatttttaaaagttgcttctgtactggttctcttcttttgctctgaggtgtgggctccctcatctcgtaaccagagaccagcacatgtcagggaagcacccagtgtcggctccccatccaaatccacaccagcaccttgttacagacaagaagtcagaggaaagggcggggtccctgcagggctgaagcctaagctactgtgaggngctcacgagtggcagctcctgttactcccttttaaattacctgggaaatcttaacagaaaggtaatgggcccccagaaatacccacagcatagtgacctcagaccctgatactcaccacaaaacttttaagatgctgattgggagccgcttgtggctgctggtgtgtgtgtgtgtgtgtgtgtgtcgtgcgtgcgtgtgtgtgtgtctctgctggggaccctggccacccccctgctgctgtcttggtgcctgtcacccacatggtctgccatcctaacacccagctctgctcagaaaacgtcctgcgtggaggagggatgatgcagaattctgaagtcgacttccctctggctcctggcgtgccctcgctcccttcctgagcccagctcgtgttgcgccggaggctgcgcggcccctgatttctgcatggtgtagaactttctccaatagtcacattggcaaagggagaactggggtgggcggggggtggggctggcagggaattagaatttctctctctcttttaatagttttattttgtctgtcctgtttgttcatttggatgttttaatttttaaaaaaaaaaaaactttgctgatatttataattttgtatcataagaatgttttcctctacagtatttgtcatgccagtttataacaaaaaaaaatgcagggattttatttctattggaaacattacagctatgttttacttttggacagaatttttatttgtatagagtgcttactaatgttaaatagttcagagtatataacatttacattaaggactcatggtaggttttagggtaaggagtttaaaggaaataaatattcaaactgggtctcattgccaattttggtggaaatgagtttgtgtcatttcaattacaaagataaaagtatgccatataatttatttatatgaagatttatttttgtagtgtacatagtagtcatcaagtcttttgacagaagtatatttttaaagaatttatatgtgatgaatccataatgtctggaactttgctgagacatgagtgggcacagttttcattgtaaattacagcaaggaaagaaaatgtttaacagtgttaagagagtcagagcagagtggatattcatgcgattatgaagtgtttattagttaccattggcgacctagcatgcttctcatttcaaaccttggaaggtgaaaatgtacaaactctctaaataattaatgttcaaacactgatagaaattctaacatgaataaaaaataatataacttgttggttatatctttgtttgtagaatgctttttttctttaaaatacttgggagagacagttagtgttggagccatcagaaactgttgtttcatcttgctgaccttgtgacactcttcttttttgctctatctgatggagagagttttaggttttcctcctttttgttttgtataaatagtgggtataagcatagctctgttacatggatgtattacaaagtgggggctgagcttttagtgtgatcatcacccaaatagtgtacattgtacccattaattaatttcttatcacctgaccctatttttgttttctcataccaagaaacttcctaagttaaccatcaaaattagtccttctgtcatctctcttagcatacttatttcccttatgtgatgcctaataatgagggaacataaataaagccaaattcaagatgattatcatcag

SEQ ID NO: 300513 - DNA, 5824 bp, Homo sapiens
  misc_feature (4100)..(4100): n is a, c, g, or t
gggaggctgaggcacgagaatagcttgaacctgggaggtggaggttacagtgagccgagatggcaccactgcactccagccttggcaacacaagactgtttcaaaaaattatatataaaacaaaacaaaataaaaatgcgattactatgattttatcctttttcctatgggagaacaacccctacaagataaatcagtttaagtgtggtggtgaaaacaaggtatgaggctagacagcttctctttgtccgggaagagtcagtggtgctccctggggtctgaccttgtgcctcttctgttccaggtagtggtgatcttcctttttctgggcttgctgggggtcagcctttatggcaccacccgagtgagagacgggctggaccttacggacattgtacctcgggaaaccagagaatatgactttattgctgcacaattcaaatacttttctttctacaacatgtatatagtcacccagaaagcagactacccgaatatccagcacttactttacgacctacacaggagtttcagtaacgtgaagtatgtcatgttggaagaaaacaaacagcttcccaaaatgtggctgcactacttcagagactggcttcagggacttcaggatgcatttgacagtgactgggaaaccgggaaaatcatgccaaacaattacaagaatggatcagacgatggagtccttgcctacaaactcctggtgcaaaccggcagccgcgataagcccatcgacatcagccagttgactaaacagcgtctggtggatgcagatggcatcattaatcccagcgctttctacatctacctgacggcttgggtcagcaacgaccccgtcgcgtatgctgcctcccaggccaacatccggccacaccgaccagaatgggtccacgacaaagccgactacatgcctgaaacaaggctgagaatcccggcagcagagcccatcgagtatgcccagttccctttctacctcaacggcttgcgggacacctcagactttgtggaggcaattgaaaaagtaaggaccatctgcagcaactatacgagcctggggctgtccagttaccccaacggctaccccttcctcttctgggagcagtacatcggcctccgccactggctgctgctgttcatcagcgtggtgttggcctgcacattcctcgtgtgcgctgtcttccttctgaacccctggacggccgggatcattgtgatggtcctggcgctgatgacggtcgagctgttcggcatgatgggcctcatcggaatcaagctcagtgccgtgcccgtggtcatcctgatcgcttctgttggcataggagtggagttcaccgttcacgttgctttggcctttctgacggccatcggcgacaagaaccgcagggctgtgcttgccctggagcacatgtttgcacccgtcctggatggcgccgtgtccactctgctgggagtgctgatgctggcgggatctgagttcgacttcattgtcaggtatttctttgctgtgctggcgatcctcaccatcctcggcgttctcaatgggctggttttgcttcccgtgcttttgtctttctttggaccatatcctgaggtgtctccagccaacggcttgaaccgcctgcccacaccctcccctgagccaccccccagcgtggtccgcttcgccatgccgcccggccacacgcacagcgggtctgattcctccgactcggagtatagttcccagacgacagtgtcaggcctcagcgaggagcttcggcactacgaggcccagcagggcgcgggaggccctgcccaccaagtgatcgtggaagccacagaaaaccccgtcttcgcccactccactgtggtccatcccgaatccaggcatcacccaccctcgaacccgagacagcagccccacctggactcagggtccctgcctcccggacggcaaggccagcagccccgcagggacccccccagagaaggcttgtggccacccctctacagaccgcgcagagacgcttttgaaatttctactgaagggcattctggccctagcaatagggcccgctggggccctcgcggggcccgttctcacaaccctcggaacccagcgtccactgccatgggcagctccgtgcccggctactgccagcccatcaccactgtgacggcttctgcctccgtgactgtcgccgtgcacccgccgcctgtccctgggcctgggcggaacccccgagggggactctgcccaggctaccctgagactgaccacggcctgtttgaggacccccacgtgcctttccacgtccggtgtgagaggagggattcgaaggtggaagtcattgagctgcaggacgtggaatgcgaggagaggccccggggaagcagctccaactgagggtgattaaaatctgaagcaaagaggccaaagattggaaaccccccacccccacctctttccagaactgcttgaagagaactggttggagttatggaaaagatgccctgtgccaggacagcagttcattgttactgtaaccgattgtattattttgttaaatatttctataaatatttaagagatgtacacatgtgtaatataggaaggaaggatgtaaagtggtatgatctggggcttctccactcctgccccagagtgtggaggccacagtggggcctctccgtatttgtgcattgggctccgtgccacaaccaagcttcattagtcttaaatttcagcatatgttgctgctgcttaaatattgtataatttacttgtataattctatgcaaatattgcttatgtaataggattattttgtaaaggtttctgtttaaaatattttaaatttgcatatcacaaccctgtggtagtatgaaatgttactgttaactttcaaacacgctatgcgtgataatttttttgtttaatgagcagatatgaagaaagcacgttaatcctggtggcttctctaggtgtcgttgtgtgcggtcctcttgtttggctgtgcgtgtgaacacgtgtgtgagttcaccatgtactgtactgtgattttttttttgtcttgttttgtttctctacactgtctgtaacctgtagtaggctctgacctagtcaggctggaagcgtcaggatatcttttcttcgtgctggtgagggctggccctaaacatccacctaatcctttcaaatcagcccggcaaaagctagactctcctcgtgtctacggcatctcttatgatcattggctgccatccaggaccccaatttgtgcttcagggggataatctccttctctcggatcattgtgatggatgctggaacctcagggtatggagctcacatcagttcatcatggtgggtgttagagaattcggtgacatgcctagtgctgagccttggctgggccatgagagtctgtatactctaaaaagcatgcagcatggtgcccctcttctgaccaacacacacacgacccctcccccaacacccccaaattcaagagtggatgtggccctgtcacaggtagaaaaacctatttagttaattctttcttggcccacagtctcccagaaatgatgttttgagtccctatagtttaaactccctctcttaaatggagcagctggttgaggctttctagatctgtttgcatcttctttaaaactaagtggtgagcatgcattgtggtgtagaggcaggcattatgtaggataagagctccggggggattcttcatgcaccagtgtttagggtacgtgcttcctaagtaaatccaaacattgtctccatcctccccgtcattagtgctctttcaatgtgatgtgggaaagcaggaggatggacacaccccactgaaagatgtaggcaggggcaggtctctcaaccaggcatatttttaaaagttgcttctgtactggttctcttcttttgctctgaggtgtgggctccctcatctcgtaaccagagaccagcacatgtcagggaagcacccagtgtcggctccccatccaaatccacaccagcaccttgttacagacaagaagtcagaggaaagggcggggtccctgcagggctgaagcctaagctactgtgaggngctcacgagtggcagctcctgttactcccttttaaattacctgggaaatcttaacagaaaggtaatgggcccccagaaatacccacagcatagtgacctcagaccctgatactcaccacaaaacttttaagatgctgattgggagccgcttgtggctgctggtgtgtgtgtgtgtgtgtgtgtgtcgtgcgtgcgtgtgtgtgtgtctctgctggggaccctggccacccccctgctgctgtcttggtgcctgtcacccacatggtctgccatcctaacacccagctctgctcagaaaacgtcctgcgtggaggagggatgatgcagaattctgaagtcgacttccctctggctcctggcgtgccctcgctcccttcctgagcccagctcgtgttgcgccggaggctgcgcggcccctgatttctgcatggtgtagaactttctccaatagtcacattggcaaagggagaactggggtgggcggggggtggggctggcagggaattagaatttctctctctcttttaatagttttattttgtctgtcctgtttgttcatttggatgttttaatttttaaaaaaaaaaaaactttgctgatatttataattttgtatcataagaatgttttcctctacagtatttgtcatgccagtttataacaaaaaaaaatgcagggattttatttctattggaaacattacagctatgttttacttttggacagaatttttatttgtatagagtgcttactaatgttaaatagttcagagtatataacatttacattaaggactcatggtaggttttagggtaaggagtttaaaggaaataaatattcaaactgggtctcattgccaattttggtggaaatgagtttgtgtcatttcaattacaaagataaaagtatgccatataatttatttatatgaagatttatttttgtagtgtacatagtagtcatcaagtcttttgacagaagtatatttttaaagaatttatatgtgatgaatccataatgtctggaactttgctgagacatgagtgggcacagttttcattgtaaattacagcaaggaaagaaaatgtttaacagtgttaagagagtcagagcagagtggatattcatgcgattatgaagtgtttattagttaccattggcgacctagcatgcttctcatttcaaaccttggaaggtgaaaatgtacaaactctctaaataattaatgttcaaacactgatagaaattctaacatgaataaaaaataatataacttgttggttatatctttgtttgtagaatgctttttttctttaaaatacttgggagagacagttagtgttggagccatcagaaactgttgtttcatcttgctgaccttgtgacactcttcttttttgctctatctgatggagagagttttaggttttcctcctttttgttttgtataaatagtgggtataagcatagctctgttacatggatgtattacaaagtgggggctgagcttttagtgtgatcatcacccaaatagtgtacattgtacccattaattaatttcttatcacctgaccctatttttgttttctcataccaagaaacttcctaagttaaccatcaaaattagtccttctgtcatctctcttagcatacttatttcccttatgtgatgcctaataatgagggaacataaataaagccaaattcaagatgattatcatcag

SEQ ID NO: 300514 - DNA, 1763 bp, Homo sapiens
gcggccgcagcggcagcagcgcccgccgtgtgagcagcagcagcggctggtctgtcaaccggagcccgagcccgagcagcctgcggccagcagcgtcctcgcaagccgagcgcccaggcgcgccaggagcccgcagcagcggcagcagcgcgccgggccgcccgggaagcctccgtccccgcggcggcggcggcggcggcggcaacatggcctcggctggtaacgccgccgagccccaggaccgcggcggcggcggcagcggctgtatcggtgccccgggacggccggctggaggcgggaggcgcagacggacgggggggctgcgccgtgctgccgcgccggaccgggactatctgcaccggcccagctactgcgacgccgccttcgctctggagcagatttccaaggggaaggctactggccggaaagcgccgctgtggctgagagcgaagtttcagagactcttatttaaactgggttgttacattcaaaaaaactgcggcaagttcttggttgtgggcctcctcatatttggggccttcgcggtgggattaaaagcagcgaacctcgagaccaacgtggaggagctgtgggtggaagttggaggacgagtaagtcgtgaattaaattatactcgccagaagattggagaagaggctatgtttaatcctcaactcatgatacagacccctaaagaagaaggtgctaatgtcctgaccacagaagcgctcctacaacacctggactcggcactccaggccagccgtgtccatgtatacatgtacaacaggcagtggaaattggaacatttgtgttacaaatcaggagagcttatcacagaaacaggttacatggatcagataatagaatatctttacccttgtttgattattacacctttggactgcttctgggaaggggcgaaattacagtctgggacagcatacctcctaggtaaacctcctttgcggtggacaaacttcgaccctttggaattcctggaagagttaaagaaaataaactatcaagtggacagctgggaggaaatgctgaataaggctgaggttggtcatggttacatggaccgcccctgcctcaatccggccgatccagactgccccgccacagcccccaacaaaaattcaaccaaacctcttgatatggcccttgttttgaatggtggatgtcatggcttatccagaaagtatatgcactggcaggaggagttgattgtgggtggcacagtcaagaacagcactggaaaactcgtcagcgcccatgccctgcagaccatgttccagttaatgactcccaagcaaatgtacgagcacttcaaggggtacgagtatgtctcacacatcaactggaacgaggacaaagcggcagccatcctggaggcctggcagaggacatatgtggaggtggttcatcagagtgtcgcacagaactccactcaaaaggtgctttccttcaccaccacgaccctggacgacatcctgaaatccttctctgacgtcagtgtcatccgcgtggccagcggctacttactcatgctcgcctatgcctgtctaaccatgctgcgctgtgtgtgtgaagcgtacctagggcgggaggcgacatggagacaggggcggccgagctgtatgaccaggtcccttttgggcatcctgcagcacgtgggcaacgtccaggatttcctgcgcgttctctttgcttcctctaccgcaagacagacttctatcgcatgagtccacataattgga

SEQ ID NO: 300515 - DNA, 1386 bp, Homo sapiens
gcggccgcagcggcagcagcgcccgccgtgtgagcagcagcagcggctggtctgtcaaccggagcccgagcccgagcagcctgcggccagcagcgtcctcgcaagccgagcgcccaggcgcgccaggagcccgcagcagcggcagcagcgcgccgggccgcccgggaagcctccgtccccgcggcggcggcggcggcggcggcaacatggcctcggctggtaacgccgccgagccccaggaccgcggcggcggcggcagcggctgtatcggtgccccgggacggccggctggaggcgggaggcgcagacggacgggggggctgcgccgtgctgccgcgccggaccgggactatctgcaccggcccagctactgcgacgccgccttcgctctggagcagatttccaaggggaaggctactggccggaaagcgccgctgtggctgagagcgaagtttcagagactcttatttaaactgggttgttacattcaaaaaaactgcggcaagttcttggttgtgggcctcctcatatttggggccttcgcggtgggattaaaagcagcgaacctcgagaccaacgtggaggagctgtgggtggaagttggaggacgagtaagtcgtgaattaaattatactcgccagaagattggagaagaggctatgtttaatcctcaactcatgatacagacccctaaagaagaaggtgctaatgtcctgaccacagaagcgctcctacaacacctggactcggcactccaggccagccgtgtccatgtatacatgtacaacaggcagtggaaattggaacatttgtgttacaaatcaggagagcttatcacagaaacaggttacatggatcagataatagaatatctttacccttgtttgattattacacctttggactgcttctgggaaggggcgaaattacagtctgggacagcatacctcctaggtaaacctcctttgcggtggacaaacttcgaccctttggaattcctggaagagttaaagaaaataaactatcaagtggacagctgggaggaaatgctgaataaggctgaggttggtcatggttacatggaccgcccctgcctcaatccggccgatccagactgccccgccacagcccccaacaaaaattcaaccaaacctcttgatatggcccttgttttgaatggtggatgtcatggcttatccagaaagtatatgcactggcaggaggagttgattgtgggtggcacagtcaagaacagcactggaaaactcgtcaggtaagccagctcccgaggacaatctatgccctgtagtcttcttcctttcctcaaaagccacttccctcctgacatcggcaagtgtatttgtattaatacttaaaccgttatcc

SEQ ID NO: 300516 - DNA, 724 bp, Homo sapiens
gggattacgcagcccctcccttctcagctctggggtgaatattgtctgtgtcgagtggtttctctcctctctacctcggcttcctcttctgtattgcagccccagtgccccaagtcgctcagggatcccgcgggtgggggcgccctgatgtccccgaggtgcagctcccacgctgcggcccggctttatgaccgagccccccatgacgctcagatccgccggggctgcagtctcgagggcgagtccgtgtgccgcggccacccgcgcccccacggctgttgggggctcaccgggcgggtgcgcgcaagcgggcgtgggcgcgcgggccgcgactccccggcgctcactcctcccttctgcttcgtccccaggggaaggctactggccggaaagcgccgctgtggctgagagcgaagtttcagagactcttatttaaactgggttgttacattcaaaaaaactgcggcaagttcttggttgtgggcctcctcatatttggggccttcgcggtgggattaaaagcagcgaacctcgagaccaacgtggaggagctgtgggtggaaggtaagagcgcccgccgcggcgcccgcgcccccggcccggtccctcctcgcggttgatagagatattcgccagcgcacacctagagcctggctgcggccggcgaaaccccctgcccgcacccgggggattgtttattgtttgggcgcctggccgggagcca

SEQ ID NO: 300517 - DNA, 325 bp, Homo sapiens
atggagtccttgcctacaaactcctggtgcaaaccggcagccgcgataagcccatcgacatcagccaggtactccagctgctgggcactgagggcgcttccagggctgcggggccgctgccctggtggaggctgcttgacagcgtgtgaccccaccctgtgctctctggagacctaaggcactgggagctggtagaaagaatattgggtgactctaattcacctcctcccaccagctaattgtgtgacctcaggccagccagtgcacctcactttcctcatctgtcaaatgggacaggcgtgttcctaccaccagaacaattgtc

SEQ ID NO: 300518 - DNA, 534 bp, Homo sapiens
cggtagtagtggtgttcaattttgccatggttctgctcatttttcctgcaattctcagcatggatttatatcgacgcgaggacaggagactggatattttctgctgttttacaaggtacattttcagactgctgtggccttttgattgggtgcagaatggtgctgtgagagaactctttcagcctgtggacttataaaggaatgtgggtaacggggtttgtgctggtgtggagaacgtaggggagagattggacagaggctgcttccctagggggacatcagagtccctgggcttccttctcccctgccgcagctgaacagtctcacagccctcaagatgctggttccgatgacccctttttccatcatgaactgatgttgccgattgtaggaatgtttcatatctctgcattagagcagaacaagattgaaaaacacccatctagaaaatatatagtcctttgatggtggtttggttttgtttggaattgtgctttgaaggattcatcatcatggaacttgcttttgaaagcc

SEQ ID NO: 300519 - DNA, 2714 bp, Homo sapiens
gtttcttcaaatgtaagcaaaggatgatcgaacctctgccctcctcacaggtttttgtcaggaccagatgggttgaagtagatgaaagtattctataaattataaaataccccatcattaataaaaagagcacgcacttacaaaatgcagtcttatgtgtcaggcactgttctaatcacttacgtatattaactgatttaatccttgcaacaaccccatgaagaagctactcctatttttttttatatatgattaaactaaggcatagagaagttaagtaaaacagccaggaagctgcgagtcagattataaggactcaatattagcaacaaataagattccagtcttgcttccctttattgtctctcctcattttgagcagtttctcttcattggtcccaagtaggaagacaccatacttgtgtttaggcaacctcagatcacattagctctttaggtaactaatatattatttatttatttcatgtattttttataagcccctctgcagattgtgtatgctaagcgtcctctccccattctgtacctgcatttgattttgaggcttcaaaggcagaattttccattcttccctattatagttcattgttcttaccttataaggttttgtgtgtatgtgtttttaatcttgaccctgtggttttaaaatattcacttcctctgccaccttcacatcatctacaggggtggcaagccctccttccctgtcttcatctacagaggacagagtgaggacagagcctctagagtgtcgtctcttggggttcttttattcagctcattggtcacttacctgccattcaacaaactgtactgtcatcctacccttatttctgcatattatctgcaaagatcatagaaaattctgtcaaacaactcaacgtccaaaaacatgattccggtgatttgtcacttaggtcacctagtttaaaaggagagtttgacacgacttcccctttgggacacccacaccagccctttccccatcccatgtagaagcttgcctttgcccagtgtgaggtgcacgggtcacatttaaggatttcagctcctccctcctttaagaacaccagactaacattcttagcaatgcacattaggatagaggcatctgagcatataaatatttttttctagctagctcccttcttagtttttgtttttggttttagagacagggtctcgctctgtcaccgaggctagagtgcagcggcatgatcatggctcactgtaactttgaactcccggtctcaagcgatcctcctccctcagcctccggatctcttggttttcttacatgagttactctgtatatccacctgtaacattgcttggctttccatttcataccttctgttgttcttagtagctatttctataagctcaggagattttctttgctctttagcaggcttaaagtcctctttttagatcaattatcatctgagaaaatgtgttcttagcattaatgggctatattccatttttacttgaaaccatccttctgttacctatgccatagcttatgactcaaaatccaaattctacctttcagttagtagagtaaaaaagtaataaaaataaaacctatttccccaagtatgtattttcttgtctaagattttcatattacctaatggatgctttttggatatcttcgatggtgccacttgtcccatgaatcagcagggttccctagtggccggcagtgtctggaagcctcagcatactctagcacatgcaccaggaagtcagtcaacatacctggtgattaggagtgttctaatgacctaggcccagtgacaggtttccttaaatttccttgaaccaatgtcattctctgtcaaagtttgtctgcctaagaacctcctacttacctgcactccgtggtgcactttcttcatttcccctcagccttattcccccttccccatcctcttgactctgagttcacttcactgcagtgaaactaatgaggtgctgctgcttttctcaaagccccagatttcccctcctctttcttgccatggcatccagtcctttctcattgcaaccacttggaagtctggcccctgagcctgcttcttcacatgggagctagtattctcagcccatggggagaaacggaggcctgaatacaggcggtcacctaaggtggtgcgtacagtgttgggccacatgtctagtggtgccaggactgagagatcacttacctccaccggttacccaggaggtaacagagactgatccacaatgttcctgaggtgtcttgggcacccataggcaggtgacttctggcttagggcagggttcaggaggctgggcactcacagtttctctttggtccccacagaacatgtttgggttgtggaagcctatggtattcttggctattgcagctgtggctctgtatgtgttacccaacatgcgacagcaggagtcagagttctgcctcatggagtgatggcagaccttggccagcgcgagggcagatccccagtggccaccaccctcagctttgggcaggacacactgtgccagaaccctccccatatgttccatgtgtccccatctcctcagcctcagtcacccaggctgaaaaggcttgtggggagcggctgacttccatctcctgccttgtgtaagaacctgagttccttgtaattaaatatcaactgaattacaaaaaaaag

SEQ ID NO: 300520 - DNA, 4198 bp, Homo sapiens
tcagtcttggccctctcctccctgtccccccggactaaatacgcacaccccctctttctttctgtgcaagcaagagggtcctggaacagcgggttctgaggaggctgggaggcagggctgagaggtggccgagagagaggagtcgcagagccgccagagtgagtcaggcacctccactgggattacagatcccagagcctcgaggagctggaagacatgtccccttctttcctctgcaccccagcccgcagccagccccccaccccccagcccctcctttctccctgctctcaggacccacagtgaccactctaggctcctatgaggcttccgagggctgtgagaggaagaagggccaacgctgggggtccctggaacgacgggggatgcaagctatggagggggaggtgttactcccagctctctatgaggaggaagaggaagaggaagaggaggaagaagaggtggaagaagaagaagaacaagtgcagaaaggtggcagtgttggctctctgtcagtcaacaagcaccggggactgagcctcacggagacagagctggaggagctgcgggctcaggtgctgcagctggtggcagaactggaggagacccgggaactggcagggcagcatgaggatgactccttggagctacaggggctcctggaggatgaacggctagccagcgcccagcaggcagaggtgttcaccaagcagatccagcagctccaaggtgagctgcgttctctacgggaggagatttccctgttagagcatgagaaagaaagcgaacttaaggaaatagaacaggaattgcatttggcccaggctgagatccagagtctgcggcaagcagcagaggattccgcaactgaacatgagagtgacatagcatccctgcaggaggatctctgccggatgcagaatgaacttgaagacatggaacgcattcggggagattatgagatggagatcgcctccctccgtgcagaaatggaaatgaagagctctgaaccatccggtagtttaggtctctcagattactctgggttacaagaagaactgcaggagctgcgggaacgctaccatttcctgaatgaggaataccgggccctgcaggagagcaacagcagcctcacggggcagcttgcagatctggagagtgagaggacacagagagcaacagagagatggctgcagtcccaaacactgagtatgacgtcagcagagtctcagacttcagaaatggatttcttagagcctgatcctgaaatgcagttgttacggcagcagctacgggatgctgaagagcagatgcatggcatgaagaacaagtgtcaggaattgtgttgtgagttggaagagctacagcatcatcgccaggtcagtgaggaggagcagaggcggctgcagagggagctcaagtgtgctcagaatgaggtgcttcggtttcagacctcccacagtgtcacccagaatgaggagctgaagtccagactctgtaccctgcagaaaaaatatgatactagccaggatgagcagaacgagctcttgaagatgcagctgcaacttcagactgagctccggcagctcaaagtcatgaaatccacacttgtagaaaaccagagtgagaaggagttactgtgccggctgcagaagctgcacctccagcaccagaacgtcacatgtgagaaggaaaagctgctggaacggcagcagcagctgcaggaggagctgcagtgccatgaggcagagctgcagcacctcagggatacggtggcctccttcaaagagagcaatgagaaggacacagagacgcacgctcagcttcaggagatgaagcagctgtaccaggccagcaaggacgagctggagcggcagaagcacatgtatgaccagctggagcaggacctcctgctctgccagctggagctgaaagagctcaaggcctcccaccccattccggaggacaaaggaaagtgtgctaataagtgtgacacactgctgtccagactgacagaattgcaggaaaagtacaaggccagccagaaggagatggggcagctgcagatggagcagtgtgagctcctggaggatcagaggaggatgcaggaggagcagggccagctgcaggaagagctgcacaggctcacactgccactgccaaagagtggcctcttactcaagagtcaggagctactcaccaagttagaagacctgtgtgagctgcagctgctctaccaaggcatgcaggaggaacagaagaagctgatacagaaccaagactgtgtattaaaagaacaattagagatccacgaagagctgcgacgtttcaaagagtctcatttccaggaagtgttggagaatcccgatgattccaaattggctaagtcctccaaatgtaatcgaaacaagcaatccaagctgctcatggagcagatgcaggccctgcaggtgatgtatgacgccggtcaggcgaagcaggagctcttgcagcaagagcaagggaggctcctagaggagcggaagaggctgcaggcagacttgcagctctgcctggaagaaatgcagctgcttcaagtccagtccccttctataaaaatgagccttgagtcctacgggaagagctatggtagcatggtccccagcaatgagaactgtcgcaagacttatgataccactgtggatgacaatgagagctattacaagagttacaccagcacccagaccagcagcaagagctttctcaagagctatgacagcagcaccagtgccagtgaggcctatgggaagagttactgcactaccagcaacagcagcattacctataagaagagttacggcagcaccagtagctctgacacctgccagaagagttttgtcagcagctgcactgacgaggaacctgctgagcctgaagacatggagcgctttgaggaaatggttgtgaaagtgctgatcaagctgcaggcggtgcaggccatgtaccagataagccaggaggaacacagccagctgcaagagcagatggaaaagttactggccaagcagaaagacctgaaggaagagctggatgcctgtgaaagggagttcaaggagtgcatggaatgccttgaaaagcccatggccccccagaacgacaagaatgagatcaaagaactgcagaccaagctgcgggagctgcagctgcaataccaggctagcatggatgagcaggggcggcttctggtagtgcaggagcagctggaggggcagctgcagtgctgccaggaggagctccgccagctcagggagaagaggccttctgttgtcaaagaagcccgggggaagaatgctaataagaacatgaacaagaatgccaatggggttaaaatgaaaaaggtgaccaagccatgctcggatacttctgagagcgaccttgagaccagaaagagtctggaggtagtgctgtactacaaggccagccagaggaaattagatggactagcaaaagaggaggaaaagaaagaggagatggaggaggaaaaaaaggaagtgaaagaggaagcaaaggagcagtgtggggatgagctagttgctgagccagcagatcctgaggaagctaaatccacagaagatcaggaggaaaatgaagaggacaaagaggaagaggagaaggaagaagacagtgaagaggaggaggatgacgccgactcttcccttgaaagtcccgaagaaaataaccccctcagactttccgagagcaaaaagtcatcccctacccccaaatccccccatcttctccttgcctcttgtaggcctggtggtcatctcggctttgctctggtgctggtgggctgagacgtcgtcctaatgcaggaacatgtttgggttgtggaagcctatggtattcttggctattgcagctgtggctctgtatgtgttacccaacatgcgacagcaggagtcagagttctgcctcatggagtgatggcagaccttggccagcgcgagggcagatccccagtggccaccaccctcagctttgggcaggacacactgtgccagaaccctccccatatgttccatgtgtccccatctcctcagcctcagtcacccaggctgaaaaggcttgtggggagcggctgacttccatctcctgccttgtgtaagaacctgagttccttgtaattaaatatcaactgaattacaaaaaaaag

SEQ ID NO: 300521 - DNA, 438 bp, Homo sapiens
  misc_feature (1)..(1): n is a, c, g, or t
nagaaacccaaatagagcaatctttgaaaacagcactaataatgttggttgattggctatctctcgtgccgaattcggcacgaggtcgtcctaatgcgaacatgtttgggttgtggaagcctatggtattcttggctattgcagctgtggctctgtatgtgttacccaacatgcgacagcaggagtcagagttctgcctcatggagtgatggcagaccttggccagcgcgagggcagatccccagtggccaccaccctcagctttgggcaggacacactgtgccagaaccctccccatatgttccatgtgtccccatctcctcagcctcagtcacccaggctgaaaaggcttgtggggagcggctgacttccatctcctgccttgtgtaagaacctgagttccttgtaattaaatatcaactgaattacaaaaaaaag

SEQ ID NO: 300522 - DNA, 413 bp, Homo sapiens
ggcaagcagcagaggattccgcaactgaacatgaggatgactccttggagctacaggggctcctggaggatgaacggctagccagcgcccagcaggcagaggtgttcaccaagcagatccagcagctccaaggtgagctgcgttctctacgggaggagatttccctgttagagcatgagaatgatggcagaccttggccagcgcgagggcagatccccagtggccaccaccctcagctttgggcaggacacactgtgccagaaccctccccatatgttccatgtgtccccatctcctcagcctcagtcacccaggctgaaaaggcttgtggggagcggctgacttccatctcctgccttgtgtaagaacctgagttccttgtaattaaatatcaactgaattacaaaaaaaag

SEQ ID NO: 300523 - DNA, 3529 bp, Homo sapiens
agcgggcgttacccgtttccgcctggacggggcgcgcgcggccttagaggcagctgctgttcagaggccgttccggccgccacagcccctccggggcgggaccggccagcggctgggtggccccccagggacacagctctacggggggcggcgagatggaggccataaccagtgagctgcgttctctacgggaggagatttccctgttagagcatgagaaagaaagcgaacttaaggaaatagaacaggaattgcatttggcccaggctgagatccagagtctgcggcaagcagcagaggattccgcaactgaacatgagagtgacatagcatccctgcaggaggatctctgccggatgcagaatgaacttgaagacatggaacgcattcggggagattatgagatggagatcgcctccctccgtgcagaaatggaaatgaagagctctgaaccatccggtagtttaggtctctcagattactctgggttacaagaagaactgcaggagctgcgggaacgctaccatttcctgaatgaggaataccgggccctgcaggagagcaacagcagcctcacggggcagcttgcagatctggagagtgagaggacacagagagcaacagagagatggctgcagtcccaaacactgagtatgacgtcagcagagtctcagacttcagaaatggatttcttagagcctgatcctgaaatgcagttgttacggcagcagctacgggatgctgaagagcagatgcatggcatgaagaacaagtgtcaggaattgtgttgtgagttggaagagctacagcatcatcgccaggtcagtgaggaggagcagaggcggctgcagagggagctcaagtgtgctcagaatgaggtgcttcggtttcagacctcccacagtgtcacccagaatgaggagctgaagtccagactctgtaccctgcagaaaaaatatgatactagccaggatgagcagaacgagctcttgaagatgcagctgcaacttcagactgagctccggcagctcaaagtcatgaaatccacacttgtagaaaaccagagtgagaaggagttactgtgccggctgcagaagctgcacctccagcaccagaacgtcacatgtgagaaggaaaagctgctggaacggcagcagcagctgcaggaggagctgcagtgccatgaggcagagctgcagcacctcagggatacggtggcctccttcaaagagagcaatgagaaggacacagagacgcacgctcagcttcaggagatgaagcagctgtaccaggccagcaaggacgagctggagcggcagaagcacatgtatgaccagctggagcaggacctcctgctctgccagctggagctgaaagagctcaaggcctcccaccccattccggaggacaaaggaaagtgtgctaataagtgtgacacactgctgtccagactgacagaattgcaggaaaagtacaaggccagccagaaggagatggggcagctgcagatggagcagtgtgagctcctggaggatcagaggaggatgcaggaggagcagggccagctgcaggaagagctgcacaggctcacactgccactgccaaagagtggcctcttactcaagagtcaggagctactcaccaagttagaagacctgtgtgagctgcagctgctctaccaaggcatgcaggaggaacagaagaagctgatacagaaccaagactgtgtattaaaagaacaattagagatccacgaagagctgcgacgtttcaaagagtctcatttccaggaagtgttggagaatcccgatgattccaaattggctaagtcctccaaatgtaatcgaaacaagcaatccaagctgctcatggagcagatgcaggccctgcaggtgatgtatgacgccggtcaggcgaagcaggagctcttgcagcaagagcaagggaggctcctagaggagcggaagaggctgcaggcagacttgcagctctgcctggaagaaatgcagctgcttcaagtccagtccccttctataaaaatgagccttgagtcctacgggaagagctatggtagcatggtccccagcaatgagaactgtcgcaagacttatgataccactgtggatgacaatgagagctattacaagagttacaccagcacccagaccagcagcaagagctttctcaagagctatgacagcagcaccagtgccagtgaggcctatgggaagagttactgcactaccagcaacagcagcattacctataagaagagttacggcagcaccagtagctctgacacctgccagaagagttttgtcagcagctgcactgacgaggaacctgctgagcctgaagacatggagcgctttgaggaaatggttgtgaaagtgctgatcaagctgcaggcggtgcaggccatgtaccagataagccaggaggaacacagccagctgcaagagcagatggaaaagttactggccaagcagaaagacctgaaggaagagctggatgcctgtgaaagggagttcaaggagtgcatggaatgccttgaaaagcccatggccccccagaacgacaagaatgagatcaaagaactgcagaccaagctgcgggagctgcagctgcaataccaggctagcatggatgagcaggggcggcttctggtagtgcaggagcagctggaggggcagctgcagtgctgccaggaggagctccgccagctcagggagaagaggccttctgttgtcaaagaagcccgggggaagaatgctaataagaacatgaacaagaatgccaatggggttaaaatgaaaaaggtgaccaagccatgctcggatacttctgagagcgaccttgagaccagaaagagtctggaggtagtgctgtactacaaggccagccagaggaaattagatggactagcaaaagaggaggaaaagaaagaggagatggaggaggaaaaaaaggaagtgaaagaggaagcaaaggagcagtgtggggatgagctagttgctgagccagcagatcctgaggaagctaaatccacagaagatcaggaggaaaatgaagaggacaaagaggaagaggagaaggaagaagacagtgaagaggaggaggatgacgccgactcttcccttgaaagtcccgaagaaaataaccccctcagactttccgagagcaaaaaggaacatgtttgggttgtggaagcctatggtattcttggctattgcagctgtggctctgtatgtgttacccaacatgcgacagcaggagtcagagttctgcctcatggagtgatggcagaccttggccagcgcgagggcagatccccagtggccaccaccctcagctttgggcaggacacactgtgccagaaccctccccatatgttccatgtgtccccatctcctcagcctcagtcacccaggctgaaaaggcttgtggggagcggctgacttccatctcctgccttgtgtaagaacctgagttccttgtaattaaatatcaactgaattacaaaaaaaag

SEQ ID NO: 300524 - DNA, 3933 bp, Homo sapiens
ctgcgcacccggctcgggtccccgggctcgcggctgcggcttctgctcagggaggcggaaggcggcggcgggagcggtcatggaggcgggcgccggagccggcgcgggagccgcgggctggagctgcccgggcccaggacccacagtgaccactctaggctcctatgaggcttccgagggctgtgagaggaagaagggccaacgctgggggtccctggaacgacgggggatgcaagctatggagggggaggtgttactcccagctctctatgaggaggaagaggaagaggaagaggaggaagaagaggtggaagaagaagaagaacaagtgcagaaaggtggcagtgttggctctctgtcagtcaacaagcaccggggactgagcctcacggagacagagctggaggagctgcgggctcaggtgctgcagctggtggcagaactggaggagacccgggaactggcagggcagcatgaggatgactccttggagctacaggggctcctggaggatgaacggctagccagcgcccagcaggcagaggtgttcaccaagcagatccagcagctccaaggtgagctgcgttctctacgggaggagatttccctgttagagcatgagaaagaaagcgaacttaaggaaatagaacaggaattgcatttggcccaggctgagatccagagtctgcggcaagcagcagaggattccgcaactgaacatgagagtgacatagcatccctgcaggaggatctctgccggatgcagaatgaacttgaagacatggaacgcattcggggagattatgagatggagatcgcctccctccgtgcagaaatggaaatgaagagctctgaaccatccggtagtttaggtctctcagattactctgggttacaagaagaactgcaggagctgcgggaacgctaccatttcctgaatgaggaataccgggccctgcaggagagcaacagcagcctcacggggcagcttgcagatctggagagtgagaggacacagagagcaacagagagatggctgcagtcccaaacactgagtatgacgtcagcagagtctcagacttcagaaatggatttcttagagcctgatcctgaaatgcagttgttacggcagcagctacgggatgctgaagagcagatgcatggcatgaagaacaagtgtcaggaattgtgttgtgagttggaagagctacagcatcatcgccaggtcagtgaggaggagcagaggcggctgcagagggagctcaagtgtgctcagaatgaggtgcttcggtttcagacctcccacagtgtcacccagaatgaggagctgaagtccagactctgtaccctgcagaaaaaatatgatactagccaggatgagcagaacgagctcttgaagatgcagctgcaacttcagactgagctccggcagctcaaagtcatgaaatccacacttgtagaaaaccagagtgagaaggagttactgtgccggctgcagaagctgcacctccagcaccagaacgtcacatgtgagaaggaaaagctgctggaacggcagcagcagctgcaggaggagctgcagtgccatgaggcagagctgcagcacctcagggatacggtggcctccttcaaagagagcaatgagaaggacacagagacgcacgctcagcttcaggagatgaagcagctgtaccaggccagcaaggacgagctggagcggcagaagcacatgtatgaccagctggagcaggacctcctgctctgccagctggagctgaaagagctcaaggcctcccaccccattccggaggacaaaggaaagtgtgctaataagtgtgacacactgctgtccagactgacagaattgcaggaaaagtacaaggccagccagaaggagatggggcagctgcagatggagcagtgtgagctcctggaggatcagaggaggatgcaggaggagcagggccagctgcaggaagagctgcacaggctcacactgccactgccaaagagtggcctcttactcaagagtcaggagctactcaccaagttagaagacctgtgtgagctgcagctgctctaccaaggcatgcaggaggaacagaagaagctgatacagaaccaagactgtgtattaaaagaacaattagagatccacgaagagctgcgacgtttcaaagagtctcatttccaggaagtgttggagaatcccgatgattccaaattggctaagtcctccaaatgtaatcgaaacaagcaatccaagctgctcatggagcagatgcaggccctgcaggtgatgtatgacgccggtcaggcgaagcaggagctcttgcagcaagagcaagggaggctcctagaggagcggaagaggctgcaggcagacttgcagctctgcctggaagaaatgcagctgcttcaagtccagtccccttctataaaaatgagccttgagtcctacgggaagagctatggtagcatggtccccagcaatgagaactgtcgcaagacttatgataccactgtggatgacaatgagagctattacaagagttacaccagcacccagaccagcagcaagagctttctcaagagctatgacagcagcaccagtgccagtgaggcctatgggaagagttactgcactaccagcaacagcagcattacctataagaagagttacggcagcaccagtagctctgacacctgccagaagagttttgtcagcagctgcactgacgaggaacctgctgagcctgaagacatggagcgctttgaggaaatggttgtgaaagtgctgatcaagctgcaggcggtgcaggccatgtaccagataagccaggaggaacacagccagctgcaagagcagatggaaaagttactggccaagcagaaagacctgaaggaagagctggatgcctgtgaaagggagttcaaggagtgcatggaatgccttgaaaagcccatggccccccagaacgacaagaatgagatcaaagaactgcagaccaagctgcgggagctgcagctgcaataccaggctagcatggatgagcaggggcggcttctggtagtgcaggagcagctggaggggcagctgcagtgctgccaggaggagctccgccagctcagggagaagaggccttctgttgtcaaagaagcccgggggaagaatgctaataagaacatgaacaagaatgccaatggggttaaaatgaaaaaggtgaccaagccatgctcggatacttctgagagcgaccttgagaccagaaagagtctggaggtagtgctgtactacaaggccagccagaggaaattagatggactagcaaaagaggaggaaaagaaagaggagatggaggaggaaaaaaaggaagtgaaagaggaagcaaaggagcagtgtggggatgagctagttgctgagccagcagatcctgaggaagctaaatccacagaagatcaggaggaaaatgaagaggacaaagaggaagaggagaaggaagaagacagtgaagaggaggaggatgacgccgactcttcccttgaaagtcccgaagaaaataaccccctcagactttccgagagcaaaaaggaacatgtttgggttgtggaagcctatggtattcttggctattgcagctgtggctctgtatgtgttacccaacatgcgacagcaggagtcagagttctgcctcatggagtgatggcagaccttggccagcgcgagggcagatccccagtggccaccaccctcagctttgggcaggacacactgtgccagaaccctccccatatgttccatgtgtccccatctcctcagcctcagtcacccaggctgaaaaggcttgtggggagcggctgacttccatctcctgccttgtgtaagaacctgagttccttgtaattaaatatcaactgaattacaaaaaaaag

SEQ ID NO: 300525 - DNA, 4022 bp, Homo sapiens
aggagagggggtcttccggccctgaggcttgatggggccaccggagggctcctcctaagagggtccttggccctggctcggtggggggtcgcggaaagcggagaggtcagggccctgccgttcgcccatccgggcctcgacttccctcctccggcccccaggctgccgaggggccaccgggcaggggtgggcagggcctggggccggagtcagcgcggactgctaggacccacagtgaccactctaggctcctatgaggcttccgagggctgtgagaggaagaagggccaacgctgggggtccctggaacgacgggggatgcaagctatggagggggaggtgttactcccagctctctatgaggaggaagaggaagaggaagaggaggaagaagaggtggaagaagaagaagaacaagtgcagaaaggtggcagtgttggctctctgtcagtcaacaagcaccggggactgagcctcacggagacagagctggaggagctgcgggctcaggtgctgcagctggtggcagaactggaggagacccgggaactggcagggcagcatgaggatgactccttggagctacaggggctcctggaggatgaacggctagccagcgcccagcaggcagaggtgttcaccaagcagatccagcagctccaaggtgagctgcgttctctacgggaggagatttccctgttagagcatgagaaagaaagcgaacttaaggaaatagaacaggaattgcatttggcccaggctgagatccagagtctgcggcaagcagcagaggattccgcaactgaacatgagagtgacatagcatccctgcaggaggatctctgccggatgcagaatgaacttgaagacatggaacgcattcggggagattatgagatggagatcgcctccctccgtgcagaaatggaaatgaagagctctgaaccatccggtagtttaggtctctcagattactctgggttacaagaagaactgcaggagctgcgggaacgctaccatttcctgaatgaggaataccgggccctgcaggagagcaacagcagcctcacggggcagcttgcagatctggagagtgagaggacacagagagcaacagagagatggctgcagtcccaaacactgagtatgacgtcagcagagtctcagacttcagaaatggatttcttagagcctgatcctgaaatgcagttgttacggcagcagctacgggatgctgaagagcagatgcatggcatgaagaacaagtgtcaggaattgtgttgtgagttggaagagctacagcatcatcgccaggtcagtgaggaggagcagaggcggctgcagagggagctcaagtgtgctcagaatgaggtgcttcggtttcagacctcccacagtgtcacccagaatgaggagctgaagtccagactctgtaccctgcagaaaaaatatgatactagccaggatgagcagaacgagctcttgaagatgcagctgcaacttcagactgagctccggcagctcaaagtcatgaaatccacacttgtagaaaaccagagtgagaaggagttactgtgccggctgcagaagctgcacctccagcaccagaacgtcacatgtgagaaggaaaagctgctggaacggcagcagcagctgcaggaggagctgcagtgccatgaggcagagctgcagcacctcagggatacggtggcctccttcaaagagagcaatgagaaggacacagagacgcacgctcagcttcaggagatgaagcagctgtaccaggccagcaaggacgagctggagcggcagaagcacatgtatgaccagctggagcaggacctcctgctctgccagctggagctgaaagagctcaaggcctcccaccccattccggaggacaaaggaaagtgtgctaataagtgtgacacactgctgtccagactgacagaattgcaggaaaagtacaaggccagccagaaggagatggggcagctgcagatggagcagtgtgagctcctggaggatcagaggaggatgcaggaggagcagggccagctgcaggaagagctgcacaggctcacactgccactgccaaagagtggcctcttactcaagagtcaggagctactcaccaagttagaagacctgtgtgagctgcagctgctctaccaaggcatgcaggaggaacagaagaagctgatacagaaccaagactgtgtattaaaagaacaattagagatccacgaagagctgcgacgtttcaaagagtctcatttccaggaagtgttggagaatcccgatgattccaaattggctaagtcctccaaatgtaatcgaaacaagcaatccaagctgctcatggagcagatgcaggccctgcaggtgatgtatgacgccggtcaggcgaagcaggagctcttgcagcaagagcaagggaggctcctagaggagcggaagaggctgcaggcagacttgcagctctgcctggaagaaatgcagctgcttcaagtccagtccccttctataaaaatgagccttgagtcctacgggaagagctatggtagcatggtccccagcaatgagaactgtcgcaagacttatgataccactgtggatgacaatgagagctattacaagagttacaccagcacccagaccagcagcaagagctttctcaagagctatgacagcagcaccagtgccagtgaggcctatgggaagagttactgcactaccagcaacagcagcattacctataagaagagttacggcagcaccagtagctctgacacctgccagaagagttttgtcagcagctgcactgacgaggaacctgctgagcctgaagacatggagcgctttgaggaaatggttgtgaaagtgctgatcaagctgcaggcggtgcaggccatgtaccagataagccaggaggaacacagccagctgcaagagcagatggaaaagttactggccaagcagaaagacctgaaggaagagctggatgcctgtgaaagggagttcaaggagtgcatggaatgccttgaaaagcccatggccccccagaacgacaagaatgagatcaaagaactgcagaccaagctgcgggagctgcagctgcaataccaggctagcatggatgagcaggggcggcttctggtagtgcaggagcagctggaggggcagctgcagtgctgccaggaggagctccgccagctcagggagaagaggccttctgttgtcaaagaagcccgggggaagaatgctaataagaacatgaacaagaatgccaatggggttaaaatgaaaaaggtgaccaagccatgctcggatacttctgagagcgaccttgagaccagaaagagtctggaggtagtgctgtactacaaggccagccagaggaaattagatggactagcaaaagaggaggaaaagaaagaggagatggaggaggaaaaaaaggaagtgaaagaggaagcaaaggagcagtgtggggatgagctagttgctgagccagcagatcctgaggaagctaaatccacagaagatcaggaggaaaatgaagaggacaaagaggaagaggagaaggaagaagacagtgaagaggaggaggatgacgccgactcttcccttgaaagtcccgaagaaaataaccccctcagactttccgagagcaaaaaggaacatgtttgggttgtggaagcctatggtattcttggctattgcagctgtggctctgtatgtgttacccaacatgcgacagcaggagtcagagttctgcctcatggagtgatggcagaccttggccagcgcgagggcagatccccagtggccaccaccctcagctttgggcaggacacactgtgccagaaccctccccatatgttccatgtgtccccatctcctcagcctcagtcacccaggctgaaaaggcttgtggggagcggctgacttccatctcctgccttgtgtaagaacctgagttccttgtaattaaatatcaactgaattacaaaaaaaag

SEQ ID NO: 300526 - DNA, 2929 bp, Homo sapiens
agcgggcgttacccgtttccgcctggacggggcgcgcgcggccttagaggcagctgctgttcagaggccgttccggccgccacagcccctccggggcgggaccggccagcggctgggtggccccccagggacacagctctacggggggcggcgagatggaggccataaccagtgagctgcgttctctacgggaggagatttccctgttagagcatgagaaagaaagcgaacttaaggaaatagaacaggaattgcatttggcccaggctgagatccagagtctgcggcaagcagcagaggattccgcaactgaacatgagagtgacatagcatccctgcaggaggatctctgccggatgcagaatgaacttgaagacatggaacgcattcggggagattatgagatggagatcgcctccctccgtgcagaaatggaaatgaagagctctgaaccatccggtagtttaggtctctcagattactctgggttacaagaagaactgcaggagctgcgggaacgctaccatttcctgaatgaggaataccgggccctgcaggagagcaacagcagcctcacggggcagcttgcagatctggagagtgagaggacacagagagcaacagagagatggctgcagtcccaaacactgagtatgacgtcagcagagtctcagacttcagaaatggatttcttagagcctgatcctgaaatgcagttgttacggcagcagctacgggatgctgaagagcagatgcatggcatgaagaacaagtgtcaggaattgtgttgtgagttggaagagctacagcatcatcgccaggtcagtgaggaggagcagaggcggctgcagagggagctcaagtgtgctcagaatgaggtgcttcggtttcagacctcccacagtgtcacccagaatgaggagctgaagtccagactctgtaccctgcagaaaaaatatgatactagccaggatgagcagaacgagctcttgaagatgcagctgcaacttcagactgagctccggcagctcaaagtcatgaaatccacacttgtagaaaaccagagtgagaaggagttactgtgccggctgcagaagctgcacctccagcaccagaacgtcacatgtgagaaggaaaagctgctggaacggcagcagcagctgcaggaggagctgcagtgccatgaggcagagctgcagcacctcagggatacggtggcctccttcaaagagagcaatgagaaggacacagagacgcacgctcagcttcaggagatgaagcagctgtaccaggccagcaaggacgagctggagcggcagaagcacatgtatgaccagctggagcaggacctcctgctctgccagctggagctgaaagagctcaaggcctcccaccccattccggaggacaaaggaaagtgtgctaataagtgtgacacactgctgtccagactgacagaattgcaggaaaagtacaaggccagccagaaggagatggggcagctgcagatggagcagtgtgagctcctggaggatcagaggaggatgcaggaggagcagggccagctgcaggaagagctgcacaggctcacactgccactgccaaagagtggcctcttactcaagagtcaggagctactcaccaagttagaagacctgtgtgagctgcagctgctctaccaaggcatgcaggaggaacagaagaagctgatacagaaccaagactgtgtattaaaagaacaattagagatccacgaagagctgcgacgtttcaaagagtctcatttccaggaagtgttggagaatcccgatgattccaaattggctaagtcctccaaatgtaatcgaaacaagcaatccaagctgctcatggagcagatgcaggccctgcaggtgatgtatgacgccggtcaggcgaagcaggagctcttgcagcaagagcaagggaggctcctagaggagcggaagaggctgcaggcagacttgcagctctgcctggaagaaatgcagctgcttcaagtccagtccccttctataaaaatgagccttgagtcctacgggaagagctatggtagcatggtccccagcaatgagaactgtcgcaagacttatgataccactgtggatgacaatgagagctattacaagagttacaccagcacccagaccagcagcaagagctttctcaagagctatgacagcagcaccagtgccagtgaggcctatgggaagagttactgcactaccagcaacagcagcattacctataagaagagttacggcagcaccagtagctctgacacctgccagaagagttttgtcagcagctgcactgacgaggaacctgctgagcctgaagacatggagcgctttgaggaaatggttgtgaaagtgctgatcaagctgcaggcggtgcaggccatgtaccagataagccaggaggaacacagccagctgcaagagcagatggaaaagttactggccaagcagaaagacctgaaggaagagctggatgcctgtgaaagggagttcaaggagtgcatggaatgccttgaaaagcccatggccccccagaacgacaagaatgaggaacatgtttgggttgtggaagcctatggtattcttggctattgcagctgtggctctgtatgtgttacccaacatgcgacagcaggagtcagagttctgcctcatggagtgatggcagaccttggccagcgcgagggcagatccccagtggccaccaccctcagctttgggcaggacacactgtgccagaaccctccccatatgttccatgtgtccccatctcctcagcctcagtcacccaggctgaaaaggcttgtggggagcggctgacttccatctcctgccttgtgtaagaacctgagttccttgtaattaaatatcaactgaattacaaaaaaaag

SEQ ID NO: 300527 - DNA, 3454 bp, Homo sapiens
tcagtcttggccctctcctccctgtccccccggactaaatacgcacaccccctctttctttctgtgcaagcaagagggtcctggaacagcgggttctgaggaggctgggaggcagggctgagaggtggccgagagagaggagtcgcagagccgccagagtgagtcaggcacctccactgggattacagatcccagagcctcgaggagctggaagacatgtccccttctttcctctgcaccccagcccgcagccagccccccaccccccagcccctcctttctccctgctctcaggacccacagtgaccactctaggctcctatgaggcttccgagggctgtgagaggaagaagggccaacgctgggggtccctggaacgacgggggatgcaagctatggagggggaggtgttactcccagctctctatgaggaggaagaggaagaggaagaggaggaagaagaggtggaagaagaagaagaacaagtgcagaaaggtggcagtgttggctctctgtcagtcaacaagcaccggggactgagcctcacggagacagagctggaggagctgcgggctcaggtgctgcagctggtggcagaactggaggagacccgggaactggcagggcagcatgaggatgactccttggagctacaggggctcctggaggatgaacggctagccagcgcccagcaggcagaggtgttcaccaagcagatccagcagctccaaggtgagctgcgttctctacgggaggagatttccctgttagagcatgagaaagaaagcgaacttaaggaaatagaacaggaattgcatttggcccaggctgagatccagagtctgcggcaagcagcagaggattccgcaactgaacatgagagtgacatagcatccctgcaggaggatctctgccggatgcagaatgaacttgaagacatggaacgcattcggggagattatgagatggagatcgcctccctccgtgcagaaatggaaatgaagagctctgaaccatccgaagaactgcaggagctgcgggaacgctaccatttcctgaatgaggaataccgggccctgcaggagagcaacagcagcctcacggggcagcttgcagatctggagagtgagaggacacagagagcaacagagagatggctgcagtcccaaacactgagtatgacgtcagcagagtctcagacttcagaaatggatttcttagagcctgatcctgaaatgcagttgttacggcagcagctacgggatgctgaagagcagatgcatggcatgaagaacaagtgtcaggaattgtgttgtgagttggaagagctacagcatcatcgccaggtcagtgaggaggagcagaggcggctgcagagggagctcaagtgtgctcagaatgaggtgcttcggtttcagacctcccacagtgtcacccagaatgaggagctgaagtccagactctgtaccctgcagaaaaaatatgatactagccaggatgagcagaacgagctcttgaagatgcagctgcaacttcagactgagctccggcagctcaaagtcatgaaatccacacttgtagaaaaccagagtgagaaggagttactgtgccggctgcagaagctgcacctccagcaccagaacgtcacatgtgagaaggaaaagctgctggaacggcagcagcagctgcaggaggagctgcagtgccatgaggcagagctgcagcacctcagggatacggtggcctccttcaaagagagcaatgagaaggacacagagacgcacgctcagcttcaggagatgaagcagctgtaccaggccagcaaggacgagctggagcggcagaagcacatgtatgaccagctggagcaggacctcctgctctgccagctggagctgaaagagctcaaggcctcccaccccattccggaggacaaaggaaagtgtgctaataagtgtgacacactgctgtccagactgacagaattgcaggaaaagtacaaggccagccagaaggagatggggcagctgcagatggagcagtgtgagctcctggaggatcagaggaggatgcaggaggagcagggccagctgcaggaagagctgcacaggctcacactgccactgccaaagagtggcctcttactcaagagtcaggagctactcaccaagttagaagacctgtgtgagctgcagctgctctaccaaggcatgcaggaggaacagaagaagctgatacagaaccaagactgtgtattaaaagaacaattagagatccacgaagagctgcgacgtttcaaagagtctcatttccaggaagtgttggagaatcccgatgattccaaattggctaagtcctccaaatgtaatcgaaacaagcaatccaagctgctcatggagcagatgcaggccctgcaggtgatgtatgacgccggtcaggcgaagcaggagctcttgcagcaagagcaagggaggctcctagaggagcggaagaggctgcaggcagacttgcagctctgcctggaagaaatgcagctgcttcaagtccagtccccttctataaaaatgagccttgagtcctacgggaagagctatggtagcatggtccccagcaatgagaactgtcgcaagacttatgataccactgtggatgacaatgagagctattacaagagttacaccagcacccagaccagcagcaagagctttctcaagagctatgacagcagcaccagtgccagtgaggcctatgggaagagttactgcactaccagcaacagcagcattacctataagaagagttacggcagcaccagtagctctgacacctgccagaagagttttgtcagcagctgcactgacgaggaacctgctgagcctgaagacatggagcgctttgaggaaatggttgtgaaagtgctgatcaagctgcaggcggtgcaggccatgtaccagataagccaggaggaacacagccagctgcaagagcagatggaaaagttactggccaagcagaaagacctgaaggaagagctggatgcctgtgaaagggagttcaaggagtgcatggaatgccttgaaaagcccatggccccccagaacgacaagaatgaggaacatgtttgggttgtggaagcctatggtattcttggctattgcagctgtggctctgtatgtgttacccaacatgcgacagcaggagtcagagttctgcctcatggagtgatggcagaccttggccagcgcgagggcagatccccagtggccaccaccctcagctttgggcaggacacactgtgccagaaccctccccatatgttccatgtgtccccatctcctcagcctcagtcacccaggctgaaaaggcttgtggggagcggctgacttccatctcctgccttgtgtaagaacctgagttccttgtaattaaatatcaactgaattacaaaaaaaag

SEQ ID NO: 300528 - DNA, 3449 bp, Homo sapiens
tcagtcttggccctctcctccctgtccccccggactaaatacgcacaccccctctttctttctgtgcaagcaagagggtcctggaacagcgggttctgaggaggctgggaggcagggctgagaggtggccgagagagaggagtcgcagagccgccagagtgagtcaggcacctccactgggattacagatcccagagcctcgaggagctggaagacatgtccccttctttcctctgcaccccagcccgcagccagccccccaccccccagcccctcctttctccctgctctcaggacccacagtgaccactctaggctcctatgaggcttccgagggctgtgagaggaagaagggccaacgctgggggtccctggaacgacgggggatgcaagctatggagggggaggtgttactcccagctctctatgaggaggaagaggaagaggaagaggaggaagaagaggtggaagaagaagaagaacaagtgcagaaaggtggcagtgttggctctctgtcagtcaacaagcaccggggactgagcctcacggagacagagctggaggagctgcgggctcaggtgctgcagctggtggcagaactggaggagacccgggaactggcagggcagcatgaggatgactccttggagctacaggggctcctggaggatgaacggctagccagcgcccagcaggcagaggtgttcaccaagcagatccagcagctccaaggtgagctgcgttctctacgggaggagatttccctgttagagcatgagaaagaaagcgaacttaaggaaatagaacaggaattgcatttggcccaggctgagatccagagtctgcggcaagcagcagaggattccgcaactgaacatgagagtgacatagcatccctgcaggaggatctctgccggatgcagaatgaacttgaagacatggaacgcattcggggagattatgagatggagatcgcctccctccgtgcagaaatggaaatgaagagctctgaaccatccggtagtttaggtctctcagattactctgggttacaagaagaactgcaggagctgcgggaacgctaccatttcctgaatgaggaataccgggccctgcaggagagcaacagcagcctcacggggcagcttgcagatctggagagtgagagtgagtatgacgtcagcagagtctcagacttcagaaatggatttcttagagcctgatcctgaaatgcagttgttacggcagcagctacgggatgctgaagagcagatgcatggcatgaagaacaagtgtcaggaattgtgttgtgagttggaagagctacagcatcatcgccaggtcagtgaggaggagcagaggcggctgcagagggagctcaagtgtgctcagaatgaggtgcttcggtttcagacctcccacagtgtcacccagaatgaggagctgaagtccagactctgtaccctgcagaaaaaatatgatactagccaggatgagcagaacgagctcttgaagatgcagctgcaacttcagactgagctccggcagctcaaagtcatgaaatccacacttgtagaaaaccagagtgagaaggagttactgtgccggctgcagaagctgcacctccagcaccagaacgtcacatgtgagaaggaaaagctgctggaacggcagcagcagctgcaggaggagctgcagtgccatgaggcagagctgcagcacctcagggatacggtggcctccttcaaagagagcaatgagaaggacacagagacgcacgctcagcttcaggagatgaagcagctgtaccaggccagcaaggacgagctggagcggcagaagcacatgtatgaccagctggagcaggacctcctgctctgccagctggagctgaaagagctcaaggcctcccaccccattccggaggacaaaggaaagtgtgctaataagtgtgacacactgctgtccagactgacagaattgcaggaaaagtacaaggccagccagaaggagatggggcagctgcagatggagcagtgtgagctcctggaggatcagaggaggatgcaggaggagcagggccagctgcaggaagagctgcacaggctcacactgccactgccaaagagtggcctcttactcaagagtcaggagctactcaccaagttagaagacctgtgtgagctgcagctgctctaccaaggcatgcaggaggaacagaagaagctgatacagaaccaagactgtgtattaaaagaacaattagagatccacgaagagctgcgacgtttcaaagagtctcatttccaggaagtgttggagaatcccgatgattccaaattggctaagtcctccaaatgtaatcgaaacaagcaatccaagctgctcatggagcagatgcaggccctgcaggtgatgtatgacgccggtcaggcgaagcaggagctcttgcagcaagagcaagggaggctcctagaggagcggaagaggctgcaggcagacttgcagctctgcctggaagaaatgcagctgcttcaagtccagtccccttctataaaaatgagccttgagtcctacgggaagagctatggtagcatggtccccagcaatgagaactgtcgcaagacttatgataccactgtggatgacaatgagagctattacaagagttacaccagcacccagaccagcagcaagagctttctcaagagctatgacagcagcaccagtgccagtgaggcctatgggaagagttactgcactaccagcaacagcagcattacctataagaagagttacggcagcaccagtagctctgacacctgccagaagagttttgtcagcagctgcactgacgaggaacctgctgagcctgaagacatggagcgctttgaggaaatggttgtgaaagtgctgatcaagctgcaggcggtgcaggccatgtaccagataagccaggaggaacacagccagctgcaagagcagatggaaaagttactggccaagcagaaagacctgaaggaagagctggatgcctgtgaaagggagttcaaggagtgcatggaatgccttgaaaagcccatggccccccagaacgacaagaatgaggaacatgtttgggttgtggaagcctatggtattcttggctattgcagctgtggctctgtatgtgttacccaacatgcgacagcaggagtcagagttctgcctcatggagtgatggcagaccttggccagcgcgagggcagatccccagtggccaccaccctcagctttgggcaggacacactgtgccagaaccctccccatatgttccatgtgtccccatctcctcagcctcagtcacccaggctgaaaaggcttgtggggagcggctgacttccatctcctgccttgtgtaagaacctgagttccttgtaattaaatatcaactgaattacaaaaaaaag

SEQ ID NO: 300529 - DNA, 3348 bp, Homo sapiens
agcgggcgttacccgtttccgcctggacggggcgcgcgcggccttagaggcagctgctgttcagaggccgttccggccgccacagcccctccggggcgggaccggccagcggctgggtggccccccagggacacagctctacggggggcggcgagatggaggccataaccagtgagctgcgttctctacgggaggagatttccctgttagagcatgagaaagaaagcgaacttaaggaaatagaacaggaattgcatttggcccaggctgagatccagagtctgcggcaagcagcagaggattccgcaactgaacatgagagtgacatagcatccctgcaggaggatctctgccggatgcagaatgaacttgaagacatggaacgcattcggggagattatgagatggagatcgcctccctccgtgcagaaatggaaatgaagagctctgaaccatccggtagtttaggtctctcagattactctgggttacaagaagaactgcaggagctgcgggaacgctaccatttcctgaatgaggaataccgggccctgcaggagagcaacagcagcctcacggggcagcttgcagatctggagagtgagaggacacagagagcaacagagagatggctgcagtcccaaacactgagtatgacgtcagcagagtctcagacttcagaaatggatttcttagagcctgatcctgaaatgcagttgttacggcagcagctacgggatgctgaagagcagatgcatggcatgaagaacaagtgtcaggaattgtgttgtgagttggaagagctacagcatcatcgccaggtcagtgaggaggagcagaggcggctgcagagggagctcaagtgtgctcagaatgaggtgcttcggtttcagacctcccacagtgtcacccagaatgaggagctgaagtccagactctgtaccctgcagaaaaaatatgatactagccaggatgagcagaacgagctcttgaagatgcagctgcaacttcagactgagctccggcagctcaaagtcatgaaatccacacttgtagaaaaccagagtgagaaggagttactgtgccggctgcagaagctgcacctccagcaccagaacgtcacatgtgagaaggaaaagctgctggaacggcagcagcagctgcaggaggagctgcagtgccatgaggcagagctgcagcacctcagggatacggtggcctccttcaaagagagcaatgagaaggacacagagacgcacgctcagcttcaggagatgaagcagctgtaccaggccagcaaggacgagctggagcggcagaagcacatgtatgaccagctggagcaggacctcctgctctgccagctggagctgaaagagctcaaggcctcccaccccattccggaggacaaaggaaagtgtgctaataagtgtgacacactgctgtccagactgacagaattgcaggaaaagtacaaggccagccagaaggagatggggcagctgcagatggagcagtgtgagctcctggaggatcagaggaggatgcaggaggagcagggccagctgcaggaagagctgcacaggctcacactgccactgccaaagagtggcctcttactcaagagtcaggagctactcaccaagttagaagacctgtgtgagctgcagctgctctaccaaggcatgcaggaggaacagaagaagctgatacagaaccaagactgtgtattaaaagaacaattagagatccacgaagagctgcgacgtttcaaagagtctcatttccaggaagtgttggagaatcccgatgattccaaattggctaagtcctccaaatgtaatcgaaacaagcaatccaagctgctcatggagcagatgcaggccctgcaggtgatgtatgacgccggtcaggcgaagcaggagctcttgcagcaagagcaagggaggctcctagaggagcggaagaggctgcaggcagacttgcagctctgcctggaagaaatgcagctgcttcaagtccagtccccttctataaaaatgagccttgagtcctacgggaagagctatggtagcatggtccccagcaatgagaactgtcgcaagacttatgataccactgtggatgacaatgagagctattacaagagttacaccagcacccagaccagcagcaagagctttctcaagagctatgacagcagcaccagtgccagtgaggcctatgggaagagttactgcactaccagcaacagcagcattacctataagaagagttacggcagcaccagtagctctgacacctgccagaagagttttgtcagcagctgcactgacgaggaacctgctgagcctgaagacatggagcgctttgaggaaatggttgtgaaagtgctgatcaagctgcaggcggtgcaggccatgtaccagataagccaggaggaacacagccagctgcaagagcagatggaaaagttactggccaagcagaaagacctgaaggaagagctggatgcctgtgaaagggagttcaaggagtgcatggaatgccttgaaaagcccatggccccccagaacgacaagaatgagatcaaagaactgcagaccaagctgcgggagctgcagctgcaataccaggctagcatggatgagcaggggcggcttctggtagtgcaggagcagctggaggggcagctgcagtgctgccaggaggagctccgccagctcagggagaagaggccttctgttgtcaaagaagcccgggggaagaatgctaataagaacatgaacaagaatgccaatggggttaaaatgaaaaaggtgaccaagccatgctcggatacttctgagagcgaccttgagaccagaaagaagatcaggaggaaaatgaagaggacaaagaggaagaggagaaggaagaagacagtgaagaggaggaggatgacgccgactcttcccttgaaagtcccgaagaaaataaccccctcagactttccgagagcaaaaaggaacatgtttgggttgtggaagcctatggtattcttggctattgcagctgtggctctgtatgtgttacccaacatgcgacagcaggagtcagagttctgcctcatggagtgatggcagaccttggccagcgcgagggcagatccccagtggccaccaccctcagctttgggcaggacacactgtgccagaaccctccccatatgttccatgtgtccccatctcctcagcctcagtcacccaggctgaaaaggcttgtggggagcggctgacttccatctcctgccttgtgtaagaacctgagttccttgtaattaaatatcaactgaattacaaaaaaaag

SEQ ID NO: 300530 - DNA, 1720 bp, Homo sapiens
agcgggcgttacccgtttccgcctggacggggcgcgcgcggccttagaggcagctgctgttcagaggccgttccggccgccacagcccctccggggcgggaccggccagcggctgggtggccccccagggacacagctctacggggggcggcgagatggaggccataaccagtgagctgcgttctctacgggaggagatttccctgttagagcatgagaaagaaagcgaacttaaggaaatagaacaggaattgcatttggcccaggctgagatccagagtctgcggcaagcagcagaggattccgcaactgaacatgagagtgacatagcatccctgcaggaggatctctgccggatgcagaatgaacttgaagacatggaacgcattcggggagattatgagatggagatcgcctccctccgtgcagaaatggaaatgaagagctctgaaccatccggtagtttaggtctctcagattactctgggttacaagaagaactgcaggagctgcgggaacgctaccatttcctgaatgaggaataccgggccctgcaggagagcaacagcagcctcacggggcagcttgcagatctggagagtgagaggacacagagagcaacagagagatggctgcagtcccaaacactgagtatgacgtcagcagagtctcagacttcagaaatggatttcttagagcctgatcctgaaatgcagttgttacggcagcagctacgggatgctgaagagcagatgcatggcatgaagaacaagtgtcaggaattgtgttgtgagttggaagagctacagcatcatcgccaggtcagtgaggaggagcagaggcggctgcagagggagctcaagtgtgctcagaatgaggtgcttcggtttcagacctcccacagtgtcacccaggagttactgtgccggctgcagaagctgcacctccagcaccagaacgtcacatgtgagaaggaaaagctgctggaacggcagcagcagctgcaggaggagctgcagtgccatgaggcagagctgcagcacctcagggatacggtggcctccttcaaagagagcaatgagaaggacacagagacgcacgctcagcttcaggagatgaagcagctgtaccaggccagcaaggacgagctggagcggcagaagcacatgtatgaccagctggagcaggacctcctgctctgccagctggagctgaaagagctcaaggcctcccaccccattccggaggacaaaggaaagtgtgctaataagtcatcccctacccccaaatccccccatcttctccttgcctcttgtaggcctggtggtcatctcggctttgctctggtgctggtgggctgagacgtcgtcctaatgcaggaacatgtttgggttgtggaagcctatggtattcttggctattgcagctgtggctctgtatgtgttacccaacatgcgacagcaggagtcagagttctgcctcatggagtgatggcagaccttggccagcgcgagggcagatccccagtggccaccaccctcagctttgggcaggacacactgtgccagaaccctccccatatgttccatgtgtccccatctcctcagcctcagtcacccaggctgaaaaggcttgtggggagcggctgacttccatctcctgccttgtgtaagaacctgagttccttgtaattaaatatcaactgaattacaaaaaaaag

SEQ ID NO: 300531 - DNA, 1363 bp, Homo sapiens
agcgggcgttacccgtttccgcctggacggggcgcgcgcggccttagaggcagctgctgttcagaggccgttccggccgccacagcccctccggggcgggaccggccagcggctgggtggccccccagggacacagctctacggggggcggcgagatggaggccataaccagtgagctgcgttctctacgggaggagatttccctgttagagcatgagaaagaaagcgaacttaaggaaatagaacaggaattgcatttggcccaggctgagatccagagtctgcggcaagcagcagaggattccgcaactgaacatgagagtgacatagcatccctgcaggaggatctctgccggatgcagaatgaacttgaagacatggaacgcattcggggagattatgagatggagatcgcctccctccgtgcagaaatggaaatgaagagctctgaaccatccggtagtttaggtctctcagattactctgggttacaagaagaactgcaggagctgcgggaacgctaccatttcctgaatgaggaataccgggccctgcaggagagcaacagcagcctcacggggcagcttgcagatctggagagtgagaggacacagagagcaacagagagatggctgcagtcccaaacactgagtatgacgtcagcagagtctcagacttcagaaatggatttcttagagcctgatcctgaaatgcagttgttacggcagcagctacgggatgctgaagagcagatgcatggcatgaagaacaagtgtcaggaattgtgttgtgagttggaagagctacagcatcatcgccaggtcagtgaggaggagcagaggcggctgcagagggagctcaagtgtgctcagaatgaggtgcttcggtttcagacctcccacagtgtcacccagtcatcccctacccccaaatccccccatcttctccttgcctcttgtaggcctggtggtcatctcggctttgctctggtgctggtgggctgagacgtcgtcctaatgcaggaacatgtttgggttgtggaagcctatggtattcttggctattgcagctgtggctctgtatgtgttacccaacatgcgacagcaggagtcagagttctgcctcatggagtgatggcagaccttggccagcgcgagggcagatccccagtggccaccaccctcagctttgggcaggacacactgtgccagaaccctccccatatgttccatgtgtccccatctcctcagcctcagtcacccaggctgaaaaggcttgtggggagcggctgacttccatctcctgccttgtgtaagaacctgagttccttgtaattaaatatcaactgaattacaaaaaaaag

SEQ ID NO: 300532 - DNA, 3379 bp, Homo sapiens
agcgggcgttacccgtttccgcctggacggggcgcgcgcggccttagaggcagctgctgttcagaggccgttccggccgccacagcccctccggggcgggaccggccagcggctgggtggccccccagggacacagctctacggggggcggcgagatggaggccataaccagtgagctgcgttctctacgggaggagatttccctgttagagcatgagaaagaaagcgaacttaaggaaatagaacaggaattgcatttggcccaggctgagatccagagtctgcggcaagcagcagaggattccgcaactgaacatgagagtgacatagcatccctgcaggaggatctctgccggatgcagaatgaacttgaagacatggaacgcattcggggagattatgagatggagatcgcctccctccgtgcagaaatggaaatgaagagctctgaaccatccggtagtttaggtctctcagattactctgggttacaagaagaactgcaggagctgcgggaacgctaccatttcctgaatgaggaataccgggccctgcaggagagcaacagcagcctcacggggcagcttgcagatctggagagtgagaggacacagagagcaacagagagatggctgcagtcccaaacactgagtatgacgtcagcagagtctcagacttcagaaatggatttcttagagcctgatcctgaaatgcagttgttacggcagcagctacgggatgctgaagagcagatgcatggcatgaagaacaagtgtcaggaattgtgttgtgagttggaagagctacagcatcatcgccaggtcagtgaggaggagcagaggcggctgcagagggagctcaagtgtgctcagaatgaggtgcttcggtttcagacctcccacagtgtcacccagaatgaggagctgaagtccagactctgtaccctgcagaaaaaatatgatactagccaggatgagcagaacgagctcttgaagatgcagctgcaacttcagactgagctccggcagctcaaagtcatgaaatccacacttgtagaaaaccagagtgagaaggagttactgtgccggctgcagaagctgcacctccagcaccagaacgtcacatgtgagaaggaaaagctgctggaacggcagcagcagctgcaggaggagctgcagtgccatgaggcagagctgcagcacctcagggatacggtggcctccttcaaagagagcaatgagaaggacacagagacgcacgctcagcttcaggagatgaagcagctgtaccaggccagcaaggacgagctggagcggcagaagcacatgtatgaccagctggagcaggacctcctgctctgccagctggagctgaaagagctcaaggcctcccaccccattccggaggacaaaggaaagtgtgctaataagtgtgacacactgctgtccagactgacagaattgcaggaaaagtacaaggccagccagaaggagatggggcagctgcagatggagcagtgtgagctcctggaggatcagaggaggatgcaggaggagcagggccagctgcaggaagagctgcacaggctcacactgccactgccaaagagtggcctcttactcaagagtcaggagctactcaccaagttagaagacctgtgtgagctgcagctgctctaccaaggcatgcaggaggaacagaagaagctgatacagaaccaagactgtgtattaaaagaacaattagagatccacgaagagctgcgacgtttcaaagagtctcatttccaggaagtgttggagaatcccgatgattccaaattggctaagtcctccaaatgtaatcgaaacaagcaatccaagctgctcatggagcagatgcaggccctgcaggtgatgtatgacgccggtcaggcgaagcaggagctcttgcagcaagagcaagggaggctcctagaggagcggaagaggctgcaggcagacttgcagctctgcctggaagaaatgcagctgcttcaagtccagtccccttctataaaaatgagccttgagtcctacgggaagagctatggtagcatggtccccagcaatgagaactgtcgcaagacttatgataccactgtggatgacaatgagagctattacaagagttacaccagcacccagaccagcagcaagagctttctcaagagctatgacagcagcaccagtgccagtgaggcctatgggaagagttactgcactaccagcaacagcagcattacctataagaagagttacggcagcaccagtagctctgacacctgccagaagagttttgtcagcagctgcactgacgaggaacctgctgagcctgaagacatggagcgctttgaggaaatggttgtgaaagtgctgatcaagctgcaggcggtgcaggccatgtaccagataagccaggaggaacacagccagctgcaagagcagatggaaaagttactggccaagcagaaagacctgaaggaagagctggatgcctgtgaaagggagttcaaggagtgcatggaatgccttgaaaagcccatggccccccagaacgacaagaatgagatcaaagaactgcagaccaagctgcgggagctgcagctgcaataccaggctagcatggatgagcaggggcggcttctggtagtgcaggagcagctggaggggcagctgcagtgctgccaggaggagctccgccagctcagggagaagaggccttctgttgtcaaagaagcccgggggaagaatgctaataagaacatgaacaagaatgccaatggggttaaaatgaaaaaggtgaccaagccatgctcggatacttctgagagcgaccttgagaccagaaagagtctggaggtagtgctgtactacaaggccagccagaggaaattagatggactagcaaaagaggaggaaaagaaagaggagatggaggaggaaaaaaaggaagtgaaagaggaagcaaaggagcagtgtggggatgagctagttgctgagccagcagatcctgaggaagctaaatccacagaagatcaggaggaaaatgaagaggacaaagaggaagaggagaaggaagaagacagtgaagaggaggaggatgacgccgactcttcccttgaaagtcccgaagaaaataaccccctcagactttccgagagcaaaaaggtaaccagagccaaagcctagatcaagtgggaagtggggtcttgggctcagataactccgagttaatgggtggccctgccaaggatggatatctccaggagtggaggcctcgcgctctaaggcacaacccttcggggaggtggagatgcagaagtgggagatgagagcagtctgtctgcacgaaatcatgg

SEQ ID NO: 300533 - DNA, 3298 bp, Homo sapiens
agcgggcgttacccgtttccgcctggacggggcgcgcgcggccttagaggcagctgctgttcagaggccgttccggccgccacagcccctccggggcgggaccggccagcggctgggtggccccccagggacacagctctacggggggcggcgagatggaggccataaccagtgagctgcgttctctacgggaggagatttccctgttagagcatgagaaagaaagcgaacttaaggaaatagaacaggaattgcatttggcccaggctgagatccagagtctgcggcaagcagcagaggattccgcaactgaacatgagagtgacatagcatccctgcaggaggatctctgccggatgcagaatgaacttgaagacatggaacgcattcggggagattatgagatggagatcgcctccctccgtgcagaaatggaaatgaagagctctgaaccatccggtagtttaggtctctcagattactctgggttacaagaagaactgcaggagctgcgggaacgctaccatttcctgaatgaggaataccgggccctgcaggagagcaacagcagcctcacggggcagcttgcagatctggagagtgagaggacacagagagcaacagagagatggctgcagtcccaaacactgagtatgacgtcagcagagtctcagacttcagaaatggatttcttagagcctgatcctgaaatgcagttgttacggcagcagctacgggatgctgaagagcagatgcatggcatgaagaacaagtgtcaggaattgtgttgtgagttggaagagctacagcatcatcgccaggtcagtgaggaggagcagaggcggctgcagagggagctcaagtgtgctcagaatgaggtgcttcggtttcagacctcccacagtgtcacccagaatgaggagctgaagtccagactctgtaccctgcagaaaaaatatgatactagccaggatgagcagaacgagctcttgaagatgcagctgcaacttcagactgagctccggcagctcaaagtcatgaaatccacacttgtagaaaaccagagtgagaaggagttactgtgccggctgcagaagctgcacctccagcaccagaacgtcacatgtgagaaggaaaagctgctggaacggcagcagcagctgcaggaggagctgcagtgccatgaggcagagctgcagcacctcagggatacggtggcctccttcaaagagagcaatgagaaggacacagagacgcacgctcagcttcaggagatgaagcagctgtaccaggccagcaaggacgagctggagcggcagaagcacatgtatgaccagctggagcaggacctcctgctctgccagctggagctgaaagagctcaaggcctcccaccccattccggaggacaaaggaaagtgtgctaataagtgtgacacactgctgtccagactgacagaattgcaggaaaagtacaaggccagccagaaggagatggggcagctgcagatggagcagtgtgagctcctggaggatcagaggaggatgcaggaggagcagggccagctgcaggaagagctgcacaggctcacactgccactgccaaagagtggcctcttactcaagagtcaggagctactcaccaagttagaagacctgtgtgagctgcagctgctctaccaaggcatgcaggaggaacagaagaagctgatacagaaccaagactgtgtattaaaagaacaattagagatccacgaagagctgcgacgtttcaaagagtctcatttccaggaagtgttggagaatcccgatgattccaaattggctaagtcctccaaatgtaatcgaaacaagcaatccaagctgctcatggagcagatgcaggccctgcaggtgatgtatgacgccggtcaggcgaagcaggagctcttgcagcaagagcaagggaggctcctagaggagcggaagaggctgcaggcagacttgcagctctgcctggaagaaatgcagctgcttcaagtccagtccccttctataaaaatgagccttgagtcctacgggaagagctatggtagcatggtccccagcaatgagaactgtcgcaagacttatgataccactgtggatgacaatgagagctattacaagagttacaccagcacccagaccagcagcaagagctttctcaagagctatgacagcagcaccagtgccagtgaggcctatgggaagagttactgcactaccagcaacagcagcattacctataagaagagttacggcagcaccagtagctctgacacctgccagaagagttttgtcagcagctgcactgacgaggaacctgctgagcctgaagacatggagcgctttgaggaaatggttgtgaaagtgctgatcaagctgcaggcggtgcaggccatgtaccagataagccaggaggaacacagccagctgcaagagcagatggaaaagttactggccaagcagaaagacctgaaggaagagctggatgcctgtgaaagggagttcaaggagtgcatggaatgccttgaaaagcccatggccccccagaacgacaagaatgagatcaaagaactgcagaccaagctgcgggagctgcagctgcaataccaggctagcatggatgagcaggggcggcttctggtagtgcaggagcagctggaggggcagctgcagtgctgccaggaggagctccgccagctcagggagaagaggccttctgttgtcaaagaagcccgggggaagaatgctaataagaacatgaacaagaatgccaatggggttaaaatgaaaaaggtgaccaagccatgctcggatacttctgagagcgaccttgagaccagaaagagtctggaggtagtgctgtactacaaggccagccagaggaaattagatggactagcaaaagaggaggaaaagaaagaggagatggaggaggaaaaaaaggaagtgaaagaggaagcaaaggagcagtgtggggatgagctagttgctgagccagcagatcctgaggaagctaaatccacagaagatcaggaggaaaatgaagaggacaaagaggaagaggagaaggaagaagacatggccaccaccctcagctttgggcaggacacactgtgccagaaccctccccatatgttccatgtgtccccatctcctcagcctcagtcacccaggctgaaaaggcttgtggggagcggctgacttccatctcctgccttgtgtaagaacctgagttccttgtaattaaatatcaactgaattacaaaaaaaag

SEQ ID NO: 300534 - DNA, 3494 bp, Homo sapiens
agcgggcgttacccgtttccgcctggacggggcgcgcgcggccttagaggcagctgctgttcagaggccgttccggccgccacagcccctccggggcgggaccggccagcggctgggtggccccccagggacacagctctacggggggcggcgagatggaggccataaccagtgagctgcgttctctacgggaggagatttccctgttagagcatgagaaagaaagcgaacttaaggaaatagaacaggaattgcatttggcccaggctgagatccagagtctgcggcaagcagcagaggattccgcaactgaacatgagagtgacatagcatccctgcaggaggatctctgccggatgcagaatgaacttgaagacatggaacgcattcggggagattatgagatggagatcgcctccctccgtgcagaaatggaaatgaagagctctgaaccatccggtagtttaggtctctcagattactctgggttacaagaagaactgcaggagctgcgggaacgctaccatttcctgaatgaggaataccgggccctgcaggagagcaacagcagcctcacggggcagcttgcagatctggagagtgagaggacacagagagcaacagagagatggctgcagtcccaaacactgagtatgacgtcagcagagtctcagacttcagaaatggatttcttagagcctgatcctgaaatgcagttgttacggcagcagctacgggatgctgaagagcagatgcatggcatgaagaacaagtgtcaggaattgtgttgtgagttggaagagctacagcatcatcgccaggtcagtgaggaggagcagaggcggctgcagagggagctcaagtgtgctcagaatgaggtgcttcggtttcagacctcccacagtgtcacccagaatgaggagctgaagtccagactctgtaccctgcagaaaaaatatgatactagccaggatgagcagaacgagctcttgaagatgcagctgcaacttcagactgagctccggcagctcaaagtcatgaaatccacacttgtagaaaaccagagtgagaaggagttactgtgccggctgcagaagctgcacctccagcaccagaacgtcacatgtgagaaggaaaagctgctggaacggcagcagcagctgcaggaggagctgcagtgccatgaggcagagctgcagcacctcagggatacggtggcctccttcaaagagagcaatgagaaggacacagagacgcacgctcagcttcaggagatgaagcagctgtaccaggccagcaaggacgagctggagcggcagaagcacatgtatgaccagctggagcaggacctcctgctctgccagctggagctgaaagagctcaaggcctcccaccccattccggaggacaaaggaaagtgtgctaataagtgtgacacactgctgtccagactgacagaattgcaggaaaagtacaaggccagccagaaggagatggggcagctgcagatggagcagtgtgagctcctggaggatcagaggaggatgcaggaggagcagggccagctgcaggaagagctgcacaggctcacactgccactgccaaagagtggcctcttactcaagagtcaggagctactcaccaagttagaagacctgtgtgagctgcagctgctctaccaaggcatgcaggaggaacagaagaagctgatacagaaccaagactgtgtattaaaagaacaattagagatccacgaagagctgcgacgtttcaaagagtctcatttccaggaagtgttggagaatcccgatgattccaaattggctaagtcctccaaatgtaatcgaaacaagcaatccaagctgctcatggagcagatgcaggccctgcaggtgatgtatgacgccggtcaggcgaagcaggagctcttgcagcaagagcaagggaggctcctagaggagcggaagaggctgcaggcagacttgcagctctgcctggaagaaatgcagctgcttcaagtccagtccccttctataaaaatgagccttgagtcctacgggaagagctatggtagcatggtccccagcaatgagaactgtcgcaagacttatgataccactgtggatgacaatgagagctattacaagagttacaccagcacccagaccagcagcaagagctttctcaagagctatgacagcagcaccagtgccagtgaggcctatgggaagagttactgcactaccagcaacagcagcattacctataagaagagttacggcagcaccagtagctctgacacctgccagaagagttttgtcagcagctgcactgacgaggaacctgctgagcctgaagacatggagcgctttgaggaaatggttgtgaaagtgctgatcaagctgcaggcggtgcaggccatgtaccagataagccaggaggaacacagccagctgcaagagcagatggaaaagttactggccaagcagaaagacctgaaggaagagctggatgcctgtgaaagggagttcaaggagtgcatggaatgccttgaaaagcccatggccccccagaacgacaagaatgagatcaaagaactgcagaccaagctgcgggagctgcagctgcaataccaggctagcatggatgagcaggggcggcttctggtagtgcaggagcagctggaggggcagctgcagtgctgccaggaggagctccgccagctcagggagaagaggccttctgttgtcaaagaagcccgggggaagaatgctaataagaacatgaacaagaatgccaatggggttaaaatgaaaaaggtgaccaagccatgctcggatacttctgagagcgaccttgagaccagaaagagtctggaggtagtgctgtactacaaggccagccagaggaaattagatggactagcaaaagaggaggaaaagaaagaggagatggaggaggaaaaaaaggaagtgaaagaggaagcaaaggagcagtgtggggatgagctagttgctgagccagcagatcctgaggaagctaaatccacagaagatcaggaggaaaatgaagaggacaaagaggaagaggagaaggaagaagacagtgaagaggaggaggatgacgccgactcttcccttgaaagtcccgaagaaaataaccccctcagactttccgagagcaaaaagtcatcccctacccccaaatccccccatcttctccttgcctcttgtaggcctggtggtcatctcggctttgctctggtgctggtgggctgagacgtcgtcctaatgcaggtactggtattgcttcctctccttctgagggatagagggagggtgcaggttgccctggcctctcctctttcccttttctcccagctgcttgcttcttgcttgtgccattttataataggtgatgctcaggtctgagttttagttctgacttttccttgggctactgcaaagcctctgacatctctgagcatgtcttcg

SEQ ID NO: 300535 - DNA, 2797 bp, Homo sapiens
agcgggcgttacccgtttccgcctggacggggcgcgcgcggccttagaggcagctgctgttcagaggccgttccggccgccacagcccctccggggcgggaccggccagcggctgggtggccccccagggacacagctctacggggggcggcgagatggaggccataaccagtgagctgcgttctctacgggaggagatttccctgttagagcatgagaaagaaagcgaacttaaggaaatagaacaggaattgcatttggcccaggctgagatccagagtctgcggcaagcagcagaggattccgcaactgaacatgagagtgacatagcatccctgcaggaggatctctgccggatgcagaatgaacttgaagacatggaacgcattcggggagattatgagatggagatcgcctccctccgtgcagaaatggaaatgaagagctctgaaccatccggtagtttaggtctctcagattactctgggttacaagaagaactgcaggagctgcgggaacgctaccatttcctgaatgaggaataccgggccctgcaggagagcaacagcagcctcacggggcagcttgcagatctggagagtgagaggacacagagagcaacagagagatggctgcagtcccaaacactgagtatgacgtcagcagagtctcagacttcagaaatggatttcttagagcctgatcctgaaatgcagttgttacggcagcagctacgggatgctgaagagcagatgcatggcatgaagaacaagtgtcaggaattgtgttgtgagttggaagagctacagcatcatcgccaggtcagtgaggaggagcagaggcggctgcagagggagctcaagtgtgctcagaatgaggtgcttcggtttcagacctcccacagtgtcacccagaatgaggagctgaagtccagactctgtaccctgcagaaaaaatatgatactagccaggatgagcagaacgagctcttgaagatgcagctgcaacttcagactgagctccggcagctcaaagtcatgaaatccacacttgtagaaaaccagagtgagaaggagttactgtgccggctgcagaagctgcacctccagcaccagaacgtcacatgtgagaaggaaaagctgctggaacggcagcagcagctgcaggaggagctgcagtgccatgaggcagagctgcagcacctcagggatacggtggcctccttcaaagagagcaatgagaaggacacagagacgcacgctcagcttcaggagatgaagcagctgtaccaggccagcaaggacgagctggagcggcagaagcacatgtatgaccagctggagcaggacctcctgctctgccagctggagctgaaagagctcaaggcctcccaccccattccggaggacaaaggaaagtgtgctaataagtgtgacacactgctgtccagactgacagaattgcaggaaaagtacaaggccagccagaaggagatggggcagctgcagatggagcagtgtgagctcctggaggatcagaggaggatgcaggaggagcagggccagctgcaggaagagctgcacaggctcacactgccactgccaaagagtggcctcttactcaagagtcaggagctactcaccaagttagaagacctgtgtgagctgcagctgctctaccaaggcatgcaggaggaacagaagaagctgatacagaaccaagactgtgtattaaaagaacaattagagatccacgaagagctgcgacgtttcaaagagtctcatttccaggaagtgttggagaatcccgatgattccaaattggctaagtcctccaaatgtaatcgaaacaagcaatccaagctgctcatggagcagatgcaggccctgcaggtgatgtatgacgccggtcaggcgaagcaggagctcttgcagcaagagcaagggaggctcctagaggagcggaagaggctgcaggcagacttgcagctctgcctggaagaaatgcagctgcttcaagtccagtccccttctataaaaatgagccttgagtcctacgggaagagctatggtagcatggtccccagcaatgagaactgtcgcaagacttatgataccactgtggatgacaatgagagctattacaagagttacaccagcacccagaccagcagcaagagctttctcaagagctatgacagcagcaccagtgccagtgaggcctatgggaagagttactgcactaccagcaacagcagcattacctataagaagagttacggcagcaccagtagctctgacacctgccagaagagttttgtcagcagctgcactgacgaggaacctgctgagcctgaagacatggagcgctttgaggaaatggttgtgaaagtgctgatcaagctgcaggcggtgcaggccatgtaccagataagccaggaggaacacagccagctgcaagagcagatggaaaagttactggccaagcagaaagacctgaaggaagagctagttgctgagccagcagatcctgaggaagctaaatccacagaagatcaggaggaaaatgaagaggacaaagaggaagaggagaaggaagaagacatggccaccaccctcagctttgggcaggacacactgtgccagaaccctccccatatgttccatgtgtccccatctcctcagcctcagtcacccaggctgaaaaggcttgtggggagcggctgacttccatctcctgccttgtgtaagaacctgagttccttgtaattaaatatcaactgaattacaaaaaaaag

SEQ ID NO: 300536 - DNA, 1734 bp, Homo sapiens
agcgggcgttacccgtttccgcctggacggggcgcgcgcggccttagaggcagctgctgttcagaggccgttccggccgccacagcccctccggggcgggaccggccagcggctgggtggccccccagggacacagctctacggggggcggcgagatggaggccataaccagtgagctgcgttctctacgggaggagatttccctgttagagcatgagaaagaaagcgaacttaaggaaatagaacaggaattgcatttggcccaggctgagatccagagtctgcggcaagcagcagaggattccgcaactgaacatgagagtgacatagcatccctgcaggaggatctctgccggatgcagaatgaacttgaagacatggaacgcattcggggagattatgagatggagatcgcctccctccgtgcagaaatggaaatgaagagctctgaaccatccggtagtttaggtctctcagattactctgggttacaagaagaactgcaggagctgcgggaacgctaccatttcctgaatgaggaataccgggccctgcaggagagcaacagcagcctcacggggcagcttgcagatctggagagtgagaggacacagagagcaacagagagatggctgcagtcccaaacactgagtatgacgtcagcagagtctcagacttcagaaatggatttcttagagcctgatcctgaaatgcagttgttacggcagcagctacgggatgctgaagagcagatgcatggcatgaagaacaagtgtcaggaattgtgttgtgagttggaagagctacagcatcatcgccaggtcagtgaggaggagcagaggcggctgcagagggagctcaagtgtgctcagaatgaggtgcttcggtttcagacctcccacagtgtcacccagaatgaggagctgaagtccagactctgtaccctgcagaaaaaatatgatactagccaggatgagcagaacgagctcttgaagatgcagctgcaacttcagactgagctccggcagctcaaagtcatgaaatccacacttgtagaaaaccagagtgagaaggagttactgtgccggctgcagaagctgcacctccagcaccagaacgtcacatgtgagaaggaaaagctgctggaacggcagcagcagctgcaggaggagctgcagtgccatgaggcagagctgcagcacctcagggatacggtggcctccttcaaagagagcaatgagaaggacacagagacgcacgctcagcttcaggagatgaagcagctgtaccaggccagcaaggacgagctggagcggcagaagcacatgtatgaccagctggagcaggacctcctgctctgccagctggagctgaaagagctcaaggcctcccaccccattccggaggacaaaggaaagtgtgctaataaggtaattgtcgttcagagaggtgacagctcctgggcacttgctccagagagaagaggtacagaggcaaaaagtgaaggcacccaacccaagggcttgatggccttcctaggcaggaagcagaggcagggccacatgctgctaacttcaaaattgtttgccctgaccttgactttgagccagagccacagcttagtaggatcaatacctttggatcccagtctgaacccctgaaagttttacacatgattccatgtatgtagacatttatacaatggtattagaactgtagtgatatctagtcatt

SEQ ID NO: 300537 - DNA, 383 bp, Homo sapiens
ctttagttgtggtagctgtttgaaatggcttaatggccaacagacatagtggccctgagaggtgaggtgtgatgccctctacatatgctcaggggattggctcacagtcccagagcaccgggccacacccttgcactctgacatgctggaagtcatgtttcctggagctagtacagcattgtcatgagattaggagcttcacaggtaacgcagccgccatcctgccctactcccaccccacagagtctggaggtagtgctgtactacaaggccagccagaggaaattagatggactagcaaaagaggaggaaaagaaagaggagatggaggaggaaaaaaaggaagtgaaagaggaagcaaaggagcagtgtggggatgagct

SEQ ID NO: 300538 - DNA, 1249 bp, Homo sapiens
gaagtcatttgtaacaaaaactcattatttacagatgagaaatttatattgtcagcgtaatatctgtgaggctaaacagagctggagagtatataaaagcagtgcgccttggtgcagaagtacagagcttaggacacagagcacatcaaaagttcccaaagagggcttgctctctcttcacctgctctgttctacagcacactaccagaagacagcagaaatgaaaagcatttactttgtggctggattatttgtaatgctggtacaaggcagctggcaacgttcccttcaagacacagaggagaaatccagatcattctcagcttcccaggcagacccactcagtgatcctgatcagatgaacgaggacaagcgccattcacagggcacattcaccagtgactacagcaagtatctggactccaggcgtgcccaagattttgtgcagtggttgatgaataccaagaggaacaggaataacattgccaaacgtcacgatgaatttgagagacatgctgaagggacctttaccagtgatgtaagttcttatttggaaggccaagctgccaaggaattcattgcttggctggtgaaaggccgaggaaggcgagatttcccagaagaggtcgccattgttgaagaacttggccgcagacatgctgatggttctttctctgatgagatgaacaccattcttgataatcttgccgccagggactttataaactggttgattcagaccaaaatcactgacaggaaataactatatcactattcaagatcatcttcacaacatcacctgctagccacgtgggatgtttgaaatgttaagtcctgtaaatttaagaggtgtattctgaggccacattgctttgcatgccaataaataaattttcttttagtgttgtgtagccaaaaattacaaatggaataaagttttatcaaaatattgctaaaatatcagctttaaaatatgaaagtgctagattctgttattttcttcttattttggatgaagtaccccaacctgtttacatttagcgataaaattatttttctatgatataatttgtaaatgtaaattattccgatctgacatatctgcattataataataggagaatagaagaactggtagccacagtggtgaaattggaaagagaactttcttcctgaaacctttgtcttaaaaatactcagctttcaatgtatcaaagatacaattaaataaaattttcaagcttcttta

SEQ ID NO: 300539 - DNA, 1164 bp, Homo sapiens
  misc_feature (3)..(4): n is a, c, g, or t
  misc_feature (7)..(7): n is a, c, g, or t
  misc_feature (14)..(14): n is a, c, g, or t
  misc_feature (21)..(21): n is a, c, g, or t
gannaanaaaaacngggcgantggggaccgggccctttttcgacccacgcgtccggcacatcaaaagttcccaaagagggcttgctctctcttcacctgctctgttctacagcacactaccagaagacagcagaaatgaaaagcatttactttgtggctggattatttgtaatgctggtacaaggcagctggcaacgttcccttcaagacacagaggagaaatccagatcattctcagcttcccaggcagacccactcagtgatcctgatcagatgaacgaggacaagcgccattcacagggcacattcaccagtgactacagcaagtatctggactccaggcgtgcccaagattttgtgcagtggttgatgaataccaagaggaacaggaataacattgccaaacgtcacgatgaatttgagagacatgctgaagggacctttaccagtgatgtaagttcttatttggaaggccaagctgccaaggaattcattgcttggctggtgaaaggccgaggaaggcgagatttcccagaagaggtcgccattgttgaagaacttggccgcagacatgctgatggttctttctctgatgagatgaacaccattcttgataatcttgccgccagggactttataaactggttgattcagaccaaaatcactgacaggaaataactatatcactattcaagatcatcttcacaacatcacctgctagccacgtgggatgtttgaaatgttaagtcctgtaaatttaagaggtgtattctgaggccacattgctttgcatgccaataaataaattttcttttagtgttgtgtagccaaaaattacaaatggaataaagttttatcaaaatattgctaaaatatcagctttaaaatatgaaagtgctagattctgttattttcttcttattttggatgaagtaccccaacctgtttacatttagcgataaaattatttttctatgatataatttgtaaatgtaaattattccgatctgacatatctgcattataataataggagaatagaagaactggtagccacagtggtgaaattggaaagagaactttcttcctgaaacctttgtcttaaaaatactcagctttcaatgtatcaaagatacaattaaataaaattttcaagcttcttta

SEQ ID NO: 300540 - DNA, 1156 bp, Homo sapiens
cggacgcgtgggcggacgcgttgtggtcggcccacgcgtccgcaaaggcacatcaaaagttcccaaagagggcttgctctctcttcacctgctctgttctacagcacactaccagaagacagcagaaatgaaaagcatttactttgtggctggattatttgtaatgctggtacaaggcagctggcaacgttcccttcaagacacagaggagaaatccagatcattctcagcttcccaggcagacccactcagtgatcctgatcagatgaacgaggacaagcgccattcacagggcacattcaccagtgactacagcaagtatctggactccaggcgtgcccaagattttgtgcagtggttgatgaataccaagaggaacaggaataacattgccaaacgtcacgatgaatttgagagacatgctgaagggacctttaccagtgatgtaagttcttatttggaaggccaagctgccaaggaattcattgcttggctggtgaaaggccgaggaaggcgagatttcccagaagaggtcgccattgttgaagaacttggccgcagacatgctgatggttctttctctgatgagatgaacaccattcttgataatcttgccgccagggactttataaactggttgattcagaccaaaatcactgacaggaaataactatatcactattcaagatcatcttcacaacatcacctgctagccacgtgggatgtttgaaatgttaagtcctgtaaatttaagaggtgtattctgaggccacattgctttgcatgccaataaataaattttcttttagtgttgtgtagccaaaaattacaaatggaataaagttttatcaaaatattgctaaaatatcagctttaaaatatgaaagtgctagattctgttattttcttcttattttggatgaagtaccccaacctgtttacatttagcgataaaattatttttctatgatataatttgtaaatgtaaattattccgatctgacatatctgcattataataataggagaatagaagaactggtagccacagtggtgaaattggaaagagaactttcttcctgaaacctttgtcttaaaaatactcagctttcaatgtatcaaagatacaattaaataaaattttcaagcttcttta

SEQ ID NO: 300541 - DNA, 2112 bp, Homo sapiens
  misc_feature (1261)..(1261): n is a, c, g, or t
gaagtcatttgtaacaaaaactcattatttacagatgagaaatttatattgtcagcgtaatatctgtgaggctaaacagagctggagagtatataaaagcagtgcgccttggtgcagaagtacagagcttaggacacagagcacatcaaaagttcccaaagagggcttgctctctcttcacctgctctgttctacagcacactaccagaagacagcagaaatgaaaagcatttactttgtggctggattatttgtaatgctggtacaaggcagctggcaacgttcccttcaagacacagaggagaaatccagatcattctcagcttcccaggcagacccactcagtgatcctgatcagatgaacgaggacaagcgccattcacagggcacattcaccagtgactacagcaagtatctggactccaggcgtgcccaagattttgtgcagtggttgatgaataccaagaggaacaggaataacattgccaaacgtcacgatgaatttgagagacatgctgaagggacctttaccagtgatgtaagttcttatttggaaggccaagctgccaaggaattcattgcttggctggtgaaaggccgaggaaggcgagatttcccagaagaggtcgccattgttgaagaacttggccgcagacatgctgatggttctttctctgatgagatgaacaccattcttgataatcttgccgccagggactttataaactggttgattcagaccaaaatcactgacaggaaataactatatcactattcaagatcatcttcacaacatcacctgctagccacgtgggatgtttgaaatgttaagtcctgtaaatttaagaggtgtattctgaggccacattgctttgcatgccaataaataaattttcttttagtgttgtgtagccaaaaattacaaatggaataaagttttatcaaaatattgctaaaatatcagctttaaaatatgaaagtgctagattctgttattttcttcttattttggatgaagtaccccaacctgtttacatttagcgataaaattatttttctatgatataatttgtaaatgtaaattattccgatctgacatatctgcattataataataggagaatagaagaactggtagccacagtggtgaaattggaaagagaactttcttcctgaaacctttgtcttaaaaatactcagctttcaatgtatcaaagatacaattaaataaaattttcaagcttctttaaaaaaaaaaaanaaaaaaaaaaaaaaaaaaaaaaaaaaaaaaaaaaaaaccaaagagaaaacaaaaaaataaaaaaaaaacaaaaagcaaaaacacagaaagaaaaaaaaaaaaaccaagataacaaagaaacggcgaccaatagaaagagaaaacacaaatacgacaaagacagtgcaggaaagtaataaatcacaaaagacgatgagggagaacaacagcgaaagcagcgcaaaaacacagcgaacggaacccaaacactgcaggagaaaacaaaatacgtaggagcaagacaaaacaaaggacaggaagaaagaaaagaaaacaaagaaaaaaataaagaagaaaaaacagacagtaaaaaacaagtgagcaagaaacccgagaacgaacaaagaaaagaggagaaaaaacaatagaaacgaaaaagagaatctaaaacagagaaaagagatacataaaaaaagaagaataggaaagagaaagaaaaaaaaaaagcaaagaaagaaaaaggaaacagacgaagacaaacagaagaaagaaagaagacaaaacaaggacagaaaaaaaaaggagcatagggaggagagaacgaaagcagggagaaaggacgaaggacaggaaagaaaaaagaaagaaagccagagacgaacgagagaaacaaagcagaagacgcagcgagagacaagaaaaggccggaaagcacgagagcaaaaagaagagagcaaaagaagagaaaaacgagaagaagggaagacaagggaagaggaagaaggagggggaagaaggagaagaggaagagagaagaaagaaacaggaagaagagagagcgaagaggaggaagaggaaggaaaagacacgag

SEQ ID NO: 300542 - DNA, 2005 bp, Homo sapiens
  misc_feature (29)..(30): n is a, c, g, or t
  misc_feature (1154)..(1154): n is a, c, g, or t
cctttttcgacccagcgtccgcggacgcnnggggcacatcaaaagttcccaaagagggcttgctctctcttcacctgctctgttctacagcacactaccagaagacagcagaaatgaaaagcatttactttgtggctggattatttgtaatgctggtacaaggcagctggcaacgttcccttcaagacacagaggagaaatccagatcattctcagcttcccaggcagacccactcagtgatcctgatcagatgaacgaggacaagcgccattcacagggcacattcaccagtgactacagcaagtatctggactccaggcgtgcccaagattttgtgcagtggttgatgaataccaagaggaacaggaataacattgccaaacgtcacgatgaatttgagagacatgctgaagggacctttaccagtgatgtaagttcttatttggaaggccaagctgccaaggaattcattgcttggctggtgaaaggccgaggaaggcgagatttcccagaagaggtcgccattgttgaagaacttggccgcagacatgctgatggttctttctctgatgagatgaacaccattcttgataatcttgccgccagggactttataaactggttgattcagaccaaaatcactgacaggaaataactatatcactattcaagatcatcttcacaacatcacctgctagccacgtgggatgtttgaaatgttaagtcctgtaaatttaagaggtgtattctgaggccacattgctttgcatgccaataaataaattttcttttagtgttgtgtagccaaaaattacaaatggaataaagttttatcaaaatattgctaaaatatcagctttaaaatatgaaagtgctagattctgttattttcttcttattttggatgaagtaccccaacctgtttacatttagcgataaaattatttttctatgatataatttgtaaatgtaaattattccgatctgacatatctgcattataataataggagaatagaagaactggtagccacagtggtgaaattggaaagagaactttcttcctgaaacctttgtcttaaaaatactcagctttcaatgtatcaaagatacaattaaataaaattttcaagcttctttaaaaaaaaaaaanaaaaaaaaaaaaaaaaaaaaaaaaaaaaaaaaaaaaaccaaagagaaaacaaaaaaataaaaaaaaaacaaaaagcaaaaacacagaaagaaaaaaaaaaaaaccaagataacaaagaaacggcgaccaatagaaagagaaaacacaaatacgacaaagacagtgcaggaaagtaataaatcacaaaagacgatgagggagaacaacagcgaaagcagcgcaaaaacacagcgaacggaacccaaacactgcaggagaaaacaaaatacgtaggagcaagacaaaacaaaggacaggaagaaagaaaagaaaacaaagaaaaaaataaagaagaaaaaacagacagtaaaaaacaagtgagcaagaaacccgagaacgaacaaagaaaagaggagaaaaaacaatagaaacgaaaaagagaatctaaaacagagaaaagagatacataaaaaaagaagaataggaaagagaaagaaaaaaaaaaagcaaagaaagaaaaaggaaacagacgaagacaaacagaagaaagaaagaagacaaaacaaggacagaaaaaaaaaggagcatagggaggagagaacgaaagcagggagaaaggacgaaggacaggaaagaaaaaagaaagaaagccagagacgaacgagagaaacaaagcagaagacgcagcgagagacaagaaaaggccggaaagcacgagagcaaaaagaagagagcaaaagaagagaaaaacgagaagaagggaagacaagggaagaggaagaaggagggggaagaaggagaagaggaagagagaagaaagaaacaggaagaagagagagcgaagaggaggaagaggaaggaaaagacacgag

SEQ ID NO: 300543 - DNA, 2027 bp, Homo sapiens
  misc_feature (3)..(4): n is a, c, g, or t
  misc_feature (7)..(7): n is a, c, g, or t
  misc_feature (14)..(14): n is a, c, g, or t
  misc_feature (21)..(21): n is a, c, g, or t
  misc_feature (1176)..(1176): n is a, c, g, or t
gannaanaaaaacngggcgantggggaccgggccctttttcgacccacgcgtccggcacatcaaaagttcccaaagagggcttgctctctcttcacctgctctgttctacagcacactaccagaagacagcagaaatgaaaagcatttactttgtggctggattatttgtaatgctggtacaaggcagctggcaacgttcccttcaagacacagaggagaaatccagatcattctcagcttcccaggcagacccactcagtgatcctgatcagatgaacgaggacaagcgccattcacagggcacattcaccagtgactacagcaagtatctggactccaggcgtgcccaagattttgtgcagtggttgatgaataccaagaggaacaggaataacattgccaaacgtcacgatgaatttgagagacatgctgaagggacctttaccagtgatgtaagttcttatttggaaggccaagctgccaaggaattcattgcttggctggtgaaaggccgaggaaggcgagatttcccagaagaggtcgccattgttgaagaacttggccgcagacatgctgatggttctttctctgatgagatgaacaccattcttgataatcttgccgccagggactttataaactggttgattcagaccaaaatcactgacaggaaataactatatcactattcaagatcatcttcacaacatcacctgctagccacgtgggatgtttgaaatgttaagtcctgtaaatttaagaggtgtattctgaggccacattgctttgcatgccaataaataaattttcttttagtgttgtgtagccaaaaattacaaatggaataaagttttatcaaaatattgctaaaatatcagctttaaaatatgaaagtgctagattctgttattttcttcttattttggatgaagtaccccaacctgtttacatttagcgataaaattatttttctatgatataatttgtaaatgtaaattattccgatctgacatatctgcattataataataggagaatagaagaactggtagccacagtggtgaaattggaaagagaactttcttcctgaaacctttgtcttaaaaatactcagctttcaatgtatcaaagatacaattaaataaaattttcaagcttctttaaaaaaaaaaaanaaaaaaaaaaaaaaaaaaaaaaaaaaaaaaaaaaaaaccaaagagaaaacaaaaaaataaaaaaaaaacaaaaagcaaaaacacagaaagaaaaaaaaaaaaaccaagataacaaagaaacggcgaccaatagaaagagaaaacacaaatacgacaaagacagtgcaggaaagtaataaatcacaaaagacgatgagggagaacaacagcgaaagcagcgcaaaaacacagcgaacggaacccaaacactgcaggagaaaacaaaatacgtaggagcaagacaaaacaaaggacaggaagaaagaaaagaaaacaaagaaaaaaataaagaagaaaaaacagacagtaaaaaacaagtgagcaagaaacccgagaacgaacaaagaaaagaggagaaaaaacaatagaaacgaaaaagagaatctaaaacagagaaaagagatacataaaaaaagaagaataggaaagagaaagaaaaaaaaaaagcaaagaaagaaaaaggaaacagacgaagacaaacagaagaaagaaagaagacaaaacaaggacagaaaaaaaaaggagcatagggaggagagaacgaaagcagggagaaaggacgaaggacaggaaagaaaaaagaaagaaagccagagacgaacgagagaaacaaagcagaagacgcagcgagagacaagaaaaggccggaaagcacgagagcaaaaagaagagagcaaaagaagagaaaaacgagaagaagggaagacaagggaagaggaagaaggagggggaagaaggagaagaggaagagagaagaaagaaacaggaagaagagagagcgaagaggaggaagaggaaggaaaagacacgag

SEQ ID NO: 300544 - DNA, 994 bp, Homo sapiens
  misc_feature (3)..(4): n is a, c, g, or t
  misc_feature (7)..(7): n is a, c, g, or t
  misc_feature (14)..(14): n is a, c, g, or t
  misc_feature (21)..(21): n is a, c, g, or t
gannaanaaaaacngggcgantggggaccgggccctttttcgacccacgcgtccggcacatcaaaagttcccaaagagggcttgctctctcttcacctgctctgttctacagcacactaccagaagacagcagaaatgaaaagcatttactttgtggctggattatttgtaatgctggtacaaggcagctggcaacgttcccttcaagacacagaggagaaatccagatcattctcagcttcccaggcagacccactcagtgatcctgatcagatgaacgaggacaagcgccattcacagggcacattcaccagtgactacagcaagtatctggactccaggcgtgcccaagattttgtgcagtggttgatgaataccaagaggaacaggaataacattgccaaacgtcacgatgaatttgagagacatgctgaagggacctttaccagtgatgtaagttcttatttggaaggccaagctgccaaggaattcattgcttggctggtgaaaggccgaggaaggcgagatttcccagaagaggtcgccattgttgaagaacttggccgcagacatgctgatggttctttctctgatgagatgaacaccattcttgataatcttgccgccagggactttataaactggttgattcagaccaaaatcactgacaggaaataactatatcactattcaagatcatcttcacaacatcacctgctagccacgtgggatgtttgaaatgttaagtcctgtaaatttaagaggtgtattctgaggccacattgctttgcatgccaataaataaattctttaatgtgtgttccaaattcacatgtgcaaaggtttccaattgctacaatcacctaaaagaagggacaacagacatcgctttggagaaacccacgtattcgaaaacttcacaaaatgcgagaaacccgcatttctataaaggaaaagatccggagagaaactccgctaaacaactgagatgcaa

SEQ ID NO: 300545 - DNA, 457 bp, Homo sapiens
tcagagaaagaaccatcagcatgtctgcggccaagttcttcaacaatggcgacctcttctgggtctgaggccacattgctttgcatgccaataaataaattttcttttagtgttgtgtagccaaaaattacaaatggaataaagttttatcaaaatattgctaaaatatcagctttaaaatatgaaagtgctagattctgttattttcttcttattttggatgaagtaccccaacctgtttacatttagcgataaaattatttttctatgatataatttgtaaatgtaaattattccgatctgacatatctgcattataataataggagaatagaagaactggtagccacagtggtgaaattggaaagagaactttcttcctgaaacctttgtcttaaaaatactcagctttcaatgtatcaaagatacaattaaataaaattttcaagcttcttta

SEQ ID NO: 300546 - DNA, 1142 bp, Homo sapiens
  misc_feature (29)..(30): n is a, c, g, or t
cctttttcgacccagcgtccgcggacgcnnggggcacatcaaaagttcccaaagagggcttgctctctcttcacctgctctgttctacagcacactaccagaagacagcagaaatgaaaagcatttactttgtggctggattatttgtaatgctggtacaaggcagctggcaacgttcccttcaagacacagaggagaaatccagatcattctcagcttcccaggcagacccactcagtgatcctgatcagatgaacgaggacaagcgccattcacagggcacattcaccagtgactacagcaagtatctggactccaggcgtgcccaagattttgtgcagtggttgatgaataccaagaggaacaggaataacattgccaaacgtcacgatgaatttgagagacatgctgaagggacctttaccagtgatgtaagttcttatttggaaggccaagctgccaaggaattcattgcttggctggtgaaaggccgaggaaggcgagatttcccagaagaggtcgccattgttgaagaacttggccgcagacatgctgatggttctttctctgatgagatgaacaccattcttgataatcttgccgccagggactttataaactggttgattcagaccaaaatcactgacaggaaataactatatcactattcaagatcatcttcacaacatcacctgctagccacgtgggatgtttgaaatgttaagtcctgtaaatttaagaggtgtattctgaggccacattgctttgcatgccaataaataaattttcttttagtgttgtgtagccaaaaattacaaatggaataaagttttatcaaaatattgctaaaatatcagctttaaaatatgaaagtgctagattctgttattttcttcttattttggatgaagtaccccaacctgtttacatttagcgataaaattatttttctatgatataatttgtaaatgtaaattattccgatctgacatatctgcattataataataggagaatagaagaactggtagccacagtggtgaaattggaaagagaactttcttcctgaaacctttgtcttaaaaatactcagctttcaatgtatcaaagatacaattaaataaaattttcaagcttcttta

SEQ ID NO: 300547 - DNA, 1096 bp, Homo sapiens
  misc_feature (45)..(45): n is a, c, g, or t
  misc_feature (51)..(51): n is a, c, g, or t
ccacgcacacaccacgagtctccccatacccacacatcagcaccngcgccngctagtcacagcagaaatgaaaagcatttactttgtggctggattatttgtaatgctggtacaaggcagctggcaacgttcccttcaagacacagaggagaaatccagatcattctcagcttcccaggcagacccactcagtgatcctgatcagatgaacgaggacaagcgccattcacagggcacattcaccagtgactacagcaagtatctggactccaggcgtgcccaagattttgtgcagtggttgatgaataccaagaggaacaggaataacattgccaaacgtcacgatgaatttgagagacatgctgaagggacctttaccagtgatgtaagttcttatttggaaggccaagctgccaaggaattcattgcttggctggtgaaaggccgaggaaggcgagatttcccagaagaggtcgccattgttgaagaacttggccgcagacatgctgatggttctttctctgatgagatgaacaccattcttgataatcttgccgccagggactttataaactggttgattcagaccaaaatcactgacaggaaataactatatcactattcaagatcatcttcacaacatcacctgctagccacgtgggatgtttgaaatgttaagtcctgtaaatttaagaggtgtattctgaggccacattgctttgcatgccaataaataaattttcttttagtgttgtgtagccaaaaattacaaatggaataaagttttatcaaaatattgctaaaatatcagctttaaaatatgaaagtgctagattctgttattttcttcttattttggatgaagtaccccaacctgtttacatttagcgataaaattatttttctatgatataatttgtaaatgtaaattattccgatctgacatatctgcattataataataggagaatagaagaactggtagccacagtggtgaaattggaaagagaactttcttcctgaaacctttgtcttaaaaatactcagctttcaatgtatcaaagatacaattaaataaaattttcaagcttcttta

SEQ ID NO: 300548 - DNA, 919 bp, Homo sapiens
  misc_feature (3)..(4): n is a, c, g, or t
  misc_feature (7)..(7): n is a, c, g, or t
  misc_feature (14)..(14): n is a, c, g, or t
  misc_feature (21)..(21): n is a, c, g, or t
gannaanaaaaacngggcgantggggaccgggccctttttcgacccacgcgtccgggcacattcaccagtgactacagcaagtatctggactccaggcgtgcccaagattttgtgcagtggttgatgaataccaagaggaacaggaataacattgccaaacgtcacgatgaatttgagagacatgctgaagggacctttaccagtgatgtaagttcttatttggaaggccaagctgccaaggaattcattgcttggctggtgaaaggccgaggaaggcgagatttcccagaagaggtcgccattgttgaagaacttggccgcagacatgctgatggttctttctctgatgagatgaacaccattcttgataatcttgccgccagggactttataaactggttgattcagaccaaaatcactgacaggaaataactatatcactattcaagatcatcttcacaacatcacctgctagccacgtgggatgtttgaaatgttaagtcctgtaaatttaagaggtgtattctgaggccacattgctttgcatgccaataaataaattttcttttagtgttgtgtagccaaaaattacaaatggaataaagttttatcaaaatattgctaaaatatcagctttaaaatatgaaagtgctagattctgttattttcttcttattttggatgaagtaccccaacctgtttacatttagcgataaaattatttttctatgatataatttgtaaatgtaaattattccgatctgacatatctgcattataataataggagaatagaagaactggtagccacagtggtgaaattggaaagagaactttcttcctgaaacctttgtcttaaaaatactcagctttcaatgtatcaaagatacaattaaataaaattttcaagcttcttta

SEQ ID NO: 300549 - DNA, 1079 bp, Homo sapiens
gaagtcatttgtaacaaaaactcattatttacagatgagaaatttatattgtcagcgtaatatctgtgaggctaaacagagctggagagtatataaaagcagtgcgccttggtgcagaagtacagagcttaggacacagagcacatcaaaagttcccaaagagggcttgctctctcttcacctgctctgttctacagcacactaccagaagacagcagaaatgaaaagcatttactttgtggctggattatttgtaatgctggtacaaggcagctggcaacgttcccttcaagacacagaggagaaatccagatcattctcagcttcccaggcagacccactcagtgatcctgatcagatgaacgaggacaagcgccattcacagggcacattcaccagtgactacagcaagtatctggactccaggcgtgcccaagattttgtgcagtggttgatgaataccaagaggaacaggaataacattgccaaacgtcacgatgaatttgagagacatgctgaagggacctttaccagtgatgtaagttcttatttggaaggccaagctgccaaggaattcattgcttggctggtgaaaggccgaggaaggcgagatttcccagaagaggtcgccattgttgaagaacttggccgcagacatgctgatggttctttctctgatgagatgaacaccattcttgataatcttgccgccagggactttataaactggttgattcagaccaaaatcactgacaggaaataactatatcactattcaagatcatcttcacaacatcacctgctagccacgtgggatgtttgaaatgttaagtcctgtaaatttaagaggtgtattctgaggccacattgctttgcatgccaataaataaattctttaatgtgtgttccaaattcacatgtgcaaaggtttccaattgctacaatcacctaaaagaagggacaacagacatcgctttggagaaacccacgtattcgaaaacttcacaaaatgcgagaaacccgcatttctataaaggaaaagatccggagagaaactccgctaaacaactgagatgcaa

SEQ ID NO: 300550 - DNA, 1227 bp, Homo sapiens
gaagtcatttgtaacaaaaactcattatttacagatgagaaatttatattgtcagcgtaatatctgtgaggctaaacagagctggagagtatataaaagcagtgcgccttggtgcagaagtacagagcttaggacacagagcacatcaaaagttcccaaagagggcttgctctctcttcacctgctctgttctacagcacactaccagaagacagcagaaatgaaaagcatttactttgtggctggattatttgtaatgctggtacaaggcagctggcaacgttcccttcaagacacagaggagaaatccagatcattctcagcttcccaggcagacccactcagtgatcctgatcagatgaacgaggacaagcgccattcacagggcacattcaccagtgactacagcaagtatctggactccaggcgtgcccaagattttgtgcagtggttgatgaataccaagaggaacaggaataacattgccaaacgtcacgatgaatttgagagacatgctgaagggacctttaccagtgatgtaagttcttatttggaaggccaagctgccaaggaattcattgcttggctggtgaaaggccgaggaaggcgagatttcccagaagaggtcgccattgttgaagaacttggccgcagacatgctgatggttctttctctgatgagatgaacaccattcttgataatcttgccgccagggactttataaactggttgattcagaccaaaatcactgacaggaaataactatatcactattcaagatcatcacgtgggatgtttgaaatgttaagtcctgtaaatttaagaggtgtattctgaggccacattgctttgcatgccaataaataaattttcttttagtgttgtgtagccaaaaattacaaatggaataaagttttatcaaaatattgctaaaatatcagctttaaaatatgaaagtgctagattctgttattttcttcttattttggatgaagtaccccaacctgtttacatttagcgataaaattatttttctatgatataatttgtaaatgtaaattattccgatctgacatatctgcattataataataggagaatagaagaactggtagccacagtggtgaaattggaaagagaactttcttcctgaaacctttgtcttaaaaatactcagctttcaatgtatcaaagatacaattaaataaaattttcaagcttcttta

SEQ ID NO: 300551 - DNA, 768 bp, Homo sapiens
  misc_feature (3)..(4): n is a, c, g, or t
  misc_feature (7)..(7): n is a, c, g, or t
  misc_feature (14)..(14): n is a, c, g, or t
  misc_feature (21)..(21): n is a, c, g, or t
gannaanaaaaacngggcgantggggaccgggccctttttcgacccacgcgtccgatgtaagttcttatttggaaggccaagctgccaaggaattcattgcttggctggtgaaaggccgaggaaggcgagatttcccagaagaggtcgccattgttgaagaacttggccgcagacatgctgatggttctttctctgatgagatgaacaccattcttgataatcttgccgccagggactttataaactggttgattcagaccaaaatcactgacaggaaataactatatcactattcaagatcatcttcacaacatcacctgctagccacgtgggatgtttgaaatgttaagtcctgtaaatttaagaggtgtattctgaggccacattgctttgcatgccaataaataaattttcttttagtgttgtgtagccaaaaattacaaatggaataaagttttatcaaaatattgctaaaatatcagctttaaaatatgaaagtgctagattctgttattttcttcttattttggatgaagtaccccaacctgtttacatttagcgataaaattatttttctatgatataatttgtaaatgtaaattattccgatctgacatatctgcattataataataggagaatagaagaactggtagccacagtggtgaaattggaaagagaactttcttcctgaaacctttgtcttaaaaatactcagctttcaatgtatcaaagatacaattaaataaaattttcaagcttcttta

SEQ ID NO: 300552 - DNA, 1173 bp, Homo sapiens
gaagtcatttgtaacaaaaactcattatttacagatgagaaatttatattgtcagcgtaatatctgtgaggctaaacagagctggagagtatataaaagcagtgcgccttggtgcagaagtacagagcttaggacacagagcacatcaaaagttcccaaagagggcttgctctctcttcacctgctctgttctacagcacactaccagaagacagcagaaatgaaaagcatttactttgtggctggattatttgtaatgctggtacaaggcagctggcaacgttcccttcaagacacagaggagaaatccagatcattctcagcttcccaggcagacccactcagtgatcctgatcagatgaacgaggacaagcgccattcacagggcacattcaccagtgactacagcaagtatctggactccaggcgtgcccaagattttgtgcagtggttgatgaataccaagaggaacaggaataacattgccaaacgtcacgatgaatttgagagacatgctgaagggacctttaccagtgtttcccagaagaggtcgccattgttgaagaacttggccgcagacatgctgatggttctttctctgatgagatgaacaccattcttgataatcttgccgccagggactttataaactggttgattcagaccaaaatcactgacaggaaataactatatcactattcaagatcatcttcacaacatcacctgctagccacgtgggatgtttgaaatgttaagtcctgtaaatttaagaggtgtattctgaggccacattgctttgcatgccaataaataaattttcttttagtgttgtgtagccaaaaattacaaatggaataaagttttatcaaaatattgctaaaatatcagctttaaaatatgaaagtgctagattctgttattttcttcttattttggatgaagtaccccaacctgtttacatttagcgataaaattatttttctatgatataatttgtaaatgtaaattattccgatctgacatatctgcattataataataggagaatagaagaactggtagccacagtggtgaaattggaaagagaactttcttcctgaaacctttgtcttaaaaatactcagctttcaatgtatcaaagatacaattaaataaaattttcaagcttcttta

SEQ ID NO: 300553 - DNA, 781 bp, Homo sapiens
  misc_feature (581)..(581): n is a, c, g, or t
gaagtcatttgtaacaaaaactcattatttacagatgagaaatttatattgtcagcgtaatatctgtgaggctaaacagagctggagagtatataaaagcagtgcgccttggtgcagaagtacagagcttaggacacagagcacatcaaaagttcccaaagagggcttgctctctcttcacctgctctgttctacagcacactaccagaagacagcagaaatgaaaagcatttactttgtggctggattatttgtaatgctggtacaaggcagctggcaacgttcccttcaagacacagaggagaaatccagatcattctcagcttcccaggcagtaagcgtccaaccatctggatcgacacgggcatccattcccgggagtgggtcacccaggccagtggggtctggttgcaaagaagatcactcaagactacgggcaggatgcagctttcaccgccattctcgacaccttggacatcttcctggagatcgtcaccaaccctgatggctttgccttcacgcacagcacgaatcgcatgtggcgcaagactcggtcccacacagcaggctccctctgtatnggcgtggaccccaacaggaactgggacgctggctttgggttgtccggagccagcagtaacccctgctcggagacttaccacggcaagtttgccaattccgaagtggaggtcaagtccattgtagactttgtgaaggaccatgggaaacatcaagggcttcatctcatccacagtaatcccaggtcctcatgtatcctatg

SEQ ID NO: 300554 - DNA, 517 bp, Homo sapiens
gaagtcatttgtaacaaaaactcattatttacagatgagaaatttatattgtcagcgtaatatctgtgaggctaaacagagctggagagtatataaaagcagtgcgccttggtgcagaagtacagagcttaggacacagagcacatcaaaagttcccaaagagggcttgctctctcttcacctgctctgttctacagcacactaccagaagacagcagaaatgaaaagcatttactttgtggctggattatttgtaatgctggtacaaggcagctggcaacgttcccttcaagagccccgggggaaaattctgtttttttttaatttccaggggaacccccttaaagggttcctgtcaaaaaaaaaaggaaacaacccctttcttggggggcctttccccgggttttacaacagggttgttggtgaccaaggggggccccaaaaaatttttgggggggggttttaaaaaaaaacaaaaagaggagaaaaatttttttcccccccccccccccttttt

SEQ ID NO: 300555 - DNA, 4454 bp, Homo sapiens
gcgcggccttgttgggggcccccgttgcccgcctcccagtagccgcgcctcaccctaggccaggaatggttttagggaagactgttgccggatgacaaggctgtcactattgttctgtactacctgacattatgggaccaggccagccagcttcaacctgtgttcatctagcacctaggacccaacttgatgggaggagtgaccccaaagtacttcagacccagaaccagctgcagtttaataggaatgttcctacacattcaagcaacttggcgatccgatattcttgcccacatgccattagaattgaaaaactgaagcactcatacaatgaatcataccattgtaaagatgcagattgtagagttggtcctgacctgggcagttctgtttcattttccgtcatatcccaagagagacttagctatgctgtccacctagccagaagagatgtgaaacgaagacaatttgaaaaacatataaaagaacatcatctcagaagtcagcctcaaagctctcagaagtgtggacatactaagtataaaatacccgaccacagggtggaaaggaaggaatcaaagagtcaagcagcctgtcagtgtagccaccagccatccaaagtagaaatctccagctctggtgccaaagtatacctttactcatctcatccaggccagtcagatcttactgtgccaaattcgccacccacccatgatccgggacttcagcctcatcccaggataggtgaccacaaaaacataagtgaacagaaaagcctgctagaagtccagcgactccagaaagaactgagcagttgtatccacaaaattgaagaggtaactaaaaaagatagactagaagaagctttggatccagatgaagaacgtcgaatccgtatcaggagacaggagcaagctgctcgctctgcccgaatgctctacgtcctccagcagcaggtaaaagaaatccaggaagaattggataaattgagtccacataaaattaaacacactaagaagtcatgggcaatgtctaagctggcggctgcccatcgaggagccattcgggccttacagatgtttgtcactcagtttactgaccgaggggagcatccacttcctgctcggtgtaaggaactgggcagccttattcgccagctttcactttgttctgtcaagctggatgcagacccttctgttcctgatgtggttatagatattctgcaacaaattgaggctttggaatctctcctggaaaagaaactgtcaccaaaaaaggtgaaaaaatgtttcagtgaaattcggagcagatttcctatcggtagccaaaaggccttggagagatggccaagtacatcaccaaagggtgagaggaggcccctcacagcaaaggacacattcccacaggaaacaagtcgaccttctgtagcaaagcagcttcttgccgataagtatcagcccgatacggagcttccggagacccagaggttgcagagtgagcttgatgtattagatgcggatatagttctggaagaaggaccatttattctagaccaaagtgcaagcttcaaagacgaggtgttagccgtggcaaaaacaaaagcagggaaaaagaagcctgtgactgagaatgtgccgtttaggaagaaagatactctggcgccagcaagacagcaaggactccgcaaagctgaaagaggtagacaaagccaacctcacagtaaaagcagagtgcagcagacaacagtttcatccagattaaaaatgaaccggcagcctgtgaaagaccgcaaggcaccatggatacccccaaaccccacatccccaccagcgtctcctaaatgtgctgcatggctaaaggtgaaaactagccccagagatgccacaaaagagcctctccagcaagaagatcctcaagaggaaagtcacctgacaggtgctgttgagcatgaagcagccaggctcgcttggcttgatgctgaaacttccaaaagattgaaggaactagaagagttaaaagccaaggaaattgacagcatgcaaaaacagaggcttgattggcttgatgctgaaacttctagaagaacaaaggaactgaatgagctcaaagctgaagaaatgtatagactccaacaattgagtgtttctgccacccacttagcagacaaggtagaggaggcagttctggatcgtttgaagcctctcttggtcaaggcccagagagtcaattctactacagaagcaaatattcatttgaaagatggctcgtcagtaaacacagcgaaagcccagcctgcacaggaggttgcagctgttgattttgaatccaacaacattcgtcagcttgatgattttttggaagattgtgccagtgagctctgggctgtgactcatgctaagatcttggggtctgaaaccttagccaccgttgaggacagcaaggatagcccagatctggagatcatgatgcgccgaatggaagagatggaaaaataccaggagtctgttcgtcaaagatataataaaatcgcatatgctgatcctcgactttggatgcaggaagaaaacaatgaccaaaaaatctcagcaataagtgaaaagcctctatctcctcatccaatcagaatcacgaagacagtggatcgcaaggatccagccgtgaacatcatgttagaaaggccctgtaatggcaattccctggatgaaagtgtgggaacagaggaaggatcagagaaaagagaggcccctcttctctccctagccgaagattctcaacagaaagaaggccgagctcccctctttgtcccaccgggtatgcagcacagcatcggtgactactgtagtcgttttgagcagtaccttcggatcatatctcatgaggctgtaggctccttcaacccgtggctgatagctgaaagcttttcagaagagctggtagatgaagctctgggtgctgtggctgctgaacttcaggatatgtgcgaagattatgcagaagctgtgttcacctcagaattcttagaggctgctacataaaggctctctgaggcgaggccgtttgtgtcacactggagaagggatggcaccaccctttgttttggcccacaggaaattttcatcctcagctgtccatccaggcccagaaggtgctgcccactgaaaggaaggcagtgccggggaggtcatcctcactttgcattttcttttgtcatggcaatggttctggaaatgtatgatgcaatgtatcacacttatcagtgcccaggcaacacaacttgattatggcaatattttcagaatgtgtacttttcctattgaaataccatgttcattcctctggctcagtttggtgatgaaaatgttttgaaagataatcgatacgtatatttcacacaaggattcaggttgctgttgaacccttgctggcattgataccaacacaagtgcggctactagctggtcccatcacggggcccctgttttgcatctttggcgatttcctgtcaggacctctggccctactaggctgtagactcagggagagcacagtctggctgtgctgccaaacctctcctctgctgcagtttattccaaacaggagccccctggctgtcagtgcacaataatagacacacatttcttcaacgttccattcctaggtgattttcacatttttagttcctcagcatattttattgctgtgtgttgacacaatctggtataaaaaactttctctggattcagaggaagtttgaggaatcaggagaggaccaggccttctcctgtgcctgggtgaaggtacagacctcgctgtgtctccgatgaggtcagaagtgtctctatttcataccacaaaggaacccaagtgggagtagggaacagatggatggcgcgaagacctctgtgtctccccagagaaaggaagaaacttaagaaccatcatagcctggtcctccaacatcttacagatcatgttttccaagagaaaagcctgtgttttcagaaactctgaattcagaaaaagaaacggaatgtgcgtaagaatcaggccactgcctggaaagactttctctcaattcgtagcctgaggctcagtgaaggaaacatgcagaaagaatgcctgagacgcccccagggaataagggaactctttataacctgtccagtgctgtcatctgggatttttctctgaagtacaagaatttcaggtgatttaagctgcttgatcacacttatttgtgcaaaattgattttcatttaatgttaatgttttcctgcttaattttatataacttcagaatgtaaagagcttcaaggtaaattacaaggtgtttaacctggggagttaaatgtgtacacttgaattaataggagcaccggttgttgctagtataaagtaatttgtgtggcagtttgtactgtgctgagtttttaaaataaacccaatattttaaa

SEQ ID NO: 300556 - DNA, 582 bp, Homo sapiens
tatctccctccactatacctattaattacaaaggggaaaacagtaactttacaagggagaaacctggcagacatcaccgtaacccagtgatgcaaaattaactgacatcattaatggatatcaaatagatatcatggtgcactgaagggacacactatccttctgtggcatctctttcaaaaccgtatgtcctgaatctgatcataaggaaaaaacccaaattgagggatattctccccacccccccaaaaaaaggcttttattctttaaaaaatgttaaggtcatgagaggcaaagaaagactgaaggactattagattacagtagactaaagagctgtgacaacaaaatgcgacatggaatcccagactggaaccttggactagcaaaaaatttcttttgaaggaaattatttggatggttggcaaaatttgaataaggcctgtagatagataggcctgtagaatagatactagttttgtatcaatgttaattttataattgttataattgttcacagccggaaaaaactatgccatgtttgtagaatccagtagggacggtttaccctcaggaggcagc

SEQ ID NO: 300557 - DNA, 5197 bp, Homo sapiens
gcgcggccttgttgggggcccccgttgcccgcctcccagtagccgcgcctcaccctaggccaggaatggttttagggaagactgttgccggatgacaaggctgtcactattgttctgtactacctgacattatgggaccaggccagccagcttcaacctgtgttcatctagcacctaggacccaacttgatgggaggagtgaccccaaagtacttcagacccagaaccagctgcagtttaataggaatgttcctacacattcaagcaacttggcgatccgatattcttgcccacatgccattagaattgaaaaactgaagcactcatacaatgaatcataccattgtaaagatgcagattgtagagttggtcctgacctgggcagttctgtttcattttccgtcatatcccaagagagacttagctatgctgtccacctagccagaagagatgtgaaacgaagacaatttgaaaaacatataaaagaacatcatctcagaagtcagcctcaaagctctcagaagtgtggacatactaagtataaaatacccgaccacagggtggaaaggaaggaatcaaagagtcaagcagcctgtcagtgtagccaccagccatccaaagtagaaatctccagctctggtgccaaagtatacctttactcatctcatccaggccagtcagatcttactgtgccaaattcgccacccacccatgatccgggacttcagcctcatcccaggataggtgaccacaaaaacataagtgaacagaaaagcctgctagaagtccagcgactccagaaagaactgagcagttgtatccacaaaattgaagaggtaactaaaaaagttcttattctacactgctgccgtagagattgctctaaaacatgaatcttaccatgtcagacctctgcttaaaagactttagtggctctctgtaacttagaggatgaaagctaaactcttcagcgtggcatgtaagacttcacgatccggcccgcctacatttccagagtcacctccaccttcactccttcatgctaaattcctattacactggggacgaagggatggaaggtgaacactgcctattcactatcttgaactggaaaccagtaactgttttttgggtgcatgaatgaagagcctttttttcattttcaagtgacttgaattaataatggttatatttggacaagaggagatatatcgatgcatccttttctacaaaaaagatcaatggaaaggtatgaagttttcttttttcccctttacaaaacaggtaaaagaaatccaggaagaattggataaattgagtccacataaaattaaacacactaagaaggtatgctgcaattaaattatgatcaatacttgcttataaatgacatttcccagtgttttgttagtattgtgtagggccctctgcactaatgttattttcagtacttgcagaaacctgttagtgagggagtgagcaccttacatattctgaatatggttgccttctaaggaacaggttctaaaaaatagatttttgttgttgttgctgctggtataaaaaattggaagtagtaaggaaaagactgccactaggaaaactttaaactttacaactccctttactatggaaaaagttttcacaataggaaaggcactttatacagaaaggagacaggctataaatattcttagaagttgggtgaatgttagcaagttctgagtatggaaataacttctctcatcttgtttattaccagtcatgggcaatgtctaagctggcggctgcccatcgaggagccattcgggccttacagatgtttgtcactcagtttactgaccgaggggagcatccacttcctgctcggtgtaaggaactgggcagccttattcgccagctttcactttgttctgtcaagctggatgcagacccttctgttcctgatgtggttatagatattctgcaacaaattgaggctttggaatctctcctggaaaagaaactgtcaccaaaaaaggtgaaaaaatgtttcagtgaaattcggagcagatttcctatcggtagccaaaaggccttggagagatggccaagtacatcaccaaagggtgagaggaggcccctcacagcaaaggacacattcccacaggaaacaagtcgaccttctgtagcaaagcagcttcttgccgataagtatcagcccgatacggagcttccggagacccagaggttgcagagtgagcttgatgtattagatgcggatatagttctggaagaaggaccatttattctagaccaaagtgcaagcttcaaagacgaggtgttagccgtggcaaaaacaaaagcagggaaaaagaagcctgtgactgagaatgtgccgtttaggaagaaagatactctggcgccagcaagacagcaaggactccgcaaagctgaaagaggtagacaaagccaacctcacagtaaaagcagagtgcagcagacaacagtttcatccagattaaaaatgaaccggcagcctgtgaaagaccgcaaggcaccatggatacccccaaaccccacatccccaccagcgtctcctaaatgtgctgcatggctaaaggtgaaaactagccccagagatgccacaaaagagcctctccagcaagaagatcctcaagaggaaagtcacctgacaggtgctgttgagcatgaagcagccaggctcgcttggcttgatgctgaaacttccaaaagattgaaggaactagaagagttaaaagccaaggaaattgacagcatgcaaaaacagaggcttgattggcttgatgctgaaacttctagaagaacaaaggaactgaatgagctcaaagctgaagaaatgtatagactccaacaattgagtgtttctgccacccacttagcagacaaggtagaggaggcagttctggatcgtttgaagcctctcttggtcaaggcccagagagtcaattctactacagaagcaaatattcatttgaaagatggctcgtcagtaaacacagcgaaagcccagcctgcacaggaggttgcagctgttgattttgaatccaacaacattcgtcagcttgatgattttttggaagattgtgccagtgagctctgggctgtgactcatgctaagatcttggggtctgaaaccttagccaccgttgaggacagcaaggatagcccagatctggagatcatgatgcgccgaatggaagagatggaaaaataccaggagtctgttcgtcaaagatataataaaatcgcatatgctgatcctcgactttggatgcaggaagaaaacaatgaccaaaaaatctcagcaataagtgaaaagcctctatctcctcatccaatcagaatcacgaagacagtggatcgcaaggatccagccgtgaacatcatgttagaaaggccctgtaatggcaattccctggatgaaagtgtgggaacagaggaaggatcagagaaaagagaggcccctcttctctccctagccgaagattctcaacagaaagaaggccgagctcccctctttgtcccaccgggtatgcagcacagcatcggtgactactgtagtcgttttgagcagtaccttcggatcatatctcatgaggctgtaggctccttcaacccgtggctgatagctgaaagcttttcagaagagctggtagatgaagctctgggtgctgtggctgctgaacttcaggatatgtgcgaagattatgcagaagctgtgttcacctcagaattcttagaggctgctacataaaggctctctgaggcgaggccgtttgtgtcacactggagaagggatggcaccaccctttgttttggcccacaggaaattttcatcctcagctgtccatccaggcccagaaggtgctgcccactgaaaggaaggcagtgccggggaggtcatcctcactttgcattttcttttgtcatggcaatggttctggaaatgtatgatgcaatgtatcacacttatcagtgcccaggcaacacaacttgattatggcaatattttcagaatgtgtacttttcctattgaaataccatgttcattcctctggctcagtttggtgatgaaaatgttttgaaagataatcgatacgtatatttcacacaaggattcaggttgctgttgaacccttgctggcattgataccaacacaagtgcggctactagctggtcccatcacggggcccctgttttgcatctttggcgatttcctgtcaggacctctggccctactaggctgtagactcagggagagcacagtctggctgtgctgccaaacctctcctctgctgcagtttattccaaacaggagccccctggctgtcagtgcacaataatagacacacatttcttcaacgttccattcctaggtgattttcacatttttagttcctcagcatattttattgctgtgtgttgacacaatctggtataaaaaactttctctggattcagaggaagtttgaggaatcaggagaggaccaggccttctcctgtgcctgggtgaaggtacagacctcgctgtgtctccgatgaggtcagaagtgtctctatttcataccacaaaggaacccaagtgggagtagggaacagatggatggcgcgaagacctctgtgtctccccagagaaaggaagaaacttaagaaccatcatagcctggtcctccaacatcttacagatcatgttttccaagagaaaagcctgtgttttcagaaactctgaattcagaaaaagaaacggaatgtgcgtaagaatcaggccactgcctggaaagactttctctcaattcgtagcctgaggctcagtgaaggaaacatgcagaaagaatgcctgagacgcccccagggaataagggaactctttataacctgtccagtgctgtcatctgggatttttctctgaagtacaagaatttcaggtgatttaagctgcttgatcacacttatttgtgcaaaattgattttcatttaatgttaatgttttcctgcttaattttatataacttcagaatgtaaagagcttcaaggtaaattacaaggtgtttaacctggggagttaaatgtgtacacttgaattaataggagcaccggttgttgctagtataaagtaatttgtgtggcagtttgtactgtgctgagtttttaaaataaacccaatattttaaa

SEQ ID NO: 300558 - DNA, 5145 bp, Homo sapiens
gcgcggccttgttgggggcccccgttgcccgcctcccagtagccgcgcctcaccctaggccaggaatggttttagggaagactgttgccggatgacaaggctgtcactattgttctgtactacctgacattatgggaccaggccagccagcttcaacctgtgttcatctagcacctaggacccaacttgatgggaggagtgaccccaaagtacttcagacccagaaccagctgcagtttaataggaatgttcctacacattcaagcaacttggcgatccgatattcttgcccacatgccattagaattgaaaaactgaagcactcatacaatgaatcataccattgtaaagatgcagattgtagagttggtcctgacctgggcagttctgtttcattttccgtcatatcccaagagagacttagctatgctgtccacctagccagaagagatgtgaaacgaagacaatttgaaaaacatataaaagaacatcatctcagaagtcagcctcaaagctctcagaagtgtggacatactaagtataaaatacccgaccacagggtggaaaggaaggaatcaaagagtcaagcagcctgtcagtgtagccaccagccatccaaagtagaaatctccagctctggtgccaaagtatacctttactcatctcatccaggccagtcagatcttactgtgccaaattcgccacccacccatgatccgggacttcagcctcatcccaggataggtgaccacaaaaacataagtgaacagaaaagcctgctagaagtccagcgactccagaaagaactgagcagttgtatccacaaaattgaagaggtaactaaaaaagttcttattctacactgctgccgtagagattgctctaaaacatgaatcttaccatgtcagacctctgcttaaaagactttagtggctctctgtaacttagaggatgaaagctaaactcttcagcgtggcatgtaagacttcacgatccggcccgcctacatttccagagtcacctccaccttcactccttcatgctaaattcctattacactggggacgaagggatggaaggtgaacactgcctattcactatcttgaactggaaaccagtaactgttttttgggtgcatgaatgaagagcctttttttcattttcaagtgacttgaattaataatggttatatttggacaagaggagatatatcgatgcatccttttctacaaaaaagatcaatggaaaggtatgaagttttcttttttcccctttacaaaacaggtaaaagaaatccaggaagaattggataaattgagtccacataaaattaaacacactaagaaggtatgctgcaattaaattatgatcaatacttgcttataaatgacatttcccagtgttttgttagtattgtgtagggccctctgcactaatgttattttcagtacttgcagaaacctgttagtgagggagtgagcaccttacatattctgaatatggttgccttctaaggaacaggttctaaaaaatagatttttgttgttgttgctgctggtataaaaaattggaagtagtaaggaaaagactgccactaggaaaactttaaactttacaactccctttactatggaaaaagttttcacaataggaaaggcactttatacagaaaggagacaggctataaatattcttagaagttgggtgaatgttagcaagttctgagtatggaaataacttctctcatcttgtttattaccagtcatgggcaatgtctaagctggcggctgcccatcgaggagccattcgggccttacagatgtttgtcactcagtttactgaccgaggggagcatccacttcctgctcggtgtaaggaactgggcagccttattcgccagctttcactttgttctgtcaagctggatgcagacccttctgttcctgatgtggttatagatattctgcaacaaattgaggctttggaatctctcctggaaaagaaactgtcaccaaaaaaggtgaaaaaatgtttcagtgaaattcggagcagatttcctatcggtagccaaaaggccttggagagatggccaagtacatcaccaaagggtgagaggaggcccctcacagcaaaggacacattcccacaggaaacaagtcgaccttctgtagcaaagcagcttcttgccgataagtatcagcccgatacggagcttccggagacccagaggttgcagagtgagcttgatgtattagatgcggatatagttctggaagaaggaccatttattctagaccaaagtgcaagcttcaaagacgaggtgttagccgtggcaaaaacaaaagcagggaaaaagaagcctgtgactgagaatgtgccgtttaggaagaaagatactctggcgccagcaagacagcaaggactccgcaaagctgaaagaggtagacaaagccaacctcacagtaaaagcagagtgcagcagacaacagtttcatccagattaaaaatgaaccggcagcctgtgaaagaccgcaaggcaccatggatacccccaaaccccacatccccaccagcgtctcctaaatgtgctgcatggctaaaggtgaaaactagccccagagatgccacaaaagagcctctccagcaagaagatcctcaagaggaaagtcacctgacaggtgctgttgagcatgaagcagccaggctcgcttggcttgatgctgaaacttccaaaagattgaaggaactagaagagttaaaagccaaggaaattgacagcatgcaaaaacagaggcttgattggcttgatgctgaaacttctagaagaacaaaggaactgaatgagctcaaagctgaagaaatgtatagactccaacaattgagtgtttctgccacccacttagcagacaaggtagaggaggcagttctggatcgtttgaagcctctcttggtcaaggcccagagagtcaattctactacagaagcaaatattcatttgaaagatggctcgtcagtaaacacagcgaaagcccagcctgcacaggaggttgcagctgttgattttgaatccaacaacattcgtcagcttgatgattttttggaagattgtgccagtgagctctgggctgtgactcatgctaagatcttggggtctgaaaccttagccaccgttgaggacagcaaggatagcccagatctggagatcatgatgcgccgaatggaagagatggaaaaataccaggagtctgttcgtcaaagatataataaaatcgcatatgctgatcctcgactttggatgcaggaagaaaacaatgaatcacgaagacagtggatcgcaaggatccagccgtgaacatcatgttagaaaggccctgtaatggcaattccctggatgaaagtgtgggaacagaggaaggatcagagaaaagagaggcccctcttctctccctagccgaagattctcaacagaaagaaggccgagctcccctctttgtcccaccgggtatgcagcacagcatcggtgactactgtagtcgttttgagcagtaccttcggatcatatctcatgaggctgtaggctccttcaacccgtggctgatagctgaaagcttttcagaagagctggtagatgaagctctgggtgctgtggctgctgaacttcaggatatgtgcgaagattatgcagaagctgtgttcacctcagaattcttagaggctgctacataaaggctctctgaggcgaggccgtttgtgtcacactggagaagggatggcaccaccctttgttttggcccacaggaaattttcatcctcagctgtccatccaggcccagaaggtgctgcccactgaaaggaaggcagtgccggggaggtcatcctcactttgcattttcttttgtcatggcaatggttctggaaatgtatgatgcaatgtatcacacttatcagtgcccaggcaacacaacttgattatggcaatattttcagaatgtgtacttttcctattgaaataccatgttcattcctctggctcagtttggtgatgaaaatgttttgaaagataatcgatacgtatatttcacacaaggattcaggttgctgttgaacccttgctggcattgataccaacacaagtgcggctactagctggtcccatcacggggcccctgttttgcatctttggcgatttcctgtcaggacctctggccctactaggctgtagactcagggagagcacagtctggctgtgctgccaaacctctcctctgctgcagtttattccaaacaggagccccctggctgtcagtgcacaataatagacacacatttcttcaacgttccattcctaggtgattttcacatttttagttcctcagcatattttattgctgtgtgttgacacaatctggtataaaaaactttctctggattcagaggaagtttgaggaatcaggagaggaccaggccttctcctgtgcctgggtgaaggtacagacctcgctgtgtctccgatgaggtcagaagtgtctctatttcataccacaaaggaacccaagtgggagtagggaacagatggatggcgcgaagacctctgtgtctccccagagaaaggaagaaacttaagaaccatcatagcctggtcctccaacatcttacagatcatgttttccaagagaaaagcctgtgttttcagaaactctgaattcagaaaaagaaacggaatgtgcgtaagaatcaggccactgcctggaaagactttctctcaattcgtagcctgaggctcagtgaaggaaacatgcagaaagaatgcctgagacgcccccagggaataagggaactctttataacctgtccagtgctgtcatctgggatttttctctgaagtacaagaatttcaggtgatttaagctgcttgatcacacttatttgtgcaaaattgattttcatttaatgttaatgttttcctgcttaattttatataacttcagaatgtaaagagcttcaaggtaaattacaaggtgtttaacctggggagttaaatgtgtacacttgaattaataggagcaccggttgttgctagtataaagtaatttgtgtggcagtttgtactgtgctgagtttttaaaataaacccaatattttaaa

SEQ ID NO: 300559 - DNA, 5378 bp, Homo sapiens
gcgcggccttgttgggggcccccgttgcccgcctcccagtagccgcgcctcaccctaggccaggaatggttttagggaagactgttgccggatgacaaggctgtcactattgttctgtactacctgacattatgggaccaggccagccagcttcaacctgtgttcatctagcacctaggacccaacttgatgggaggagtgaccccaaagtacttcagacccagaaccagctgcagtttaataggaatgttcctacacattcaagcaacttggcgatccgatattcttgcccacatgccattagaattgaaaaactgaagcactcatacaatgaatcataccattgtaaagatgcagattgtagagttggtcctgacctgggcagttctgtttcattttccgtcatatcccaagagagacttagctatgctgtccacctagccagaagagatgtgaaacgaagacaatttgaaaaacatataaaagaacatcatctcagaagtcagcctcaaagctctcagaagtgtggacatactaagtataaaatacccgaccacagggtggaaaggaaggaatcaaagagtcaagcagcctgtcagtgtagccaccagccatccaaagtagaaatctccagctctggtgccaaagtatacctttactcatctcatccaggccagtcagatcttactgtgccaaattcgccacccacccatgatccgggacttcagcctcatcccaggataggtgaccacaaaaacataagtgaacagaaaagcctgctagaagtccagcgactccagaaagaactgagcagttgtatccacaaaattgaagaggtaactaaaaaagttcttattctacactgctgccgtagagattgctctaaaacatgaatcttaccatgtcagacctctgcttaaaagactttagtggctctctgtaacttagaggatgaaagctaaactcttcagcgtggcatgtaagacttcacgatccggcccgcctacatttccagagtcacctccaccttcactccttcatgctaaattcctattacactggggacgaagggatggaaggtgaacactgcctattcactatcttgaactggaaaccagtaactgttttttgggtgcatgaatgaagagcctttttttcattttcaagtgacttgaattaataatggttatatttggacaagaggagatatatcgatgcatccttttctacaaaaaagatcaatggaaaggtatgaagttttcttttttcccctttacaaaacaggtaaaagaaatccaggaagaattggataaattgagtccacataaaattaaacacactaagaaggtatgctgcaattaaattatgatcaatacttgcttataaatgacatttcccagtgttttgttagtattgtgtagggccctctgcactaatgttattttcagtacttgcagaaacctgttagtgagggagtgagcaccttacatattctgaatatggttgccttctaaggaacaggttctaaaaaatagatttttgttgttgttgctgctggtataaaaaattggaagtagtaaggaaaagactgccactaggaaaactttaaactttacaactccctttactatggaaaaagttttcacaataggaaaggcactttatacagaaaggagacaggctataaatattcttagaagttgggtgaatgttagcaagttctgagtatggaaataacttctctcatcttgtttattaccagtcatgggcaatgtctaagctggcggctgcccatcgaggagccattcgggccttacagatgtttgtcactcagtttactgaccgaggggagcatccacttcctgctcggtgtaaggaactgggcagccttattcgccagctttcactttgttctgtcaagctggatgcagacccttctgttcctgatgtggttatagatattctgcaacaaattgaggctttggaatctctcctggaaaagaaactgtcaccaaaaaaggtgaaaaaatgtttcagtgaaattcggagcagatttcctatcggtagccaaaaggccttggagagatggccaagtacatcaccaaagggtgagaggaggcccctcacagcaaaggacacattcccacaggaaacaagtcgaccttctgtagcaaagcagcttcttgccgataagtatcagcccgatacggagcttccggagacccagaggttgcagagtgagcttgatgtattagatgcggatatagttctggaagaaggaccatttattctagaccaaagtgcaagcttcaaagacgaggtgttagccgtggcaaaaacaaaagcagggaaaaagaagcctgtgactgagaatgtgccgtttaggaagaaagatactctggcgccagcaagacagcaaggactccgcaaagctgaaagaggtagacaaagccaacctcacagtaaaagcagagtgcagcagacaacagtttcatccagattaaaaatgaaccggcagcctgtgaaagaccgcaaggcaccatggatacccccaaaccccacatccccaccagcgtctcctaaatgtgctgcatggctaaaggtgaaaactagccccagagatgccacaaaagagcctctccagcaagaagatcctcaagaggaaagtcacctgacaggtgctgttgagcatgaagcagccaggctcgcttggcttgatgctgaaacttccaaaagattgaaggaactagaagagttaaaagccaaggaaattgacagcatgcaaaaacagaggcttgattggcttgatgctgaaacttctagaagaacaaaggaactgaatgagctcaaagctgaagaaatgtatagactccaacaattgagtgtttctgccacccacttagcagacaaggtagaggaggcagttctggatcgtttgaagcctctcttggtcaaggcccagagagtcaattctactacagaagcaaatattcatttgaaagatggctcgtcagtaaacacagcgaaagcccagcctgcacaggaggttgcagctgttgattttgaatccaacaacattcgtcagcttgatgattttttggaagattgtgccagtgagctctgggctgtgactcatgctaagatcttggggtctgaaaccttagccaccgttgaggacagcaaggatagcccagatctggagatcatgatgcgccgaatggaagagatggaaaaataccaggagtctgttcgtcaaagatataataaaatcgcatatgctgatcctcgactttggatgcaggaagaaaacaatgaccaaaaaatctcagcaataagtgaaaagcctctatctcctcatccaatcagaatcacgaagacagtggatcgcaaggatccagccgtgaacatcatgttagaaaggccctgtaatggcaattccctggatgaaagtgtgggaacagaggaaggatcagagaaaagagaggcccctcttctctccctagccgaagattctcaacagaaagaaggccgagctcccctctttgtcccaccgggtatgcagcacagcatcggtgactactgtagtcgttttgagcagtaccttcggatcatatctcatgaggctgtaggctccttcaacccgtggctgatagctgaaagcttttcagaagagctggtagatgaagctctgggtgctgtggctgctgaacttcaggatatgtgcgaagattatgcagaagctgtgttcacctcagaattcttagaggctgctacataaaggctctctgaggcgaggccgtttgtgtcacactggagaagggatggcaccaccctttgttttggcccacaggaaattttcatcctcagctgtccatccaggcccagaaggtgctgcccactgaaaggaaggcagtgccggggaggtcatcctcactttgcattttcttttgtcatggcaatggttctggaaatgtatgatgcaatgtatcacacttatcagtgcccaggcaacacaacttgattatggcaatattttcagaatgtgtacttttcctattgaaataccatgttcattcctctggctcagtttggtgatgaaaatgttttgaaagataatcgatacgtatatttcacacaaggattcaggttgctgttgaacccttgctggcattgataccaacacaagtgcggctactagctggtcccatcacggggcccctgttttgcatctttggcgatttcctgtcaggacctctggccctactaggctgtagactcagggagagcacagtctggctgtgctgccaaacctctcctctgctgcagtttattccaaacaggagccccctggctgtcagtgcacaataatagacacacatttcttcaacgttccattcctaggtgattttcacatttttagttcctcagcatattttattgctgtgtgttgacacaatctggtataaaaaactttctctggattcagaggaagtttgaggaatcaggagaggaccaggccttctcctgtgcctgggtgaaggtacagacctcgctgtgtctccgatgaggtcagaagtgtctctatttcataccacaaaggaacccaagtgggagtagggaacagatggatggcgcgaagacctctgtgtctccccagagaaaggaagaaacttaagaaccatcatagcctggtcctccaacatcttacagatcatgttttccaagagaaaagcctgtgttttcagaaactctgaattcagaaaaagaaacggaatgtgcgtaagaatcaggccactgcctggaaagactttctctcaattcgtagcctgaggctcagtgaaggaaacatgcagaaagaatgcctgagacgcccccagggaataagggaactctttataacctgtccagtgctgtcatctgggatttttctctgaagtacaagaatttcaggtgatttaagctgcttgatcacacttatttgtgcaaaattgattttcatttaatgttaatgttttcctgcttaattttatataacttcagaatgtaaagagcttcaaggtaaattacaaggtgtttaacctggggagttaaatgtgtacacttgaattaataggagcaccggttgttgctagtataaagtaatttgtgtggcagtttgtactgtgctgagtttttaaaataaacccaatattttaaaaaaaaaacctattttaaataacttacatctcctttttttcccacaggcaaagtgaaatgtgatttacagaaaccactgagaatacttttatatgtgatatgactatagtggattatttgccaccccttccccccgagaaaaaaattagtgacaataaaagctaacatttattgagcaccta

SEQ ID NO: 300560 - DNA, 2495 bp, Homo sapiens
tatctccctccactatacctattaattacaaaggggaaaacagtaactttacaagggagaaacctggcagacatcaccgtaacccagtgatgcaaaattaactgacatcattaatggatatcaaatagatatcatggtgcactgaagggacacactatccttctgtggcatctctttcaaaaccgtatgtcctgaatctgatcataaggaaaaaacccaaattgagggatattctccccacccccccaaaaaaaggcttttattctttaaaaaatgttaaggtcatgagaggcaaagaaagactgaaggactattagattacagtagactaaagagctgtgacaacaaaatgcgacatggaatcccagactggaaccttggactagcaaaaaatttcttttgaaggaaattatttggatggttggcaaaatttgaataaggcctgtagatagataggcctgtagaatagatactagttttgtatcaatgttaattttataattgttataattgtaccatagttatttaagagaatgtccttgtttgtagggctacttgggagatacgaagcttgcgccgttcagaaaatgaaggtgtgtgtgtgtgtgtacagaggagcacccgtgcagagtcccctagtgtcctcccccgtctcctacagagaaggcacaccccttcctccgtcggccggtcaggcagctgttagaggtggggctaggttgcagctggttagtttctggtcgcctctggtttcaaacacattgaggatgaagtccatcctgtgtatgttttaggcctgtccctctagcaggactttgggatctaagcaccaccatccttctgtctaggagagcagggcctctcaccttgtttttcttcttcaaaatgctgggatgacaggtgtgagccaccgcgcctggccttgtacatacctttagttgtgttgtttgtcttccagcttttcagaagagctggtagatgaagctctgggtgctgtggctgctgaacttcaggatatgtgcgaagattatgcagaagctgtgttcacctcagaattcttagaggctgctacataaaggctctctgaggcgaggccgtttgtgtcacactggagaagggatggcaccaccctttgttttggcccacaggaaattttcatcctcagctgtccatccaggcccagaaggtgctgcccactgaaaggaaggcagtgccggggaggtcatcctcactttgcattttcttttgtcatggcaatggttctggaaatgtatgatgcaatgtatcacacttatcagtgcccaggcaacacaacttgattatggcaatattttcagaatgtgtacttttcctattgaaataccatgttcattcctctggctcagtttggtgatgaaaatgttttgaaagataatcgatacgtatatttcacacaaggattcaggttgctgttgaacccttgctggcattgataccaacacaagtgcggctactagctggtcccatcacggggcccctgttttgcatctttggcgatttcctgtcaggacctctggccctactaggctgtagactcagggagagcacagtctggctgtgctgccaaacctctcctctgctgcagtttattccaaacaggagccccctggctgtcagtgcacaataatagacacacatttcttcaacgttccattcctaggtgattttcacatttttagttcctcagcatattttattgctgtgtgttgacacaatctggtataaaaaactttctctggattcagaggaagtttgaggaatcaggagaggaccaggccttctcctgtgcctgggtgaaggtacagacctcgctgtgtctccgatgaggtcagaagtgtctctatttcataccacaaaggaacccaagtgggagtagggaacagatggatggcgcgaagacctctgtgtctccccagagaaaggaagaaacttaagaaccatcatagcctggtcctccaacatcttacagatcatgttttccaagagaaaagcctgtgttttcagaaactctgaattcagaaaaagaaacggaatgtgcgtaagaatcaggccactgcctggaaagactttctctcaattcgtagcctgaggctcagtgaaggaaacatgcagaaagaatgcctgagacgcccccagggaataagggaactctttataacctgtccagtgctgtcatctgggatttttctctgaagtacaagaatttcaggtgatttaagctgcttgatcacacttatttgtgcaaaattgattttcatttaatgttaatgttttcctgcttaattttatataacttcagaatgtaaagagcttcaaggtaaattacaaggtgtttaacctggggagttaaatgtgtacacttgaattaataggagcaccggttgttgctagtataaagtaatttgtgtggcagtttgtactgtgctgagtttttaaaataaacccaatattttaaa

SEQ ID NO: 300561 - DNA, 1122 bp, Homo sapiens
  misc_feature (11)..(11): n is a, c, g, or t
  misc_feature (18)..(18): n is a, c, g, or t
ctctatagatncccaccnctactggctgttttgaaagataatcgatacgtatatttcacacaaggattcaggttgctgttgaacccttgctggcattgataccaacacaagtgcggctactagctggtcccatcacggggcccctgttttgcatctttggcgatttcctgtcaggacctctggccctactaggctgtagactcagggagagcacagtctggctgtgctgccaaacctctcctctgctgcagtttattccaaacaggagccccctggctgtcagtgcacaataatagacacacatttcttcaacgttccattcctaggtgattttcacatttttagttcctcagcatattttattgctgtgtgttgacacaatctggtataaaaaactttctctggattcagaggaagtttgaggaatcaggagaggaccaggccttctcctgtgcctgggtgaaggtacagacctcgctgtgtctccgatgaggtcagaagtgtctctatttcataccacaaaggaacccaagtgggagtagggaacagatggatggcgcgaagacctctgtgtctccccagagaaaggaagaaacttaagaaccatcatagcctggtcctccaacatcttacagatcatgttttccaagagaaaagcctgtgttttcagaaactctgaattcagaaaaagaaacggaatgtgcgtaagaatcaggccactgcctggaaagactttctctcaattcgtagcctgaggctcagtgaaggaaacatgcagaaagaatgcctgagacgcccccagggaataagggaactctttataacctgtccagtgctgtcatctgggatttttctctgaagtacaagaatttcaggtgatttaagctgcttgatcacacttatttgtgcaaaattgattttcatttaatgttaatgttttcctgcttaattttatataacttcagaatgtaaagagcttcaaggtaaattacaaggtgtttaacctggggagttaaatgtgtacacttgaattaataggagcaccggttgttgctagtataaagtaatttgtgtggcagtttgtactgtgctgagtttttaaaataaacccaatattttaaa

SEQ ID NO: 300562 - DNA, 565 bp, Homo sapiens
tcttcctttctctggggagacacagagaaaggaagaaacttaagaaccatcatagcctggtcctccaacatcttacagatcatgttttccaagagaaaagcctgtgttttcagaaactctgaattcagaaaaagaaacggaatgtgcgtaagaatcaggccactgcctggaaagactttctctcaattcgtagcctgaggctcagtgaaggaaacatgcagaaagaatgcctgagacgcccccagggaataagggaactctttataacctgtccagtgctgtcatctgggatttttctctgaagtacaagaatttcaggtgatttaagctgcttgatcacacttatttgtgcaaaattgattttcatttaatgttaatgttttcctgcttaattttatataacttcagaatgtaaagagcttcaaggtaaattacaaggtgtttaacctggggagttaaatgtgtacacttgaattaataggagcaccggttgttgctagtataaagtaatttgtgtggcagtttgtactgtgctgagtttttaaaataaacccaatattttaaa

SEQ ID NO: 300563 - DNA, 357 bp, Homo sapiens
tctgtcaagctggatgcagacccttctgttcctgatgtggttatagatattctgcaacaaattgaggtatggaattaattccaatttttgttagaggtgcattggaagtaatgcttactattacctagtttcgttaggatttatggagaatacaagacaaagccattacctagtgaattaaagctttgcagagggcagaagaaacacttctttttgttttgctatttttacagtgtagtctgtattatcgtatttcactgcttcgaaaattggtaacttgaatataaaacatgtaacaactttaaaccaggttcattaactaaacagaatgtcccattccctggcccatgccatttg

SEQ ID NO: 300564 - DNA, 431 bp, Homo sapiens
ggaaaggtatgaagttttcttttttcccctttacaaaacaggtaaaagaaatccaggaagaattggataaattgagtccacataaaattaaacacactaagaaggtatgctgcaattaaattatgatcaatacttgcttataaatgacatttcccagtgttttgttagtattgtgtagggccctctgcactaatgttattttcagtacttgcagaaacctgttagtgagggagtgagcaccttacatattctgaatatggttgccttctaaggaacaggttctaaaaaatagatttttgttgttgttgctgctggtataaaaaattggaagtagtaaggaaaagactgccactaggaaaactttaaactttacaactccctttactatggaaaaagttttcacaataggaaaggcactttatacagaaagg

SEQ ID NO: 300565 - DNA, 431 bp, Homo sapiens
gaatggttttagggaagactgttgccggatgacaaggctgtcactattgttctgtactacctgacattatgggaccaggccagccagcttcaacctgtgttcatctagcacctaggacccaacttgatgggaggagtgaccccaaagtacttcagacccaggtagttctatttttgcctgagatttttattattaaatatttcaaacataaaatttgaaagaaaaggacagtgaacacttttgaaatcacctcctagattcagcaattgctaacaattttttctgtttttctacctactcaaccatctgtctttaaaatttttgcagaatcaccccaaagcaaattgcagtcaacctgatacttctaaatatttgagaatacttctcctaaaaatgaactctcctacttaatcatgatactattcttatac

SEQ ID NO: 300566 - DNA, 792 bp, Homo sapiens
tttctcttgtttgaaaaagtcctaagtgtatgggaagtggctatggtgccctctcactctgcccctcccgtgtgcttgtgctctgcaggtatggatttaacagtcacgggctttcagtggtggaacacaggttacgggccagacagcagaagcaggccaagctcacagaaggtaaagtggggttgtgtcagtgggcctttcttatttattaggaggaaacgtgggagaaatgctgggaacatttctagtgaaataaacatgattgagcaatagcaaaaaccactgaggacctcaggacacctctcctagagcgattttcctggtcccacacagcttccaagagtttaactggattttgcaatttagcaaatactcactttgcctctgccttgttatgtaacctgttaccgtaactagggaggcctgaaagcaagcgaagcaaagcggctgggcaatgatcacacaggcaatgagggcaggagcaggacttgaatgtcatcctcccgtggcccactctgtcctcccttttttgtcatccattgtgtaaataatgttcattaattatagaagacttagtaaatacagagaagcgtaaagaaagaatgttcaagaaacagatactcctccctactcaaggctaactaatattagcatttgggaaaatattcttcatgagttgttttggaaactcatttttggttcgggacagttcacacctgtaatctcaatactttgggtgcccaagttgggaggatcacttgaactcaggagtttaagaccagcctgggcaac

SEQ ID NO: 300567 - DNA, 1515 bp, Homo sapiens
gggcttaatgacggaaggagcatggcgtggagacacctgcaaaagcgggcccaggatgctgtgatcatcctggggggaggaggacttctcttcgcctcctacctgatggccacgggagatgagcgtttctatgctgaacacctgatgccgactctgcaggggctgctggacccggagtcagcccacagactggctgttcgcttcacctccctggggctccttccacgggccagatttcaagactctgacatgctggaagtgagagttctgggccataaattccgaaatccagtaggaattgctgcaggatttgacaagcatggggaagccgtggacggactttataagatgggctttggttttgttgagataggaagtgtgactccaaaacctcaggaaggaaaccctagacccagagtcttccgcctccctgaggaccaagctgtcattaacaggtatggatttaacagtcacgggctttcagtggtggaacacaggttacgggccagacagcagaagcaggccaagctcacagaagatggactgcctctgggggtcaacttggggaagaacaagacctcagtggacgccgcggaggactacgcagaaggggtgcgcgtactgggccccctggccgactacctggtggtgaatgtgtccagccccaacactgccgggctgcggagccttcagggaaaggccgagctgcgccgcctgctgaccaaggtgctgcaggagagggatggcttgcggagagtgcacaggccggcagtcctggtgaagatcgctcctgacctcaccagccaggataaggaggacattgccagtgtggtcaaagagttgggcatcgatgggctgattgttacgaacaccaccgtgagtcgccctgcgggcctccagggtgccctgcgctctgaaacaggagggctgagtgggaagcccctccgggatttatcaactcaaaccattcgggagatgtatgcactcacccaaggccgagttcccataattggggttggtggtgtgagcagcgggcaggacgcgctggagaagatccgggcaggggcctccctggtgcagctgtacacggccctcaccttctgggggccacccgttgtgggcaaagtcaagcgggaactggaggcccttctgaaagagcagggctttggcggagtcacagatgccattggagcagatcatcggaggtgaggacagcgtctgacgggaagcctgatctggaaccttcccaaggactcaggcaagcctttgtggctggatcatgagaggagggactccatcttgagccatgtcccccagccatggcatggctgcactgtaaacgccaatcggggggtcaccaggatcaaccgcaggctttcttcagtcccttggtcagaccataaactgcatttttgattctttgtggattcaaaccctaggatccatcagtcttgcaaggacattgaatattaggaggaaaaagtcatggaaaaaataaagccatttagaacctgg

SEQ ID NO: 300568 - DNA, 2439 bp, Homo sapiens
gggcttaatgacggaaggagcatggcgtggagacacctgcaaaagcgggcccaggatgctgtgatcatcctggggggaggaggacttctcttcgcctcctacctgatggccacgggagatgagcgtttctatgctgaacacctgatgccgactctgcaggggctgctggacccggagtcagcccacagactggctgttcgcttcacctccctggggctccttccacgggccagatttcaagactctgacatgctggaagtgagagttctgggccataaattccgaaatccagtaggaattgctgcaggatttgacaagcatggggaagccgtggacggactttataagatgggctttggttttgttgagataggaagtgtgactccaaaacctcaggaaggaaaccctagacccagagtcttccgcctccctgaggaccaagctgtcattaacaggtatggatttaacagtcacgggctttcagtggtggaacacaggttacgggccagacagcagaagcaggccaagctcacagaagatggactgcctctgggggtcaacttggggaagaacaagacctcagtggacgccgcggaggactacgcagaaggggtgcgcgtactgggccccctggccgactacctggtggtgaatgtgtccagccccaacactgccgggctgcggagccttcagggaaaggccgagctgcgccgcctgctgaccaaggtgctgcaggagagggatggcttgcggagagtgcacaggccggcagtcctggtgaagatcgctcctgacctcaccagccaggataaggaggacattgccagtgtggtcaaagagttgggcatcgatgggctgattgttacgaacaccaccgtgagtcgccctgcgggcctccagggtgccctgcgctctgaaacaggagggctgagtgggaagcccctccgggatttatcaactcaaaccattcgggagatgtatgcactcacccaaggccgagttcccataattggggttggtggtgtgagcagcgggcaggacgcgctggagaagatccgggcaggggcctccctggtgcagctgtacacggccctcaccttctgggggccacccgttgtgggcaaagtcaagcgggaactggaggcccttctgaaagagcagggctttggcggagtcacagatgccattggagcagatcatcggaggtgaggacagcgtctgacgggaagcctgatctggaaccttcccaaggactcaggcaagcctttgtggctggatcatgagaggagggactccatcttgagccatgtcccccagccatggcatggctgcactgtaaacgccaatcggggggtcaccaggatcaaccgcaggctttcttcagtcccttggtcagaccataaactgcatttttgattctttgtggattcaaaccctaggatccatcagtcttgcaaggacattgaatattaggaggaaaaagtcatggaaaaaataaagccatttagaacctgggtttcaacgctagccctttctggtttgccataggccctgccaagatactgcaggtccatccaggcctctgctatctgcatctgcagtgggcttcccaggaacttgactgtctttcatttgatctttatttttgtttatttaatattttaaactttattttaaaaatatttcaaacataagggcggggtgtggtggctcatgcctgtaatcccagcactttgggaggccgaggcgggcggatcacctgaggccaggagttggagaccagccaggccaccatggtgaaaccctgtctctaccaaaaatacaaaaaattagccagatattgtggcaggcacttttaatcccagctactcgggaggctgaggcaggagaattgcttgaacctgggaggcggaggttgcagtgagccaagattgcaccagtgcactccagcttgggcgacagatcaagactctgtcacacacaaaacaaacaaacaaattttcccgtttctctctgtccctttctctataacatggataaaatattcacgtcttatgtatttattattgctgagtcattggtgccttattcttcagtgtttcagtctgtatctcctaagcatcctgatgttagttttttgactataaaattgacctgcattctttactagcaattcaaacggtacagcactcttgaagtgtaaacattcctgttcctcctcaccccactctgcagacatgcctttctgtctgtcctcccagacttttcccctgcataaagatgttcattttgtacatacactcagacatacatgtggctgtattttttgtataccgatttctggatggaatgcacactgttatctgtttagttactttatgttttcatacaaatgacatcatcccacaaatagaattctgccatttactttcttcacta

SEQ ID NO: 300569 - DNA, 2726 bp, Homo sapiens
accagggaccggggagggcgagaacggagagtcaggccgggcgaggcatggaccgaaggcggctccgggagtgtgggcccccctgggacgtgtgcgtgtttccggggtctcctgcaaatgctcgtgcgtgtgcatttgcacgtggactcggtcaggcgtgtgcagacagcgcctgcaggtctgggtgggtgctgatctgagtgtctgcgcctgggccatgtttttgagcctggcacaggggtgcttagtgaacacatgaccgcctagcgttgtgtgccggatccaacggggaatgaaactagagtaggacatgctcccaacccttttagaagcgggcccaggatgctgtgatcatcctggggggaggaggacttctcttcgcctcctacctgatggccacgggagatgagcgtttctatgctgaacacctgatgccgactctgcaggggctgctggacccggagtcagcccacagactggctgttcgcttcacctccctggggctccttccacgggccagatttcaagactctgacatgctggaagtgagagttctgggccataaattccgaaatccagtaggaattgctgcaggatttgacaagcatggggaagccgtggacggactttataagatgggctttggttttgttgagataggaagtgtgactccaaaacctcaggaaggaaaccctagacccagagtcttccgcctccctgaggaccaagctgtcattaacaggtatggatttaacagtcacgggctttcagtggtggaacacaggttacgggccagacagcagaagcaggccaagctcacagaagatggactgcctctgggggtcaacttggggaagaacaagacctcagtggacgccgcggaggactacgcagaaggggtgcgcgtactgggccccctggccgactacctggtggtgaatgtgtccagccccaacactgccgggctgcggagccttcagggaaaggccgagctgcgccgcctgctgaccaaggtgctgcaggagagggatggcttgcggagagtgcacaggccggcagtcctggtgaagatcgctcctgacctcaccagccaggataaggaggacattgccagtgtggtcaaagagttgggcatcgatgggctgattgttacgaacaccaccgtgagtcgccctgcgggcctccagggtgccctgcgctctgaaacaggagggctgagtgggaagcccctccgggatttatcaactcaaaccattcgggagatgtatgcactcacccaaggccgagttcccataattggggttggtggtgtgagcagcgggcaggacgcgctggagaagatccgggcaggggcctccctggtgcagctgtacacggccctcaccttctgggggccacccgttgtgggcaaagtcaagcgggaactggaggcccttctgaaagagcagggctttggcggagtcacagatgccattggagcagatcatcggaggtgaggacagcgtctgacgggaagcctgatctggaaccttcccaaggactcaggcaagcctttgtggctggatcatgagaggagggactccatcttgagccatgtcccccagccatggcatggctgcactgtaaacgccaatcggggggtcaccaggatcaaccgcaggctttcttcagtcccttggtcagaccataaactgcatttttgattctttgtggattcaaaccctaggatccatcagtcttgcaaggacattgaatattaggaggaaaaagtcatggaaaaaataaagccatttagaacctgggtttcaacgctagccctttctggtttgccataggccctgccaagatactgcaggtccatccaggcctctgctatctgcatctgcagtgggcttcccaggaacttgactgtctttcatttgatctttatttttgtttatttaatattttaaactttattttaaaaatatttcaaacataagggcggggtgtggtggctcatgcctgtaatcccagcactttgggaggccgaggcgggcggatcacctgaggccaggagttggagaccagccaggccaccatggtgaaaccctgtctctaccaaaaatacaaaaaattagccagatattgtggcaggcacttttaatcccagctactcgggaggctgaggcaggagaattgcttgaacctgggaggcggaggttgcagtgagccaagattgcaccagtgcactccagcttgggcgacagatcaagactctgtcacacacaaaacaaacaaacaaattttcccgtttctctctgtccctttctctataacatggataaaatattcacgtcttatgtatttattattgctgagtcattggtgccttattcttcagtgtttcagtctgtatctcctaagcatcctgatgttagttttttgactataaaattgacctgcattctttactagcaattcaaacggtacagcactcttgaagtgtaaacattcctgttcctcctcaccccactctgcagacatgcctttctgtctgtcctcccagacttttcccctgcataaagatgttcattttgtacatacactcagacatacatgtggctgtattttttgtataccgatttctggatggaatgcacactgttatctgtttagttactttatgttttcatacaaatgacatcatcccacaaatagaattctgccatttactttcttcacta

SEQ ID NO: 300570 - DNA, 2581 bp, Homo sapiens
accagggaccggggagggcgagaacggagagtcaggccgggcgaggcatggaccgaaggcggctccgggagtgtgggcccccctgggacgtgtgcgtgtttccggggtctcctgcaaatgctcgtgcgtgtgcatttgcacgtggactcggtcaggcgtgtgcagacagcgcctgcaggtctggaagcgggcccaggatgctgtgatcatcctggggggaggaggacttctcttcgcctcctacctgatggccacgggagatgagcgtttctatgctgaacacctgatgccgactctgcaggggctgctggacccggagtcagcccacagactggctgttcgcttcacctccctggggctccttccacgggccagatttcaagactctgacatgctggaagtgagagttctgggccataaattccgaaatccagtaggaattgctgcaggatttgacaagcatggggaagccgtggacggactttataagatgggctttggttttgttgagataggaagtgtgactccaaaacctcaggaaggaaaccctagacccagagtcttccgcctccctgaggaccaagctgtcattaacaggtatggatttaacagtcacgggctttcagtggtggaacacaggttacgggccagacagcagaagcaggccaagctcacagaagatggactgcctctgggggtcaacttggggaagaacaagacctcagtggacgccgcggaggactacgcagaaggggtgcgcgtactgggccccctggccgactacctggtggtgaatgtgtccagccccaacactgccgggctgcggagccttcagggaaaggccgagctgcgccgcctgctgaccaaggtgctgcaggagagggatggcttgcggagagtgcacaggccggcagtcctggtgaagatcgctcctgacctcaccagccaggataaggaggacattgccagtgtggtcaaagagttgggcatcgatgggctgattgttacgaacaccaccgtgagtcgccctgcgggcctccagggtgccctgcgctctgaaacaggagggctgagtgggaagcccctccgggatttatcaactcaaaccattcgggagatgtatgcactcacccaaggccgagttcccataattggggttggtggtgtgagcagcgggcaggacgcgctggagaagatccgggcaggggcctccctggtgcagctgtacacggccctcaccttctgggggccacccgttgtgggcaaagtcaagcgggaactggaggcccttctgaaagagcagggctttggcggagtcacagatgccattggagcagatcatcggaggtgaggacagcgtctgacgggaagcctgatctggaaccttcccaaggactcaggcaagcctttgtggctggatcatgagaggagggactccatcttgagccatgtcccccagccatggcatggctgcactgtaaacgccaatcggggggtcaccaggatcaaccgcaggctttcttcagtcccttggtcagaccataaactgcatttttgattctttgtggattcaaaccctaggatccatcagtcttgcaaggacattgaatattaggaggaaaaagtcatggaaaaaataaagccatttagaacctgggtttcaacgctagccctttctggtttgccataggccctgccaagatactgcaggtccatccaggcctctgctatctgcatctgcagtgggcttcccaggaacttgactgtctttcatttgatctttatttttgtttatttaatattttaaactttattttaaaaatatttcaaacataagggcggggtgtggtggctcatgcctgtaatcccagcactttgggaggccgaggcgggcggatcacctgaggccaggagttggagaccagccaggccaccatggtgaaaccctgtctctaccaaaaatacaaaaaattagccagatattgtggcaggcacttttaatcccagctactcgggaggctgaggcaggagaattgcttgaacctgggaggcggaggttgcagtgagccaagattgcaccagtgcactccagcttgggcgacagatcaagactctgtcacacacaaaacaaacaaacaaattttcccgtttctctctgtccctttctctataacatggataaaatattcacgtcttatgtatttattattgctgagtcattggtgccttattcttcagtgtttcagtctgtatctcctaagcatcctgatgttagttttttgactataaaattgacctgcattctttactagcaattcaaacggtacagcactcttgaagtgtaaacattcctgttcctcctcaccccactctgcagacatgcctttctgtctgtcctcccagacttttcccctgcataaagatgttcattttgtacatacactcagacatacatgtggctgtattttttgtataccgatttctggatggaatgcacactgttatctgtttagttactttatgttttcatacaaatgacatcatcccacaaatagaattctgccatttactttcttcacta

SEQ ID NO: 300571 - DNA, 2682 bp, Homo sapiens
accagggaccggggagggcgagaacggagagtcaggccgggcgaggcatggaccgaaggcggctccgggagtgtgggcccccctgggacgtgtgcgtgtttccggggtctcctgcaaatgctcgtgcgtgtgcatttgcacgtggactcggtcaggcgtgtgcagacagcgcctgcaggtctggaagcgggcccaggatgctgtgatcatcctggggggaggaggacttctcttcgcctcctacctgatggccacgggagatgagcgtttctatgctgaacacctgatgccgactctgcaggggctgctggacccggagtcagcccacagactggctgttcgcttcacctccctggggctccttccacgggccagatttcaagactctgacatgctggtagtgctcccagacaccctatacattaaatacaaaggcgaaggctgcagtcccctaaacttctcagctgggactgatctttttgaaaaccagaaccccaagaagtgagagttctgggccataaattccgaaatccagtaggaattgctgcaggatttgacaagcatggggaagccgtggacggactttataagatgggctttggttttgttgagataggaagtgtgactccaaaacctcaggaaggaaaccctagacccagagtcttccgcctccctgaggaccaagctgtcattaacaggtatggatttaacagtcacgggctttcagtggtggaacacaggttacgggccagacagcagaagcaggccaagctcacagaagatggactgcctctgggggtcaacttggggaagaacaagacctcagtggacgccgcggaggactacgcagaaggggtgcgcgtactgggccccctggccgactacctggtggtgaatgtgtccagccccaacactgccgggctgcggagccttcagggaaaggccgagctgcgccgcctgctgaccaaggtgctgcaggagagggatggcttgcggagagtgcacaggccggcagtcctggtgaagatcgctcctgacctcaccagccaggataaggaggacattgccagtgtggtcaaagagttgggcatcgatgggctgattgttacgaacaccaccgtgagtcgccctgcgggcctccagggtgccctgcgctctgaaacaggagggctgagtgggaagcccctccgggatttatcaactcaaaccattcgggagatgtatgcactcacccaaggccgagttcccataattggggttggtggtgtgagcagcgggcaggacgcgctggagaagatccgggcaggggcctccctggtgcagctgtacacggccctcaccttctgggggccacccgttgtgggcaaagtcaagcgggaactggaggcccttctgaaagagcagggctttggcggagtcacagatgccattggagcagatcatcggaggtgaggacagcgtctgacgggaagcctgatctggaaccttcccaaggactcaggcaagcctttgtggctggatcatgagaggagggactccatcttgagccatgtcccccagccatggcatggctgcactgtaaacgccaatcggggggtcaccaggatcaaccgcaggctttcttcagtcccttggtcagaccataaactgcatttttgattctttgtggattcaaaccctaggatccatcagtcttgcaaggacattgaatattaggaggaaaaagtcatggaaaaaataaagccatttagaacctgggtttcaacgctagccctttctggtttgccataggccctgccaagatactgcaggtccatccaggcctctgctatctgcatctgcagtgggcttcccaggaacttgactgtctttcatttgatctttatttttgtttatttaatattttaaactttattttaaaaatatttcaaacataagggcggggtgtggtggctcatgcctgtaatcccagcactttgggaggccgaggcgggcggatcacctgaggccaggagttggagaccagccaggccaccatggtgaaaccctgtctctaccaaaaatacaaaaaattagccagatattgtggcaggcacttttaatcccagctactcgggaggctgaggcaggagaattgcttgaacctgggaggcggaggttgcagtgagccaagattgcaccagtgcactccagcttgggcgacagatcaagactctgtcacacacaaaacaaacaaacaaattttcccgtttctctctgtccctttctctataacatggataaaatattcacgtcttatgtatttattattgctgagtcattggtgccttattcttcagtgtttcagtctgtatctcctaagcatcctgatgttagttttttgactataaaattgacctgcattctttactagcaattcaaacggtacagcactcttgaagtgtaaacattcctgttcctcctcaccccactctgcagacatgcctttctgtctgtcctcccagacttttcccctgcataaagatgttcattttgtacatacactcagacatacatgtggctgtattttttgtataccgatttctggatggaatgcacactgttatctgtttagttactttatgttttcatacaaatgacatcatcccacaaatagaattctgccatttactttcttcacta

SEQ ID NO: 300572 - DNA, 2614 bp, Homo sapiens
gggcttaatgacggaaggagcatggcgtggagacacctgcaaaagcgggcccaggatgctgtgatcatcctggggggaggaggacttctcttcgcctcctacctgatggccacgggagatgagcgtttctatgctgaacacctgatgccgactctgcaggggctgctggacccggagtcagcccacagactggctgttcgcttcacctccctggggctccttccacgggccagatttcaagactctgacatgctggaagtgagagttctgggccataaattccgaaatccagtaggaattgctgcaggatttgacaagcatggggaagccgtggacggactttataagatgggctttggttttgttgagataggaagtgtgactccaaaacctcaggaaggaaaccctagacccagagtcttccgcctccctgaggaccaagctgtcattaacaggtggggatcaatatcttcagaattggccaggcaaaatatatttgcttaacattcagctgctacagataactgcaggtgctgggatgatggtacttggtgaatcctataggtgagcaggggtgtgagatcctgctctgagccctgtgtgtgcggcctcctggttgtgtggcatgtggtatggatttaacagtcacgggctttcagtggtggaacacaggttacgggccagacagcagaagcaggccaagctcacagaagatggactgcctctgggggtcaacttggggaagaacaagacctcagtggacgccgcggaggactacgcagaaggggtgcgcgtactgggccccctggccgactacctggtggtgaatgtgtccagccccaacactgccgggctgcggagccttcagggaaaggccgagctgcgccgcctgctgaccaaggtgctgcaggagagggatggcttgcggagagtgcacaggccggcagtcctggtgaagatcgctcctgacctcaccagccaggataaggaggacattgccagtgtggtcaaagagttgggcatcgatgggctgattgttacgaacaccaccgtgagtcgccctgcgggcctccagggtgccctgcgctctgaaacaggagggctgagtgggaagcccctccgggatttatcaactcaaaccattcgggagatgtatgcactcacccaaggccgagttcccataattggggttggtggtgtgagcagcgggcaggacgcgctggagaagatccgggcaggggcctccctggtgcagctgtacacggccctcaccttctgggggccacccgttgtgggcaaagtcaagcgggaactggaggcccttctgaaagagcagggctttggcggagtcacagatgccattggagcagatcatcggaggtgaggacagcgtctgacgggaagcctgatctggaaccttcccaaggactcaggcaagcctttgtggctggatcatgagaggagggactccatcttgagccatgtcccccagccatggcatggctgcactgtaaacgccaatcggggggtcaccaggatcaaccgcaggctttcttcagtcccttggtcagaccataaactgcatttttgattctttgtggattcaaaccctaggatccatcagtcttgcaaggacattgaatattaggaggaaaaagtcatggaaaaaataaagccatttagaacctgggtttcaacgctagccctttctggtttgccataggccctgccaagatactgcaggtccatccaggcctctgctatctgcatctgcagtgggcttcccaggaacttgactgtctttcatttgatctttatttttgtttatttaatattttaaactttattttaaaaatatttcaaacataagggcggggtgtggtggctcatgcctgtaatcccagcactttgggaggccgaggcgggcggatcacctgaggccaggagttggagaccagccaggccaccatggtgaaaccctgtctctaccaaaaatacaaaaaattagccagatattgtggcaggcacttttaatcccagctactcgggaggctgaggcaggagaattgcttgaacctgggaggcggaggttgcagtgagccaagattgcaccagtgcactccagcttgggcgacagatcaagactctgtcacacacaaaacaaacaaacaaattttcccgtttctctctgtccctttctctataacatggataaaatattcacgtcttatgtatttattattgctgagtcattggtgccttattcttcagtgtttcagtctgtatctcctaagcatcctgatgttagttttttgactataaaattgacctgcattctttactagcaattcaaacggtacagcactcttgaagtgtaaacattcctgttcctcctcaccccactctgcagacatgcctttctgtctgtcctcccagacttttcccctgcataaagatgttcattttgtacatacactcagacatacatgtggctgtattttttgtataccgatttctggatggaatgcacactgttatctgtttagttactttatgttttcatacaaatgacatcatcccacaaatagaattctgccatttactttcttcacta

SEQ ID NO: 300573 - DNA, 958 bp, Homo sapiens
gggcttaatgacggaaggagcatggcgtggagacacctgcaaaagcgggcccaggatgctgtgatcatcctggggggaggaggacttctcttcgcctcctacctgatggccacgggagatgagcgtttctatgctgaacacctgatgccgactctgcaggggctgctggacccggagtcagcccacagactggctgttcgcttcacctccctggggctccttccacgggccagatttcaagactctgacatgctggaagtgagagttctgggccataaattccgaaatccagtaggaattgctgcaggatttgacaagcatggggaagccgtggacggactttataagatgggctttggttttgttgagataggaagtgtgactccaaaacctcaggaaggaaaccctagacccagagtcttccgcctccctgaggaccaagctgtcattaacaggtatggatttaacagtcacgggctttcagtggtggaacacaggttacgggccagacagcagaagcaggccaagctcacagaagatggactgcctctgggggtcaacttggggaagaacaagacctcagtggacgccgcggaggactacgcagaaggggtgcgcgtactgggccccctggccgactacctggtggtgaatgtgtccagccccaacactgccgggctgcggagccttcagggaaaggccgagctgcgccgcctgctgaccaaggtgctgcaggagagggatggcttgcggagagtgcacaggccggcagtcctggtgaagatcgctcctgacctcaccagccaggataaggaggacattgccagtgtggtcaaagagttgggcatcgatgggctgattgttacgcacacacacacacaattttaacttgtttttttgtacataatgtacatactgtcaattttttattaaaagaaatatgctttgatgtgctagc

SEQ ID NO: 300574 - DNA, 366 bp, Homo sapiens
tgaacacatgaccgcctagcgttgtgtgccggatccaacggggaatgaaactagagtaggacatgctcccaacccttttaggtaaagttttgttaggggcgggggtctctgtgaaaagttcttagctgtatccccgtatgtaataggtgttcagaggccgggcgcggtggctcacgcctgtaatcccagcactttgggaggccgaggcgggtggatcatgaggtcaggagatcgagaccatcctggctaacaaggtgaaaccccgtctctactaaaaatacaaaaaattagccgggcgcggtggcgggcgcctgtagtcccagctactcgggaggctgaggcaggagaatggcgtgaacccgggaa

SEQ ID NO: 300575 - DNA, 450 bp, Homo sapiens
  misc_feature (82)..(82): n is a, c, g, or t
aaccccagagcgggatactcgggatctgagcagaggggaaagtcatctaagaggctgctgctttacaaggtctgggcacagngctgcccctcccttcctccctgaagtttgcatgaagtgcacattaggctgtaattaggggatttgggaggagaactttcctggtgacgctttgcttttcttctgctcttggtgagaaagtgcctccttcttcccaggatcaggacctctgccatccagcgccacaaagagacattctgcacacacactcacacacacacacacacacacactctcacactcgcccagagacaaacttaaggtgaggagaaagagcgctagcttcacttgatctccagcttccaacttaagcagaacttgagagcatccgaactcctggatttcaggacaaggtaaaacttgcaaattgtttccccctcttttggttat

SEQ ID NO: 300576 - DNA, 4882 bp, Homo sapiens
  misc_feature (82)..(82): n is a, c, g, or t
aaccccagagcgggatactcgggatctgagcagaggggaaagtcatctaagaggctgctgctttacaaggtctgggcacagngctgcccctcccttcctccctgaagtttgcatgaagtgcacattaggctgtaattaggggatttgggaggagaactttcctggtgacgctttgcttttcttctgctcttggtgagaaagtgcctccttcttcccaggatcaggacctctgccatccagcgccacaaagagacattctgcacacacactcacacacacacacacacacacactctcacactcgcccagagacaaacttaaggtgaggagaaagagcgctagcttcacttgatctccagcttccaacttaagcagaacttgagagcatccgaactcctggatttcaggacaagtgaagaagattctttgggctataaagatgaagagtctacttcttctggtgctgatttcaatctgctgggctgatcatctttcagacaactatactctggatcatgacagagctattcacatccaagcagaaaatggcccccatctacttgtggaagcagagcaagccaaggtgttttcacacagaggtggcaatgttacactgccatgtaaattttatcgagaccctacagcatttggctcaggaatccataaaatccgaattaagtggaccaagctaacttcggattacctcaaggaagtggatgtttttgtttccatgggataccacaaaaaaacctatggaggctaccagggtagagtgtttctgaagggaggcagtgatagtgatgcttctctggtcatcacagacctcactctggaagattatgggagatataagtgtgaggtgattgaaggattagaagatgatactgttgtggtagcactggacttacaaggtgtggtattcccttactttccacgactggggcgctacaatctcaattttcacgaggcgcagcaggcgtgtctggaccaggatgctgtgatcgcctccttcgaccagctgtacgacgcctggcggggcgggctggactggtgcaatgccggctggctcagtgatggctctgtgcaatatcccatcacaaagcccagagagccctgtgggggccagaacacagtgcccggagtcaggaactacggattttgggataaagataaaagcagatatgatgttttctgttttacatccaatttcaatggccgtttttactatctgatccaccccaccaaactgacctatgatgaagcggtgcaagcttgtctcaatgatggtgctcagattgcaaaagtgggccagatatttgctgcctggaaaattctcggatatgaccgctgtgatgcgggctggttggcggatggcagcgtccgctaccccatctctaggccaagaaggcgctgcagtcctactgaggctgcagtgcgcttcgtgggtttcccagataaaaagcataagctgtatggtgtctactgcttcagagcatacaactgaatgtgcccttagagcgcatcagttttaaagtcattaagaacatgtgaaaggtgttttttttttccaatatgaactcatgcaagttaccaaaactgtgataacccttttttacttactgtaaagagtcattttcataaagatcaattcattgatttgttttttgtaaagctatcattcaatatatattataaattaatataaatttaagggaagctctatgtaaggagacttagagccaaactgtttaagctgtatcatcccaacaaagtatcctttcatgaacggggcatgcaatagcttaagaattgctaggattaaattaaggaaagtaaagctactcagagcagcaggttccacaagcacaaactttacacatttgtacaattttgaaatgcactacaataaacaaattagagcaacacatttgaaatacaggcttctttacataaactgagaggttatacaaaactcagtttcacaagggaacaatctatacctttctaaaagttaatatttcaagtctctaataggcagaatattttactctttaaaatcctgcctttctgaccaaaaaaaaaaaaaaaaattcatatggattccaatccatagttaacaagcacagttaaaactcctcaataatcccatttatatgaagcatgacacataaataagcagataatatttaaccaatgaaaaagacttctaccttcttataattaaaattacacatgtctaagaggaattgttttatcttttgagtagctttaccgagttgtatttaaattctaagggccatttgctaagcagcatttagcatctactcagggcagttatatagataaactgctggacagaaaaattgtaaaatttagcagcttgattttctgttagcctatgaaatgttattgtcctataaaaataactttaaactgatttaatatttcatatttacattatatgaaaatcaattacattataaaaggaatccctaatgcagaaacaaagatgcaactttcaaaattcttattattcctatttgtatatacacgagagaacccaaccagtgcctgtgtttggggggaaaagtcaacagtgtagttctaaaccttatcccaaacagaaaatgtggttaatgatgtcactttccttgctggtcatcattaggcttaaattaaatgctgaagctgtcatcaaagagtttacactaaaatcttcagggctttaaataaaaggttaagtccagcttccaaacacaattttccacattagcagctccaatcttcttaaataaagctctgttttcctatatttttatgactgctgagaccccacagggaccaatatttgtattcaaattacatttcatggtttcccattgtttcacaatgagttctaataaatgggatttactataataatccaagtatgacatagccggtatgctttcatgaatgtttttatgtagattttcctcccatgaacatgagtaaataaatctgtttcctgaatggattgtggttgcatttaaagctctgtaataattctaataaatttactctatagagttctgtgtgtggaaggtatagaacaattggaagtccatgaaaccataactataatcatatattattcagacaaaatattgtaataaaagtaggtcctttctttcatcaaaaacatatctgaaaattttcagatgctttaatattaaaagatgacaatgttatgtatgcacatttttaagttaggttggatatgcaaactgtacaaaactataaatccaaagagtttgtaaagtttaaactcaaacactggtggtataaatagaacttgcacttctaaattaaggaagatacctaaatggtctaggatgagatgatatattatttaaagaggggactatctcccaaataacaactttaacacctcaaatatgggggctagctcattgaaagaagtccatacttgaactattattatgtatgttccgataattttgttgaaaatacaagtgggaacaaatttctattgaagcaaacatctaattttcagttatgtccagaactctactttataatgttaaatgtagtagtatttcttaacttttaaatacttactactataggaatggtgctgatcaaaatctctggagtgactgttagctgattaaaatctataccacttacacatcatttttccattcgtgtaaaaaacaaaaaatcttaacacagtgaatactgctgagcagaattttttcttctcattttgctcaaaggaccagaatttccatgccctttatactcatacttgaatgagtctttttaatgttctcattttgctgtttttccaccaaatgtctattttcctacttcattccccaagatgtctcactgagcaggtctgaaaaagaaaggttattctaatacaattcctaacagaaagttggtacaacactggctaattcagaaatcgctcctcagacttagattccaagagtatcaaagagattagatgggaggctgggccaggaacccttgttttaatgtatttgtccataattaacactggtgaccatataaggaacaaagtatatctgcacatttcactgagacatctacattggaaaacccaaacaaaaagaagcaattcaaataaaaagacaacataagaacgaaaataagttggtcacattaacactggaagccatctttaagtgagtgctgtcatattgtgtcacagtaatttttagccaaatatggcgtttgtaaatttaaactttctctcatggaaagggggctggtacctgtcaaagtgttattttatgcaacaatatagtcactttttattttggcaattagaagtagactcaaaggagattacaatttggttgctggcagccattctgggtttcttgattttagtactccaaagaatatggtggtctcatggagtagctgaccactaaggaggggaggattaaaagggaatcacttatcagtttttagcataggatgcattaagaaatatcaacggataactgacatcgttttgttaagaagttaactgtatcatagctcactactgccagagcggcaatggatgtacaacgaaagagatgaaaaatacaaaagttattaagccacctgattaaaagaaaaccaatatttaaaggcatttaatagatatcaagtataactttgaggagaagaatcaatctgtattaccaaaaaaaaaatgttttcattttctgtaagatacaatgaactggtacattaaaagtcaattttgtgttactgcagtatcttttaattcttctgagttgtagaatcttagctatttttctttgtgtcaaactctgtcaatacattatttccaaga

SEQ ID NO: 300577 - DNA, 2906 bp, Homo sapiens
  misc_feature (82)..(82): n is a, c, g, or t
  misc_feature (2515)..(2515): n is a, c, g, or t
  misc_feature (2523)..(2523): n is a, c, g, or t
  misc_feature (2582)..(2582): n is a, c, g, or t
  misc_feature (2812)..(2812): n is a, c, g, or t
aaccccagagcgggatactcgggatctgagcagaggggaaagtcatctaagaggctgctgctttacaaggtctgggcacagngctgcccctcccttcctccctgaagtttgcatgaagtgcacattaggctgtaattaggggatttgggaggagaactttcctggtgacgctttgcttttcttctgctcttggtgagaaagtgcctccttcttcccaggatcaggacctctgccatccagcgccacaaagagacattctgcacacacactcacacacacacacacacacacactctcacactcgcccagagacaaacttaaggtgaggagaaagagcgctagcttcacttgatctccagcttccaacttaagcagaacttgagagcatccgaactcctggatttcaggacaagtgaagaagattctttgggctataaagatgaagagtctacttcttctggtgctgatttcaatctgctgggctgatcatctttcagacaactatactctggatcatgacagagctattcacatccaagcagaaaatggcccccatctacttgtggaagcagagcaagccaaggtgttttcacacagaggtggcaatgttacactgccatgtaaattttatcgagaccctacagcatttggctcaggaatccataaaatccgaattaagtggaccaagctaacttcggattacctcaaggaagtggatgtttttgtttccatgggataccacaaaaaaacctatggaggctaccagggtagagtgtttctgaagggaggcagtgatagtgatgcttctctggtcatcacagacctcactctggaagattatgggagatataagtgtgaggtgattgaaggattagaagatgatactgttgtggtagcactggacttacaaggtgtggtattcccttactttccacgactggggcgctacaatctcaattttcacgaggcgcagcaggcgtgtctggaccaggatgctgtgatcgcctccttcgaccagctgtacgacgcctggcggggcgggctggactggtgcaatgccggctggctcagtgatggctctgtgcaatatcccatcacaaagcccagagagccctgtgggggccagaacacagtgcccggagtcaggaactacggattttgggataaagataaaagcagatatgatgttttctgttttacatccaatttcaatggccgtttttactatctgatccaccccaccaaactgacctatgatgaagcggtgcaagcttgtctcaatgatggtgctcagattgcaaaagtgggccagatatttgctgcctggaaaattctcggatatgaccgctgtgatgcgggctggttggcggatggcagcgtccgctaccccatctctaggccaagaaggcgctgcagtcctactgaggctgcagtgcgcttcgtgggtttcccagataaaaagcataagctgtatggtgtctactgcttcagagcatacaactgaatgtgcccttagagcgcatcagttttaaagtcattaagaacatgtgaaaggtgttttttttttccaatatgaactcatgcaagttaccaaaactgtgataacccttttttacttactgtaaagagtcattttcataaagatcaattcattgatttgttttttgtaaagctatcattcaatatatattataaattaatataaatttaagggaagctctatgtaaggagacttagagccaaactgtttaagctgtatcatcccaacaaagtatcctttcatgaacggggcatgcaatagcttaagaattgctaggattaaattaaggaaagtaaagctactcagagcagcaggttccacaagcacaaactttacacatttgtacaattttgaaatgcactacaataaacaaattagagcaacacatttgaaatacaggcttctttacataaactgagaggttatacaaaactcagtttcacaagggaacaatctatacctttctaaaagttaatatttcaagtctctaataggcagaatattttactctttaaaatcctgcctttctgaccaaaaaaaaaaaaaaaaattcatatggattccaatccatagttaacaagcacagttaaaactcctcaataatcccatttatatgaagcatgacacataaataagcagataatatttaaccaatgaaaaagacttctaccttcttataattaaaattacacatgtctaagaggaattgttttatcttttgagtagctttaccgagttgtatttaaattctaagggccatttgctaagcagcatttagcatctactcagggcagttatatagataaactgctggacagaaaaattgtaaaatttagcagcttgattttctgttagcctatgaaatgttattgtcctataaaaataactttaaactgatttaatatttcatatttacattatatgaaaatcaattacattataaaaggaatccctggaaatcccttaatgggcagnaaaaacanaaaggatgggccaaaccttttcaaaaaaaattcttaatttaatttccttattttgggtnattaataccaacggaggaggaaacccaaaccacggtgggcctgggtggtttttggggggggggggaaaaaaaggtcaaaccaggtgggtaggtttcttaaaaaccttttatcccccaaaaacaaggaaaaaaatggtgggggttaaatgggatggtcaccttttccttgggctggggtcaatccatttaaggggctttaaaaattaaaaatggcttggaaaagcttggtncatcaaaaagggaggtttttaccaccttaaaaaaatccttcagggggccttttaaaaataaaaaaaggggttaaaggtccaggcttccaaaaac

SEQ ID NO: 300578 - DNA, 743 bp, Homo sapiens
  misc_feature (30)..(30): n is a, c, g, or t
  misc_feature (660)..(660): n is a, c, g, or t
tcacgacacgacaaacggtcgagcaatacnaaaaagcaccaccacaccaaccgctggtttacttttggacatcaagcccatcactgccagccagtgaagaaggattccagcctatgccctcaatcacaataagaccaccagatgaccaacatcttcctactgcaaatacttgcatttctcgactttacgtcccactctattcctctaaacagattctcaaacagaaattgttactcgccattaagaccaagaattttggttttgtgtagagtataaaaagtgtgtattgctgtgtaatattactagcaaattttgtagatttttttccatttgtctataaaagtttatggaagttaatgctgtcatacccccctggtggtaccttaaagagataaaatgcagacattccttgctgagtttatagcttaaaggcctaaggagcactagcaacatttggctatattggtttgctagtcaccaacttctgggtctaaccccagccaaagatgacagcagaacaacataatttacactgtgatttatctttttgctgagggggaaaaaatgtaaatgttctgaaaattcactgctgcctttgtggaaactgtttcagcaaaggttcttgtatagagggaatagggaatttcaaaataaaaagtnaaaaaaaaaacaattggcctcactggccctcagaggtggaagtcctgcaggccccttcctttgagagaggggtgaatcaagga

SEQ ID NO: 300579 - DNA, 944 bp, Homo sapiens
cattatatttattgtatcttcatttgaacaaattattactacttttggagcagactttatctgttagcaagctgtagttggaacacattaatgctgattagtattgcaggaagaattttattttgaatgttctatcaagagtttttctttatatgatatgaaacacaaattagttatgttttttgtctttatgcataactgtatgtacacattttatagtgaaagaataacagaaaactattatttcttccagcaagtcctcagccttaaacataggtatatttttctctaccctacccccttctttttttctaccctaaataaaagatatttctggctctctgatgaagaaaaaaatatggaaattgagtatatgtatgtttaactcagagatataaaaaaacctaaaaagaaaacttgtcatacaaatattataagtagccttaacaagatgtggtactgcatggactgtttattccctgccaagtttctctataattgatcttccagtttcataaaagaccttactggttctgaaattttgtatttgttacccaagtttcttattttattttttttttaaataaaagattgtagatgtaattagacaagaggttttagagagtagtcaagtaacatttgttcatcatttacaggcatttgcaagtaaaatcactggcatgttgttggaattatccccagctcagctgcttctccttctagcaagtgaggattctctgagagcaagagtggatgaggccatggaactcattattgcacatggacggtaatgtgtacaattgggaaggcatttcagtttaaacatcagctacttactttcagtatgtgggtgccatcatatcttaaaatttatgtcataaagtataagactttaaatgcatttttatttattttttaaatgatagcttaaattccatgaatga

SEQ ID NO: 300580 - DNA, 491 bp, Homo sapiens
tatgatagcatgctgaagtggcttctgtttggattggagatgaatcttgttaaagtccaacccaccaactgaacaggaaactcatgggatgtagctacaagcaactttcctccccttctctctccactcccggggtggagagagaaagggaaatgaggaggagtagtggtttgcgagcaggttctcggagggaccgggataggtaaattttgtatctttgattcaataccacctttttggatgaattagagataggcctgtaaatgaaagaatcttaattatggattattttttagaaaagtaaagttttaattttgaacatatgtatagtaactaagaatagtctgttaataaaatacaataactaagaatagtctattaactaataaaaagttctgctttaaaaacccagaggcggttgaaattatattctttttatctgactcaagttcctatttgaatttttttacccatatcattctctcctaagt

SEQ ID NO: 300581 - DNA, 357 bp, Homo sapiens
  misc_feature (324)..(324): n is a, c, g, or t
  misc_feature (336)..(336): n is a, c, g, or t
  misc_feature (346)..(346): n is a, c, g, or t
  misc_feature (353)..(353): n is a, c, g, or t
cattcaaatatccacacaatactttaattacatgtctattcaatgtgataggacatgtaattaaagtattgcttggtagaaaagtcaattggcatgattttgctttttttgatcctgtaatgtatgagagtttgcggcaactaatcctcgcgtctcagagttcagatgctgatgctgttttctcagcaatggatttggcatttgcaattgacctgtgtaaagaagaaggtggaggacaggttgaactcattcctaatggtgtaaatataccagtcactccacagaatgtatatgagtatgtgcggatatttgaatgggggatcnactagagtcggnctgcaggaangggagtncaaa

SEQ ID NO: 300582 - DNA, 10525 bp, Homo sapiens
cgccctcgagtggaggacgagaaggaaagcaccatgacgtccatccatttcgtggttcacccgctgccgggcaccgaggaccagctcaatgacaggttacgagaagtttctgagaagctgaacaaatataatttaaacagccacccccctttgaatgtattggaacaggctactattaaacagtgtgtggtgggaccaaatcatgctgcctttcttcttgaggatggtagagtttgcaggattggtttttcagtacagccagacagattggaattgggtaaacctgataataatgatgggtcaaagttgaacagcaactcgggggcagggaggacgtcaaggcctggtaggacaagcgactctccatggtttctctcaggttctgagactctaggcaggctggcaggcaacaccttaggaagccgctggagttctggagtgggtggaagtggtggaggatcctctggtaggtcatcagctggagctcgagattcccgccggcagactcgagttattcggacaggacgggatcgagggtctgggcttttgggcagtcagccccagccagttattccagcatctgtcattccagaggagctgatttcacaggcccaagttgttttacaaggcaaatccagaagtgtcattattcgagaacttcagagaacaaatcttgatgtgaaccttgctgtaaataatttacttagccgggatgatgaagatggagatgatggggatgatacagccagcgaatcttatttgcctggagaggatcttatgtctctccttgatgccgacattcattctgcccacccaagtgtcattattgatgcagatgccatgttttctgaagacattagctattttggttacccttcttttcgtcgttcatcactttccaggctaggctcatctcgagttctccttcttcccttagagagagactctgagctgttgcgtgaacgtgaatccgttttacgtttacgtgaacgaaggtggcttgatggagcctcatttgataatgaaaggggttctaccagcaaggaaggagagccaaacttggataagaagaatacacctgttcaaagtccagtatctctaggagaagatttgcagtggtggcctgataaggatggaacaaaattcatctgtattggggctctgtattctgaacttctggctgtcagcagtaaaggagaactttatcagtggaaatggagtgaatctgagccttacagaaatgcccagaatccttcattacatcatccacgagcaacatttttggggttaaccaatgaaaagatagtcctcctgtctgcaaatagcataagagcaactgtagctacagaaaataacaaggttgctacatgggtggatgaaactttaagttctgtggcttctaaattagagcacactgctcagacttactctgaacttcaaggagagcggatagtttctttacattgctgtgccctttacacctgcgctcagctggaaaacagtttatattggtggggtgtagttccttttagtcaaaggaagaaaatgttagagaaagctagagcaaaaaataaaaagcctaaatccagtgctggtatttcttcaatgccgaacatcactgttggtacccaggtatgcttgagaaataatcctctttatcatgctggagcagttgcattttcaattagtgctgggattcctaaagttggtgtcttaatggagtcagtttggaatatgaatgacagctgtagatttcaacttagatctcctgaaagcttgaaaaacatggaaaaagctagcaaaactactgaagctaagcctgaaagtaagcaggagccagtgaaaacagaaatgggtcctccaccatctccagcatccacgtgtagtgatgcatcctcaattgccagcagtgcatcaatgccatacaaacgacgacggtcaacccctgcaccaaaagaagaggaaaaggtgaatgaagagcagtggtctcttcgggaagtggtttttgtggaagatgtcaagaatgttcctgttggcaaggtgctaaaagtagatggtgcctatgttgctgtaaaatttccaggaacctccagtaatactaactgtcagaacagctctggtccagatgctgacccttcttctctcctgcaggattgtaggttacttagaattgatgaattgcaggttgtcaaaactggtggaacaccgaaggttcccgactgtttccaaaggactcctaaaaagctttgtatacctgaaaaaacagaaatattagcagtgaatgtagattccaaaggtgttcatgctgttctgaagactggaaattgggtacgatactgtatctttgatcttgctacaggaaaagcagaacaggaaaataattttcctacaagcagcattgctttccttggtcagaatgagaggaatgtagccattttcactgctggacaggaatctcccattattcttcgagatggaaatggtaccatctacccaatggccaaagattgcatgggaggaataagggatcccgattggctggatcttccacctattagtagtcttggaatgggtgtgcattctttaataaatcttcctgccaattcaacaatcaaaaagaaagctgctgttatcatcatggctgtagagaaacaaaccttaatgcaacacattctgcgctgtgactatgaggcctgtcgacaatatctaatgaatcttgagcaagcggttgttttagagcagaatctacagatgctgcagacattcatcagccacagatgtgatggaaatcgaaatattttgcatgcttgtgtatcagtttgctttccaaccagcaataaagaaactaaagaagaagaggaagcggagcgttctgaaagaaatacatttgcagaaaggctttctgctgttgaggccattgcaaatgcaatatcagttgtttcaagtaatggcccaggtaatcgggctggatcatcaagtagccgaagtttgagattacgggaaatgatgagacgttcgttgagagcagctggtttgggtagacatgaagctggagcttcatccagtgaccaccaggatccagtttcaccccccatagctccccctagttgggttcctgaccctcctgcgatggatcctgatggtgacattgattttatcctggcccccgctgtgggatctcttaccacagcagcaaccggtactggtcaaggaccaagcacctccactattccaggtccttccacagagccatctgtagtagaatccaaggatcgaaaggcgaatgctcattttatattgaaattgttatgtgacagtgtggttctccagccctatctacgagaacttctttctgccaaggatgcaagagggatgaccccatttatgtcagctgtaagtggccgagcttatcctgctgcaattaccatcttagaaactgctcagaaaattgcaaaagctgaaatatcctcaagtgaaaaagaggaagatgtattcatgggaatggtttgcccatcaggtaccaaccctgatgactctcctttatatgttttatgttgtaatgacacttgcagttttacatggactggagcagagcacattaaccaggatatttttgagtgtcgaacttgtggcttgctggagtcactgtgttgttgtacggaatgtgcaagggtttgtcataaaggtcatgattgcaaactcaaacggacatcaccaacagcctactgtgattgttgggagaaatgtaaatgtaaaactcttattgctggacagaaatctgctcgtcttgatctactttatcgcctgctcactgctactaatctggttactctgccaaacagcaggggagagcacctcttactattcttagtacagacagtcgcaaggcagacggtggagcattgtcaatacaggccacctcgaatcagggaagatcgtaaccgaaaaacagccagtcctgaagattcagatatgccagatcatgatttagagcctccaagatttgcccagcttgcattggagcgtgttctacaggactggaatgccttgaaatctatgattatgtttgggtcgcaggagaataaagaccctcttagtgccagcagtagaataggccatcttttgccagaagagcaagtatacctcaatcagcaaagtggcacaattcggctggactgtttcactcattgccttatagttaagtgtacagcagatattttgcttttagatactctactaggtacactagtgaaagaactccaaaacaaatatacacctggacgtagagaagaagctattgctgtgacaatgaggtttctacgttcagtggcaagagtttttgttattctgagtgtggaaatggcttcatccaaaaagaaaaacaactttattccacagccaattggaaaatgcaagcgtgtattccaagcattgctaccttacgctgtggaagaattgtgcaacgtagcagagtcactgattgttcctgtcagaatggggattgctcgtccaactgcaccatttaccctggctagtactagcatagatgccatgcagggcagtgaagaattattttcagtggaaccactaccaccacgaccatcatctgatcagtctagcagctccagtcagtctcagtcatcctacatcatcaggaatccacagcagaggcgcatcagccagtcacagcccgttcggggcagagatgaagaacaggatgatattgtttcagcagatgtggaagaggttgaggtggtggagggtgtggctggagaagaggatcatcatgatgaacaggaagaacacggggaagaaaatgctgaggcagagggacaacatgatgagcatgatgaagacgggagtgatatggagctggacttgttagcagcagctgaaacagaaagtgatagtgaaagtaaccacagcaaccaagataatgctagtgggcgcagaagcgttgtcactgcagcaactgctggttcagaagcaggagcaagcagtgttcctgccttcttttctgaagatgattctcaatcgaatgactcaagtgattctgatagcagtagtagtcagagtgacgacatagaacaggagacctttatgcttgatgagccattagaaagaaccacaaatagctcccatgccaatggtgctgcccaagctccccgttcaatgcagtgggctgtccgcaacacccagcatcagcgagcagccagtacagccccttccagtacatctacaccagcagcaagttcagcgggtttgatttatattgatccttcaaacttacgccggagtggtaccatcagtacaagtgctgcagctgcagcagctgctttggaagctagcaacgccagcagttacctaacatctgcaagcagtttagccagggcttacagcattgtcattagacaaatctcggacttgatgggccttattcctaagtataatcacctagtatactctcagattccagcagctgtgaaattgacttaccaagatgcagtaaacttacagaactatgtagaagaaaagcttattcccacttggaactggatggtcagtattatggattctactgaagctcaattacgttatggttctgcattagcatctgctggtgatcctggacatccaaatcatcctcttcacgcttctcagaattcagcgagaagagagaggatgactgcgcgagaagaagctagcttacgaacacttgaaggcagacgacgtgccaccttgcttagcgcccgtcaaggaatgatgtctgcacgaggagacttcctaaattatgctctgtctctaatgcggtctcataatgatgagcattctgatgttcttccagttttggatgtttgctcattgaagcatgtggcatatgtttttcaagcacttatatactggattaaggcaatgaatcagcagacaacattggatacacctcaactagaacgcaaaaggacgcgagaactcttggaactgggtattgataatgaagattcagaacatgaaaatgatgatgacaccaatcaaagtgctactttgaatgataaggatgatgactctcttcctgcagaaactggccaaaaccatccatttttccgacgttcagactccatgacattccttgggtgtatacccccaaatccatttgaagtgcctctggctgaagccatccccttggctgatcagccacatctgttgcagccaaatgctagaaaggaggatctttttggccgtccaagtcagggtctttattcttcatctgccagtagtgggaaatgtttaatggaggttacagtggatagaaactgcctagaggttcttccaacaaaaatgtcttatgctgccaatctgaaaaatgtaatgaacatgcaaaaccggcaaaaaaaagaaggggaagaacagcccgtgctgccagaagaaactgagagttcaaaaccagggccatctgctcatgatcttgctgcacaattaaaaagtagcttactagcagaaataggacttactgaaagtgaagggccacctctcacatctttcaggccacagtgtagctttatgggaatggttatttcccatgatatgctgctaggacgttggcgcctttctttagaactgttcggcagggtattcatggaagatgttggagcagaacctggatcaatcctaactgaattgggtggttttgaggtaaaagaatcaaaattccgcagagaaatggaaaaactgagaaaccagcagtcaagagatttgtcactagaggttgatcgggatcgagatcttctcattcagcagactatgaggcagcttaacaatcactttggtcgaagatgtgctactacaccaatggctgtacacagagtaaaagtcacatttaaggatgagccaggagagggcagtggtgtagcacgaagtttttatacagccattgcacaagcatttttatcaaatgaaaaattgccaaatctagagtgtatccaaaatgccaacaaaggcacccacacaagtttaatgcagagattaaggaaccgaggagagagagaccgggaaagggagagagaaagggaaatgaggaggagtagtggtttgcgagcaggttctcggagggaccgggatagagactttagaagacagctttccatcgacactaggccctttagaccagcctctgaagggaatcctagcgatgatcctgagcctttgccagcacatcggcaggcacttggagagaggctttatcctcgtgtacaagcaatgcaaccagcatttgcaagtaaaatcactggcatgttgttggaattatccccagctcagctgcttctccttctagcaagtgaggattctctgagagcaagagtggatgaggccatggaactcattattgcacatggacgggaaaatggagctgatagtatcctggatcttggattagtagactcctcagaaaaggtacagcaggaaaaccgaaagcgccatggctctagtcgaagtgtagtagatatggatttagatgatacagatgatggtgatgacaatgcccctttgttttaccaacctgggaaaagaggattttatactccaaggcctggcaagaacacagaagcaaggttgaattgtttcagaaacattggcaggattcttggactatgtctgttacagaatgaactatgtcctatcacattgaatagacatgtaattaaagtattgcttggtagaaaagtcaattggcatgattttgctttttttgatcctgtaatgtatgagagtttgcggcaactaatcctcgcgtctcagagttcagatgctgatgctgttttctcagcaatggatttggcatttgcaattgacctgtgtaaagaagaaggtggaggacaggttgaactcattcctaatggtgtaaatataccagtcactccacagaatgtatatgagtatgtgcggaaatacgcagaacacagaatgttggtagttgcagaacagcccttacatgcaatgaggaaaggtctactagatgtgcttccaaaaaattcattagaagatttaacggcagaagattttaggcttttggtaaatggctgcggtgaagtcaatgtgcaaatgctgatcagttttacctctttcaatgatgaatcaggagaaaatgctgagaagcttctgcagttcaagcgttggttctggtcaatagtagagaagatgagcatgacagaacgacaagatcttgtttacttttggacatcaagcccatcactgccagccagtgaagaaggattccagcctatgccctcaatcacaataagaccaccagatgaccaacatcttcctactgcaaatacttgcatttctcgactttacgtcccactctattcctctaaacagattctcaaacagaaattgttactcgccattaagaccaagaattttggttttgtgtagagtataaaaagtgtgtattgctgtgtaatattactagcaaattttgtagatttttttccatttgtctataaaagtttatggaagttaatgctgtcatacccccctggtggtaccttaaagagataaaatgcagacattccttgctgagtttatagcttaaaggcctaaggagcactagcaacatttggctatattggtttgctagtcaccaacttctgggtctaaccccagccaaagatgacagcagaacaacataatttacactgtgatttatctttttgctgagggggaaaaaatgtaaatgttctgaaaattcactgctgcctttgtggaaactgtttcagcaaaggttcttgtatagagggaatagggaatttcaaaataaaaaattaagtatgttctgtgttttcattttaactttttttatggtgtttaatttgtggttggctgcaactgtgtatcatgtatatggaacttgtaaaaaagttctcgacattcagatcttaagagatgaaatcacttttacctataaaaaccacttttattgcggtttgactgcattgagctctaggatattaaatgatatcactaatattttgcatgtaatttgctcatttgagtgagggcactttttttgtacatatgatggggccaatgcacaatacttttatcacaatcaactttttctttgtatccctatttcaatgagcagtcagtctcaagaggttactgcacttcagttctaactagacatttgtactaaggtatttcagttatgtaaactcagcctgggcactttctgataactgtaaaatgttttataagatcatgattattgaagatacattttggaaaattttaaatgttcgtgagcagcttaactacttttgtatctagccttttttaagtatcttgttacatttacttttttaaataaagaaattacagaagaaatgtcaagtaatattgaagaaacaatagtttttatttatgtagttgtacatttttaaactaagggcaatacactgacatggttatgtgcataaaaattttgacttaaagaactggaagtttatatacacctggactataagaaacagaagaaaatcagtccacattttacagttagcagagaatcctaaatggcactggcctggccaccttttcattttacaaatgggggaagtgaagtgtgaccccttacttggcataggaagttaacttacacctaataactgacaggtttttgttttgatgacctattaattatgtagcctaggattaatatcccaaaattactctggtttaagtagctttattcagtggcataataacactgttttcttccttaagtcttcaatgaagtgacttaaaacagtcactttacatattaaaaatgaggagagcaattctctggaatctctcctttcagttcctttgtaggatttctggccttgaggatagtcttcatgttcaaaggcactatgcttttattatataacttccttcagaagactgaaccacatgatattctcagccctgttaacactaaaaatatttaaaactgaatgatagtagtgactcattgtattacttaaaacttatataacacgctgtattagatgtgtgtaaattagccaaaggttattttacaaagtgagacattggtttttatgtctaaatgctatttctgaataaatgaaatagtaattagatcaagagctgattagcatcaatgtgtttgaaagatataaaatttatacatcaccttaacctctgtatgcacatgatgggattgataaaatattaaatgagaacaaactagatatgattaggacatttgaaaccctaattgtgaatttatttttaatagttactgaaatgaaaatatttaaaataatgcacaatgtcttaagtcttcctaaatcaagattttggttaaaaaatacttctaataatagtaaaagattttttttttaagtaaatcataaaacggttctaaatgtaaaataaagacatgtaaaataaagttctcttttggtcttgtttagtgtttaaatctaacaattgaaaacaaatttaggaagagaag

SEQ ID NO: 300583 - DNA, 10455 bp, Homo sapiens
cgccctcgagtggaggacgagaaggaaagcaccatgacgtccatccatttcgtggttcacccgctgccgggcaccgaggaccagctcaatgacaggttacgagaagtttctgagaagctgaacaaatataatttaaacagccacccccctttgaatgtattggaacaggctactattaaacagtgtgtggtgggaccaaatcatgctgcctttcttcttgaggatggtagagtttgcaggattggtttttcagtacagccagacagattggaattgggtaaacctgataataatgatgggtcaaagttgaacagcaactcgggggcagggaggacgtcaaggcctggtaggacaagcgactctccatggtttctctcaggttctgagactctaggcaggctggcaggcaacaccttaggaagccgctggagttctggagtgggtggaagtggtggaggatcctctggtaggtcatcagctggagctcgagattcccgccggcagactcgagttattcggacaggacgggatcgagggtctgggcttttgggcagtcagccccagccagttattccagcatctgtcattccagaggagctgatttcacaggcccaagttgttttacaaggcaaatccagaagtgtcattattcgagaacttcagagaacaaatcttgatgtgaaccttgctgtaaataatttacttagccgggatgatgaagatggagatgatggggatgatacagccagcgaatcttatttgcctggagaggatcttatgtctctccttgatgccgacattcattctgcccacccaagtgtcattattgatgcagatgccatgttttctgaagacattagctattttggttacccttcttttcgtcgttcatcactttccaggctaggctcatctcgagttctccttcttcccttagagagagactctgagctgttgcgtgaacgtgaatccgttttacgtttacgtgaacgaaggtggcttgatggagcctcatttgataatgaaaggggttctaccagcaaggaaggagagccaaacttggataagaagaatacacctgttcaaagtccagtatctctaggagaagatttgcagtggtggcctgataaggatggaacaaaattcatctgtattggggctctgtattctgaacttctggctgtcagcagtaaaggagaactttatcagtggaaatggagtgaatctgagccttacagaaatgcccagaatccttcattacatcatccacgagcaacatttttggggttaaccaatgaaaagatagtcctcctgtctgcaaatagcataagagcaactgtagctacagaaaataacaaggttgctacatgggtggatgaaactttaagttctgtggcttctaaattagagcacactgctcagacttactctgaacttcaaggagagcggatagtttctttacattgctgtgccctttacacctgcgctcagctggaaaacagtttatattggtggggtgtagttccttttagtcaaaggaagaaaatgttagagaaagctagagcaaaaaataaaaagcctaaatccagtgctggtatttcttcaatgccgaacatcactgttggtacccaggtatgcttgagaaataatcctctttatcatgctggagcagttgcattttcaattagtgctgggattcctaaagttggtgtcttaatggagtcagtttggaatatgaatgacagctgtagatttcaacttagatctcctgaaagcttgaaaaacatggaaaaagctagcaaaactactgaagctaagcctgaaagtaagcaggagccagtgaaaacagaaatgggtcctccaccatctccagcatccacgtgtagtgatgcatcctcaattgccagcagtgcatcaatgccatacaaacgacgacggtcaacccctgcaccaaaagaagaggaaaaggtgaatgaagagcagtggtctcttcgggaagtggtttttgtggaagatgtcaagaatgttcctgttggcaaggtgctaaaagtagatggtgcctatgttgctgtaaaatttccaggaacctccagtaatactaactgtcagaacagctctggtccagatgctgacccttcttctctcctgcaggattgtaggttacttagaattgatgaattgcaggttgtcaaaactggtggaacaccgaaggttcccgactgtttccaaaggactcctaaaaagctttgtatacctgaaaaaacagaaatattagcagtgaatgtagattccaaaggtgttcatgctgttctgaagactggaaattgggtacgatactgtatctttgatcttgctacaggaaaagcagaacaggaaaataattttcctacaagcagcattgctttccttggtcagaatgagaggaatgtagccattttcactgctggacaggaatctcccattattcttcgagatggaaatggtaccatctacccaatggccaaagattgcatgggaggaataagggatcccgattggctggatcttccacctattagtagtcttggaatgggtgtgcattctttaataaatcttcctgccaattcaacaatcaaaaagaaagctgctgttatcatcatggctgtagagaaacaaaccttaatgcaacacattctgcgctgtgactatgaggcctgtcgacaatatctaatgaatcttgagcaagcggttgttttagagcagaatctacagatgctgcagacattcatcagccacagatgtgatggaaatcgaaatattttgcatgcttgtgtatcagtttgctttccaaccagcaataaagaaactaaagaagaagaggaagcggagcgttctgaaagaaatacatttgcagaaaggctttctgctgttgaggccattgcaaatgcaatatcagttgtttcaagtaatggcccaggtaatcgggctggatcatcaagtagccgaagtttgagattacgggaaatgatgagacgttcgttgagagcagctggtttgggtagacatgaagctggagcttcatccagtgaccaccaggatccagtttcaccccccatagctccccctagttgggttcctgaccctcctgcgatggatcctgatggtgacattgattttatcctggcccccgctgtgggatctcttaccacagcagcaaccggtactggtcaaggaccaagcacctccactattccaggtccttccacagagccatctgtagtagaatccaaggatcgaaaggcgaatgctcattttatattgaaattgttatgtgacagtgtggttctccagccctatctacgagaacttctttctgccaaggatgcaagagggatgaccccatttatgtcagctgtaagtggccgagcttatcctgctgcaattaccatcttagaaactgctcagaaaattgcaaaagctgaaatatcctcaagtgaaaaagaggaagatgtattcatgggaatggtttgcccatcaggtaccaaccctgatgactctcctttatatgttttatgttgtaatgacacttgcagttttacatggactggagcagagcacattaaccaggatatttttgagtgtcgaacttgtggcttgctggagtcactgtgttgttgtacggaatgtgcaagggtttgtcataaaggtcatgattgcaaactcaaacggacatcaccaacagcctactgtgattgttgggagaaatgtaaatgtaaaactcttattgctggacagaaatctgctcgtcttgatctactttatcgcctgctcactgctactaatctggttactctgccaaacagcaggggagagcacctcttactattcttagtacagacagtcgcaaggcagacggtggagcattgtcaatacaggccacctcgaatcagggaagatcgtaaccgaaaaacagccagtcctgaagattcagatatgccagatcatgatttagagcctccaagatttgcccagcttgcattggagcgtgttctacaggactggaatgccttgaaatctatgattatgtttgggtcgcaggagaataaagaccctcttagtgccagcagtagaataggccatcttttgccagaagagcaagtatacctcaatcagcaaagtggcacaattcggctggactgtttcactcattgccttatagttaagtgtacagcagatattttgcttttagatactctactaggtacactagtgaaagaactccaaaacaaatatacacctggacgtagagaagaagctattgctgtgacaatgaggtttctacgttcagtggcaagagtttttgttattctgagtgtggaaatggcttcatccaaaaagaaaaacaactttattccacagccaattggaaaatgcaagcgtgtattccaagcattgctaccttacgctgtggaagaattgtgcaacgtagcagagtcactgattgttcctgtcagaatggggattgctcgtccaactgcaccatttaccctggctagtactagcatagatgccatgcagggcagtgaagaattattttcagtggaaccactaccaccacgaccatcatctgatcagtctagcagctccagtcagtctcagtcatcctacatcatcaggaatccacagcagaggcgcatcagccagtcacagcccgttcggggcagagatgaagaacaggatgatattgtttcagcagatgtggaagaggttgaggtggtggagggtgtggctggagaagaggatcatcatgatgaacaggaagaacacggggaagaaaatgctgaggcagagggacaacatgatgagcatgatgaagacgggagtgatatggagctggacttgttagcagcagctgaaacagaaagtgatagtgaaagtaaccacagcaaccaagataatgctagtgggcgcagaagcgttgtcactgcagcaactgctggttcagaagcaggagcaagcagtgttcctgccttcttttctgaagatgattctcaatcgaatgactcaagtgattctgatagcagtagtagtcagagtgacgacatagaacaggagacctttatgcttgatgagccattagaaagaaccacaaatagctcccatgccaatggtgctgcccaagctccccgttcaatgcagtgggctgtccgcaacacccagcatcagcgagcagccagtacagccccttccagtacatctacaccagcagcaagttcagcgggtttgatttatattgatccttcaaacttacgccggagtggtaccatcagtacaagtgctgcagctgcagcagctgctttggaagctagcaacgccagcagttacctaacatctgcaagcagtttagccagggcttacagcattgtcattagacaaatctcggacttgatgggccttattcctaagtataatcacctagtatactctcagattccagcagctgtgaaattgacttaccaagatgcagtaaacttacagaactatgtagaagaaaagcttattcccacttggaactggatggtcagtattatggattctactgaagctcaattacgttatggttctgcattagcatctgctggtgatcctggacatccaaatcatcctcttcacgcttctcagaattcagcgagaagagagaggatgactgcgcgagaagaagctagcttacgaacacttgaaggcagacgacgtgccaccttgcttagcgcccgtcaaggaatgatgtctgcacgaggagacttcctaaattatgctctgtctctaatgcggtctcataatgatgagcattctgatgttcttccagttttggatgtttgctcattgaagcatgtggcatatgtttttcaagcacttatatactggattaaggcaatgaatcagcagacaacattggatacacctcaactagaacgcaaaaggacgcgagaactcttggaactgggtattgataatgaagattcagaacatgaaaatgatgatgacaccaatcaaagtgctactttgaatgataaggatgatgactctcttcctgcagaaactggccaaaaccatccatttttccgacgttcagactccatgacattccttgggtgtatacccccaaatccatttgaagtgcctctggctgaagccatccccttggctgatcagccacatctgttgcagccaaatgctagaaaggaggatctttttggccgtccaagtcagggtctttattcttcatctgccagtagtgggaaatgtttaatggaggttacagtggatagaaactgcctagaggttcttccaacaaaaatgtcttatgctgccaatctgaaaaatgtaatgaacatgcaaaaccggcaaaaaaaagaaggggaagaacagcccgtgctgccagaagaaactgagagttcaaaaccagggccatctgctcatgatcttgctgcacaattaaaaagtagcttactagcagaaataggacttactgaaagtgaagggccacctctcacatctttcaggccacagtgtagctttatgggaatggttatttcccatgatatgctgctaggacgttggcgcctttctttagaactgttcggcagggtattcatggaagatgttggagcagaacctggatcaatcctaactgaattgggtggttttgaggtaaaagaatcaaaattccgcagagaaatggaaaaactgagaaaccagcagtcaagagatttgtcactagaggttgatcgggatcgagatcttctcattcagcagactatgaggcagcttaacaatcactttggtcgaagatgtgctactacaccaatggctgtacacagagtaaaagtcacatttaaggatgagccaggagagggcagtggtgtagcacgaagtttttatacagccattgcacaagcatttttatcaaatgaaaaattgccaaatctagagtgtatccaaaatgccaacaaaggcacccacacaagtttaatgcagagattaaggaaccgaggagagagagaccgggaaagggagagagaaagggaaatgaggaggagtagtggtttgcgagcaggttctcggagggaccgggatagagactttagaagacagctttccatcgacactaggccctttagaccagcctctgaagggaatcctagcgatgatcctgagcctttgccagcacatcggcaggcacttggagagaggctttatcctcgtgtacaagcaatgcaaccagcatttgcaagtaaaatcactggcatgttgttggaattatccccagctcagctgcttctccttctagcaagtgaggattctctgagagcaagagtggatgaggccatggaactcattattgcacatggacgggaaaatggagctgatagtatcctggatcttggattagtagactcctcagaaaaggtacagcaggaaaaccgaaagcgccatggctctagtcgaagtgtagtagatatggatttagatgatacagatgatggtgatgacaatgcccctttgttttaccaacctgggaaaagaggattttatactccaaggcctggcaagaacacagaagcaaggttgaattgtttcagaaacattggcaggattcttggactatgtctgttacagaatgaactatgtcctatcacattgaatagacatgtaattaaagtattgcttggtagaaaagtcaattggcatgattttgctttttttgatcctgtaatgtatgagagtttgcggcaactaatcctcgcgtctcagagttcagatgctgatgctgttttctcagcaatggatttggcatttgcaattgacctgtgtaaagaagaaggtggaggacaggttgaactcattcctaatggtgtaaatataccagtcactccacagaatgtatatgagtatgtgcggaaatacgcagaacacagaatgttggtagttgcagaacagcccttacatgcaatgaggaaaggtctactagatgtgcttccaaaaaattcattagaagatttaacggcagaagattttaggcttttggtaaatggctgcggtgaagtcaatgtgcaaatgctgatcagttttacctctttcaatgatgaatcaggagaaaatgctgagaagcttctgcagttcaagcgttggttctggtcaatagtagagaagatgagcatgacagaacgacaagatcttgtttacttttggacatcaagcccatcactgccagccagtgaagaaggattccagcctatgccctcaatcacaataagaccaccagatgaccaacatcttcctactgcaaatacttgcatttctcgactttacgtcccactctattcctctaaacagattctcaaacagaaattgttactcgccattaagaccaagaattttggttttgtgtagagtataaaaagtgtgtattgctgtgtaatattactagcaaattttgtagatttttttccatttgtctataaaagtttatggaagttaatgctgtcatacccccctggtggtaccttaaagagataaaatgcagacattccttgctgagtttatagcttaaaggcctaaggagcactagcaacatttggctatattggtttgctagtcaccaacttctgggtctaaccccagccaaagatgacagcagaacaacataatttacactgtgatttatctttttgctgagggggaaaaaatgtaaatgttctgaaaattcactgctgcctttgtggaaactgtttcagcaaaggttcttgtatagagggaatagggaatttcaaaataaaaaattaagtatgttctgtgttttcattttaactttttttatggtgtttaatttgtggttggctgcaactgtgtatcatgtatatggaacttgtaaaaaagttctcgacattcagatcttaagagatgaaatcacttttacctataaaaaccacttttattgcggtttgactgcattgagctctaggatattaaatgatatcactaatattttgcatgtaatttgctcatttgagtgagggcactttttttgtacatatgatggggccaatgcacaatacttttatcacaatcaactttttctttgtatccctatttcaatgagcagtcagtctcaagaggttactgcacttcagttctaactagacatttgtactaaggtatttcagttatgtaaactcagcctgggcactttctgataactgtaaaatgttttataagatcatgattattgaagatacattttggaaaattttaaatgttcgtgagcagcttaactacttttgtatctagccttttttaagtatcttgttacatttacttttttaaataaagaaattacagaagaaatgtcaagtaatattgaagaaacaatagtttttatttatgtagttgtacatttttaaactaagggcaatacactgacatggttatgtgcataaaaattttgacttaaagaactggaagtttatatacacctggactataagaaacagaagaaaatcagtccacattttacagttagcagagaatcctaaatggcactggcctggccaccttttcattttacaaatgggggaagtgaagtgtgaccccttacttggcataggaagttaacttacacctaataactgacaggtttttgttttgatgacctattaattatgtagcctaggattaatatcccaaaattactctggtttaagtagctttattcagtggcataataacactgttttcttccttaagtcttcaatgaagtgacttaaaacagtcactttacatattaaaaatgaggagagcaattctctggaatctctcctttcagttcctttgtaggatttctggccttgaggatagtcttcatgttcaaaggcactatgcttttattatataacttccttcagaagactgaaccacatgatattctcagccctgttaacactaaaaatatttaaaactgaatgatagtagtgactcattgtattacttaaaacttatataacacgctgtattagatgtgtgtaaattagccaaaggttattttacaaagtgagacattggtttttatgtctaaatgctatttctgaataaatgaaatagtaattagatcaagagctgattagcatcaatgtgtttgaaagatataaaatttatacatcaccttaacctctgtatgcacatgatgggattgataaaatattaaatgagaacaaactagatatgattaggacatttgaaaccctaattgtgaatttatttttaatagttactgaaatgaaaatatttaaaataatgcacaatgtcttaagtcttcctaaatcaagattttggttaaaaaatacttctaataatagtaaaagattttttttttaagtaaatcataaaacggttctaaatgtaaaataaagacatgta

SEQ ID NO: 300584 - DNA, 9396 bp, Homo sapiens
cgccctcgagtggaggacgagaaggaaagcaccatgacgtccatccatttcgtggttcacccgctgccgggcaccgaggaccagctcaatgacaggttacgagaagtttctgagaagctgaacaaatataatttaaacagccacccccctttgaatgtattggaacaggctactattaaacagtgtgtggtgggaccaaatcatgctgcctttcttcttgaggatggtagagtttgcaggattggtttttcagtacagccagacagattggaattgggtaaacctgataataatgatgggtcaaagttgaacagcaactcgggggcagggaggacgtcaaggcctggtaggacaagcgactctccatggtttctctcaggttctgagactctaggcaggctggcaggcaacaccttaggaagccgctggagttctggagtgggtggaagtggtggaggatcctctggtaggtcatcagctggagctcgagattcccgccggcagactcgagttattcggacaggacgggatcgagggtctgggcttttgggcagtcagccccagccagttattccagcatctgtcattccagaggagctgatttcacaggcccaagttgttttacaaggcaaatccagaagtgtcattattcgagaacttcagagaacaaatcttgatgtgaaccttgctgtaaataatttacttagccgggatgatgaagatggagatgatggggatgatacagccagcgaatcttatttgcctggagaggatcttatgtctctccttgatgccgacattcattctgcccacccaagtgtcattattgatgcagatgccatgttttctgaagacattagctattttggttacccttcttttcgtcgttcatcactttccaggctaggctcatctcgagttctccttcttcccttagagagagactctgagctgttgcgtgaacgtgaatccgttttacgtttacgtgaacgaaggtggcttgatggagcctcatttgataatgaaaggggttctaccagcaaggaaggagagccaaacttggataagaagaatacacctgttcaaagtccagtatctctaggagaagatttgcagtggtggcctgataaggatggaacaaaattcatctgtattggggctctgtattctgaacttctggctgtcagcagtaaaggagaactttatcagtggaaatggagtgaatctgagccttacagaaatgcccagaatccttcattacatcatccacgagcaacatttttggggttaaccaatgaaaagatagtcctcctgtctgcaaatagcataagagcaactgtagctacagaaaataacaaggttgctacatgggtggatgaaactttaagttctgtggcttctaaattagagcacactgctcagacttactctgaacttcaaggagagcggatagtttctttacattgctgtgccctttacacctgcgctcagctggaaaacagtttatattggtggggtgtagttccttttagtcaaaggaagaaaatgttagagaaagctagagcaaaaaataaaaagcctaaatccagtgctggtatttcttcaatgccgaacatcactgttggtacccaggtatgcttgagaaataatcctctttatcatgctggagcagttgcattttcaattagtgctgggattcctaaagttggtgtcttaatggagtcagtttggaatatgaatgacagctgtagatttcaacttagatctcctgaaagcttgaaaaacatggaaaaagctagcaaaactactgaagctaagcctgaaagtaagcaggagccagtgaaaacagaaatgggtcctccaccatctccagcatccacgtgtagtgatgcatcctcaattgccagcagtgcatcaatgccatacaaacgacgacggtcaacccctgcaccaaaagaagaggaaaaggtgaatgaagagcagtggtctcttcgggaagtggtttttgtggaagatgtcaagaatgttcctgttggcaaggtgctaaaagtagatggtgcctatgttgctgtaaaatttccaggaacctccagtaatactaactgtcagaacagctctggtccagatgctgacccttcttctctcctgcaggattgtaggttacttagaattgatgaattgcaggttgtcaaaactggtggaacaccgaaggttcccgactgtttccaaaggactcctaaaaagctttgtatacctgaaaaaacagaaatattagcagtgaatgtagattccaaaggtgttcatgctgttctgaagactggaaattgggtacgatactgtatctttgatcttgctacaggaaaagcagaacaggaaaataattttcctacaagcagcattgctttccttggtcagaatgagaggaatgtagccattttcactgctggacaggaatctcccattattcttcgagatggaaatggtaccatctacccaatggccaaagattgcatgggaggaataagggatcccgattggctggatcttccacctattagtagtcttggaatgggtgtgcattctttaataaatcttcctgccaattcaacaatcaaaaagaaagctgctgttatcatcatggctgtagagaaacaaaccttaatgcaacacattctgcgctgtgactatgaggcctgtcgacaatatctaatgaatcttgagcaagcggttgttttagagcagaatctacagatgctgcagacattcatcagccacagatgtgatggaaatcgaaatattttgcatgcttgtgtatcagtttgctttccaaccagcaataaagaaactaaagaagaagaggaagcggagcgttctgaaagaaatacatttgcagaaaggctttctgctgttgaggccattgcaaatgcaatatcagttgtttcaagtaatggcccaggtaatcgggctggatcatcaagtagccgaagtttgagattacgggaaatgatgagacgttcgttgagagcagctggtttgggtagacatgaagctggagcttcatccagtgaccaccaggatccagtttcaccccccatagctccccctagttgggttcctgaccctcctgcgatggatcctgatggtgacattgattttatcctggcccccgctgtgggatctcttaccacagcagcaaccggtactggtcaaggaccaagcacctccactattccaggtccttccacagagccatctgtagtagaatccaaggatcgaaaggcgaatgctcattttatattgaaattgttatgtgacagtgtggttctccagccctatctacgagaacttctttctgccaaggatgcaagagggatgaccccatttatgtcagctgtaagtggccgagcttatcctgctgcaattaccatcttagaaactgctcagaaaattgcaaaagctgaaatatcctcaagtgaaaaagaggaagatgtattcatgggaatggtttgcccatcaggtaccaaccctgatgactctcctttatatgttttatgttgtaatgacacttgcagttttacatggactggagcagagcacattaaccaggatatttttgagtgtcgaacttgtggcttgctggagtcactgtgttgttgtacggaatgtgcaagggtttgtcataaaggtcatgattgcaaactcaaacggacatcaccaacagcctactgtgattgttgggagaaatgtaaatgtaaaactcttattgctggacagaaatctgctcgtcttgatctactttatcgcctgctcactgctactaatctggttactctgccaaacagcaggggagagcacctcttactattcttagtacagacagtcgcaaggcagacggtggagcattgtcaatacaggccacctcgaatcagggaagatcgtaaccgaaaaacagccagtcctgaagattcagatatgccagatcatgatttagagcctccaagatttgcccagcttgcattggagcgtgttctacaggactggaatgccttgaaatctatgattatgtttgggtcgcaggagaataaagaccctcttagtgccagcagtagaataggccatcttttgccagaagagcaagtatacctcaatcagcaaagtggcacaattcggctggactgtttcactcattgccttatagttaagtgtacagcagatattttgcttttagatactctactaggtacactagtgaaagaactccaaaacaaatatacacctggacgtagagaagaagctattgctgtgacaatgaggtttctacgttcagtggcaagagtttttgttattctgagtgtggaaatggcttcatccaaaaagaaaaacaactttattccacagccaattggaaaatgcaagcgtgtattccaagcattgctaccttacgctgtggaagaattgtgcaacgtagcagagtcactgattgttcctgtcagaatggggattgctcgtccaactgcaccatttaccctggctagtactagcatagatgccatgcagggcagtgaagaattattttcagtggaaccactaccaccacgaccatcatctgatcagtctagcagctccagtcagtctcagtcatcctacatcatcaggaatccacagcagaggcgcatcagccagtcacagcccgttcggggcagagatgaagaacaggatgatattgtttcagcagatgtggaagaggttgaggtggtggagggtgtggctggagaagaggatcatcatgatgaacaggaagaacacggggaagaaaatgctgaggcagagggacaacatgatgagcatgatgaagacgggagtgatatggagctggacttgttagcagcagctgaaacagaaagtgatagtgaaagtaaccacagcaaccaagataatgctagtgggcgcagaagcgttgtcactgcagcaactgctggttcagaagcaggagcaagcagtgttcctgccttcttttctgaagatgattctcaatcgaatgactcaagtgattctgatagcagtagtagtcagagtgacgacatagaacaggagacctttatgcttgatgagccattagaaagaaccacaaatagctcccatgccaatggtgctgcccaagctccccgttcaatgcagtgggctgtccgcaacacccagcatcagcgagcagccagtacagccccttccagtacatctacaccagcagcaagttcagcgggtttgatttatattgatccttcaaacttacgccggagtggtaccatcagtacaagtgctgcagctgcagcagctgctttggaagctagcaacgccagcagttacctaacatctgcaagcagtttagccagggcttacagcattgtcattagacaaatctcggacttgatgggccttattcctaagtataatcacctagtatactctcagattccagcagctgtgaaattgacttaccaagatgcagtaaacttacagaactatgtagaagaaaagcttattcccacttggaactggatggtcagtattatggattctactgaagctcaattacgttatggttctgcattagcatctgctggtgatcctggacatccaaatcatcctcttcacgcttctcagaattcagcgagaagagagaggatgactgcgcgagaagaagctagcttacgaacacttgaaggcagacgacgtgccaccttgcttagcgcccgtcaaggaatgatgtctgcacgaggagacttcctaaattatgctctgtctctaatgcggtctcataatgatgagcattctgatgttcttccagttttggatgtttgctcattgaagcatgtggcatatgtttttcaagcacttatatactggattaaggcaatgaatcagcagacaacattggatacacctcaactagaacgcaaaaggacgcgagaactcttggaactgggtattgataatgaagattcagaacatgaaaatgatgatgacaccaatcaaagtgctactttgaatgataaggatgatgactctcttcctgcagaaactggccaaaaccatccatttttccgacgttcagactccatgacattccttgggtgtatacccccaaatccatttgaagtgcctctggctgaagccatccccttggctgatcagccacatctgttgcagccaaatgctagaaaggaggatctttttggccgtccaagtcagggtctttattcttcatctgccagtagtgggaaatgtttaatggaggttacagtggatagaaactgcctagaggttcttccaacaaaaatgtcttatgctgccaatctgaaaaatgtaatgaacatgcaaaaccggcaaaaaaaagaaggggaagaacagcccgtgctgccagaagaaactgagagttcaaaaccagggccatctgctcatgatcttgctgcacaattaaaaagtagcttactagcagaaataggacttactgaaagtgaagggccacctctcacatctttcaggccacagtgtagctttatgggaatggttatttcccatgatatgctgctaggacgttggcgcctttctttagaactgttcggcagggtattcatggaagatgttggagcagaacctggatcaatcctaactgaattgggtggttttgaggtaaaagaatcaaaattccgcagagaaatggaaaaactgagaaaccagcagtcaagagatttgtcactagaggttgatcgggatcgagatcttctcattcagcagactatgaggcagcttaacaatcactttggtcgaagatgtgctactacaccaatggctgtacacagagtaaaagtcacatttaaggatgagccaggagagggcagtggtgtagcacgaagtttttatacagccattgcacaagcatttttatcaaatgaaaaattgccaaatctagagtgtatccaaaatgccaacaaaggcacccacacaagtttaatgcagagattaaggaaccgaggagagagagaccgggaaagggagagagaaagggaaatgaggaggagtagtggtttgcgagcaggttctcggagggaccgggatagagactttagaagacagctttccatcgacactaggccctttagaccagcctctgaagggaatcctagcgatgatcctgagcctttgccagcacatcggcaggcacttggagagaggctttatcctcgtgtacaagcaatgcaaccagcatttgcaagtaaaatcactggcatgttgttggaattatccccagctcagctgcttctccttctagcaagtgaggattctctgagagcaagagtggatgaggccatggaactcattattgcacatggacgggaaaatggagctgatagtatcctggatcttggattagtagactcctcagaaaaggtacagcaggaaaaccgaaagcgccatggctctagtcgaagtgtagtagatatggatttagatgatacagatgatggtgatgacaatgcccctttgttttaccaacctgggaaaagaggattttatactccaaggcctggcaagaacacagaagcaaggttgaattgtttcagaaacattggcaggattcttggactatgtctgttacagaatgaactatgtcctatcacattgaatagacatgtaattaaagtattgcttggtagaaaagtcaattggcatgattttgctttttttgatcctgtaatgtatgagagtttgcggcaactaatcctcgcgtctcagagttcagatgctgatgctgttttctcagcaatggatttggcatttgcaattgacctgtgtaaagaagaaggtggaggacaggttgaactcattcctaatggtgtaaatataccagtcactccacagaatgtatatgagtatgtgcggaaatacgcagaacacagaatgttggtagttgcagaacagcccttacatgcaatgaggaaaggtctactagatgtgcttccaaaaaattcattagaagatttaacggcagaagattttaggcttttggtaaatggctgcggtgaagtcaatgtgcaaatgctgatcagttttacctctttcaatgatgaatcaggagaaaatgctgagaagcttctgcagttcaagcgttggttctggtcaatagtagagaagatgagcatgacagaacgacaagatcttgtttacttttggacatcaagcccatcactgccagccagtgaagaaggattccagcctatgccctcaatcacaataagaccaccagatgaccaacatcttcctactgcaaatacttgcatttctcgactttacgtcccactctattcctctaaacagattctcaaacagaaattgttactcgccattaagaccaagaattttggttttgtgtagagtataaaaagtgtgtattgctgtgtaatattactagcaaattttgtagatttttttccatttgtctataaaagtttatggaagttaatgctgtcatacccccctggtggtaccttaaagagataaaatgcagacattccttgctgagtttatagcttaaaggcctaaggagcactagcaacatttggctatattggtttgctagtcaccaacttctgggtctaaccccagccaaagatgacagcagaacaacataatttacactgtgatttatctttttgctgagggggaaaaaatgtaaatgttctgaaaattcactgctgcctttgtggaaactgtttcagcaaaggttcttgtatagagggaatagggaatttcaaaataaaaaattaagtatgttctgtgttttcattttaactttttttatggtgtttaatttgtggttggctgcaactgtgtatcatgtatatggaacttgtaaaaaagttctcgacattcagatcttaagagatgaaatcacttttacctataaaaaccacttttattgcggtttgactgcattgagctctaggatattaaatgatatcactaatattttgcatgtaatttgctcatttgagtgagggcactttttttgtacatatgatggggccaatgcacaatacttttatcacaatcaactttttctttgtatccctatttcaatgagcagtcagtctcaagaggttactgcacttcagttctaactagacatttgtactaaggtatttcagttatgtaaactcagcctgggcactttctgataactgtaaaatgttttataagatcatgattattgaagatacattttggaaaattttaaatgttcgtgagcagcttaactacttttgtatctagccttttttaagtatcttgttacatttacttttttaaataaagaaattacagaagaaatgtcaagta

SEQ ID NO: 300585 - DNA, 10471 bp, Homo sapiens
cgccctcgagtggaggacgagaaggaaagcaccatgacgtccatccatttcgtggttcacccgctgccgggcaccgaggaccagctcaatgacaggttacgagaagtttctgagaagctgaacaaatataatttaaacagccacccccctttgaatgtattggaacaggctactattaaacagtgtgtggtgggaccaaatcatgctgcctttcttcttgaggatggtagagtttgcaggattggtttttcagtacagccagacagattggaattgggtaaacctgataataatgatgggtcaaagttgaacagcaactcgggggcagggaggacgtcaaggcctggtaggacaagcgactctccatggtttctctcaggttctgagactctaggcaggctggcaggcaacaccttaggaagccgctggagttctggagtgggtggaagtggtggaggatcctctggtaggtcatcagctggagctcgagattcccgccggcagactcgagttattcggacaggacgggatcgagggtctgggcttttgggcagtcagccccagccagttattccagcatctgtcattccagaggagctgatttcacaggcccaagttgttttacaaggcaaatccagaagtgtcattattcgagaacttcagagaacaaatcttgatgtgaaccttgctgtaaataatttacttagccgggatgatgaagatggagatgatggggatgatacagccagcgaatcttatttgcctggagaggatcttatgtctctccttgatgccgacattcattctgcccacccaagtgtcattattgatgcagatgccatgttttctgaagacattagctattttggttacccttcttttcgtcgttcatcactttccaggctaggctcatctcgagttctccttcttcccttagagagagactctgagctgttgcgtgaacgtgaatccgttttacgtttacgtgaacgaaggtggcttgatggagcctcatttgataatgaaaggggttctaccagcaaggaaggagagccaaacttggataagaagaatacacctgttcaaagtccagtatctctaggagaagatttgcagtggtggcctgataaggatggaacaaaattcatctgtattggggctctgtattctgaacttctggctgtcagcagtaaaggagaactttatcagtggaaatggagtgaatctgagccttacagaaatgcccagaatccttcattacatcatccacgagcaacatttttggggttaaccaatgaaaagatagtcctcctgtctgcaaatagcataagagcaactgtagctacagaaaataacaaggttgctacatgggtggatgaaactttaagttctgtggcttctaaattagagcacactgctcagacttactctgaacttcaaggagagcggatagtttctttacattgctgtgccctttacacctgcgctcagctggaaaacagtttatattggtggggtgtagttccttttagtcaaaggaagaaaatgttagagaaagctagagcaaaaaataaaaagcctaaatccagtgctggtatttcttcaatgccgaacatcactgttggtacccaggtatgcttgagaaataatcctctttatcatgctggagcagttgcattttcaattagtgctgggattcctaaagttggtgtcttaatggagtcagtttggaatatgaatgacagctgtagatttcaacttagatctcctgaaagcttgaaaaacatggaaaaagctagcaaaactactgaagctaagcctgaaagtaagcaggagccagtgaaaacagaaatgggtcctccaccatctccagcatccacgtgtagtgatgcatcctcaattgccagcagtgcatcaatgccatacaaacgacgacggtcaacccctgcaccaaaagaagaggaaaaggtgaatgaagagcagtggtctcttcgggaagtggtttttgtggaagatgtcaagaatgttcctgttggcaaggtgctaaaagtagatggtgcctatgttgctgtaaaatttccaggaacctccagtaatactaactgtcagaacagctctggtccagatgctgacccttcttctctcctgcaggattgtaggttacttagaattgatgaattgcaggttgtcaaaactggtggaacaccgaaggttcccgactgtttccaaaggactcctaaaaagctttgtatacctgaaaaaacagaaatattagcagtgaatgtagattccaaaggtgttcatgctgttctgaagactggaaattgggtacgatactgtatctttgatcttgctacaggaaaagcagaacaggaaaataattttcctacaagcagcattgctttccttggtcagaatgagaggaatgtagccattttcactgctggacaggaatctcccattattcttcgagatggaaatggtaccatctacccaatggccaaagattgcatgggaggaataagggatcccgattggctggatcttccacctattagtagtcttggaatgggtgtgcattctttaataaatcttcctgccaattcaacaatcaaaaagaaagctgctgttatcatcatggctgtagagaaacaaaccttaatgcaacacattctgcgctgtgactatgaggcctgtcgacaatatctaatgaatcttgagcaagcggttgttttagagcagaatctacagatgctgcagacattcatcagccacagatgtgatggaaatcgaaatattttgcatgcttgtgtatcagtttgctttccaaccagcaataaagaaactaaagaagaagaggaagcggagcgttctgaaagaaatacatttgcagaaaggctttctgctgttgaggccattgcaaatgcaatatcagttgtttcaagtaatggcccaggtaatcgggctggatcatcaagtagccgaagtttgagattacgggaaatgatgagacgttcgttgagagcagctggtttgggtagacatgaagctggagcttcatccagtgaccaccaggatccagtttcaccccccatagctccccctagttgggttcctgaccctcctgcgatggatcctgatggtgacattgattttatcctggcccccgctgtgggatctcttaccacagcagcaaccggtactggtcaaggaccaagcacctccactattccaggtccttccacagagccatctgtagtagaatccaaggatcgaaaggcgaatgctcattttatattgaaattgttatgtgacagtgtggttctccagccctatctacgagaacttctttctgccaaggatgcaagagggatgaccccatttatgtcagctgtaagtggccgagcttatcctgctgcaattaccatcttagaaactgctcagaaaattgcaaaagctgaaatatcctcaagtgaaaaagaggaagatgtattcatgggaatggtttgcccatcaggtaccaaccctgatgactctcctttatatgttttatgttgtaatgacacttgcagttttacatggactggagcagagcacattaaccaggatatttttgagtgtcgaacttgtggcttgctggagtcactgtgttgttgtacggaatgtgcaagggtttgtcataaaggtcatgattgcaaactcaaacggacatcaccaacagcctactgtgattgttgggagaaatgtaaatgtaaaactcttattgctggacagaaatctgctcgtcttgatctactttatcgcctgctcactgctactaatctggttactctgccaaacagcaggggagagcacctcttactattcttagtacagacagtcgcaaggcagacggtggagcattgtcaatacaggccacctcgaatcagggaagatcgtaaccgaaaaacagccagtcctgaagattcagatatgccagatcatgatttagagcctccaagatttgcccagcttgcattggagcgtgttctacaggactggaatgccttgaaatctatgattatgtttgggtcgcaggagaataaagaccctcttagtgccagcagtagaataggccatcttttgccagaagagcaagtatacctcaatcagcaaagtggcacaattcggctggactgtttcactcattgccttatagttaagtgtacagcagatattttgcttttagatactctactaggtacactagtgaaagaactccaaaacaaatatacacctggacgtagagaagaagctattgctgtgacaatgaggtttctacgttcagtggcaagagtttttgttattctgagtgtggaaatggcttcatccaaaaagaaaaacaactttattccacagccaattggaaaatgcaagcgtgtattccaagcattgctaccttacgctgtggaagaattgtgcaacgtagcagagtcactgattgttcctgtcagaatggggattgctcgtccaactgcaccatttaccctggctagtactagcatagatgccatgcagggcagtgaagaattattttcagtggaaccactaccaccacgaccatcatctgatcagtctagcagctccagtcagtctcagtcatcctacatcatcaggaatccacagcagaggcgcatcagccagtcacagcccgttcggggcagagatgaagaacaggatgatattgtttcagcagatgtggaagaggttgaggtggtggagggtgtggctggagaagaggatcatcatgatgaacaggaagaacacggggaagaaaatgctgaggcagagggacaacatgatgagcatgatgaagacgggagtgatatggagctggacttgttagcagcagctgaaacagaaagtgatagtgaaagtaaccacagcaaccaagataatgctagtgggcgcagaagcgttgtcactgcagcaactgctggttcagaagcaggagcaagcagtgttcctgccttcttttctgaagatgattctcaatcgaatgactcaagtgattctgatagcagtagtagtcagagtgacgacatagaacaggagacctttatgcttgatgagccattagaaagaaccacaaatagctcccatgccaatggtgctgcccaagctccccgttcaatgcagtgggctgtccgcaacacccagcatcagcgagcagccagtacagccccttccagtacatctacaccagcagcaagttcagcgggtttgatttatattgatccttcaaacttacgccggagtggtaccatcagtacaagtgctgcagctgcagcagctgctttggaagctagcaacgccagcagttacctaacatctgcaagcagtttagccagggcttacagcattgtcattagacaaatctcggacttgatgggccttattcctaagtataatcacctagtatactctcagattccagcagctgtgaaattgacttaccaagatgcagtaaacttacagaactatgtagaagaaaagcttattcccacttggaactggatggtcagtattatggattctactgaagctcaattacgttatggttctgcattagcatctgctggtgatcctggacatccaaatcatcctcttcacgcttctcagaattcagcgagaagagagaggatgactgcgcgagaagaagctagcttacgaacacttgaaggcagacgacgtgccaccttgcttagcgcccgtcaaggaatgatgtctgcacgaggagacttcctaaattatgctctgtctctaatgcggtctcataatgatgagcattctgatgttcttccagttttggatgtttgctcattgaagcatgtggcatatgtttttcaagcacttatatactggattaaggcaatgaatcagcagacaacattggatacacctcaactagaacgcaaaaggacgcgagaactcttggaactgggtattgataatgaagattcagaacatgaaaatgatgatgacaccaatcaaagtgctactttgaatgataaggatgatgactctcttcctgcagaaactggccaaaaccatccatttttccgacgttcagactccatgacattccttgggtgtatacccccaaatccatttgaagtgcctctggctgaagccatccccttggctgatcagccacatctgttgcagccaaatgctagaaaggaggatctttttggccgtccaagtcagggtctttattcttcatctgccagtagtgggaaatgtttaatggaggttacagtggatagaaactgcctagaggttcttccaacaaaaatgtcttatgctgccaatctgaaaaatgtaatgaacatgcaaaaccggcaaaaaaaagaaggggaagaacagcccgtgctgccagaagaaactgagagttcaaaaccagggccatctgctcatgatcttgctgcacaattaaaaagtagcttactagcagaaataggacttactgaaagtgaagggccacctctcacatctttcaggccacagtgtagctttatgggaatggttatttcccatgatatgctgctaggacgttggcgcctttctttagaactgttcggcagggtattcatggaagatgttggagcagaacctggatcaatcctaactgaattgggtggttttgaggtaaaagaatcaaaattccgcagagaaatggaaaaactgagaaaccagcagtcaagagatttgtcactagaggttgatcgggatcgagatcttctcattcagcagactatgaggcagcttaacaatcactttggtcgaagatgtgctactacaccaatggctgtacacagagtaaaagtcacatttaaggatgagccaggagagggcagtggtgtagcacgaagtttttatacagccattgcacaagcatttttatcaaatgaaaaattgccaaatctagagtgtatccaaaatgccaacaaaggcacccacacaagtttaatgcagagattaaggaaccgaggagagagagaccgggaaagggagagagaaagggaaatgaggaggagtagtggtttgcgagcaggttctcggagggaccgggatagagactttagaagacagctttccatcgacactaggccctttagaccagcctctgaagggaatcctagcgatgatcctgagcctttgccagcacatcggcaggcacttggagagaggctttatcctcgtgtacaagcaatgcaaccagcatttgcaagtaaaatcactggcatgttgttggaattatccccagctcagctgcttctccttctagcaagtgaggattctctgagagcaagagtggatgaggccatggaactcattattgcacatggacgggaaaatggagctgatagtatcctggatcttggattagtagactcctcagaaaaggtacagcaggaaaaccgaaagcgccatggctctagtcgaagtgtagtagatatggatttagatgatacagatgatggtgatgacaatgcccctttgttttaccaacctgggaaaagaggattttatactccaaggcctggcaagaacacagaagcaaggttgaattgtttcagaaacattggcaggattcttggactatgtctgttacagaatgaactatgtcctatcacattgaatagacatgtaattaaagtattgcttggtagaaaagtcaattggcatgattttgctttttttgatcctgtaatgtatgagagtttgcggcaactaatcctcgcgtctcagagttcagatgctgatgctgttttctcagcaatggatttggcatttgcaattgacctgtgtaaagaagaaggtggaggacaggttgaactcattcctaatggtgtaaatataccagtcactccacagaatgtatatgagtatgtgcggaaatacgcagaacacagaatgttggtagttgcagaacagcccttacatgcaatgaggaaaggtctactagatgtgcttccaaaaaattcattagaagatttaacggcagaagattttaggcttttggtaaatggctgcggtgaagtcaatgtgcaaatgctgatcagttttacctctttcaatgatgaatcaggagaaaatgctgagaagcttctgcagttcaagcgttggttctggtcaatagtagagaagatgagcatgacagaacgacaagatcttgtttacttttggacatcaagcccatcactgccagccagtgaagaaggattccagcctatgccctcaatcacaataagaccaccagatgaccaacatcttcctactgcaaatacttgcatttctcgactttacgtcccactctattcctctaaacagattctcaaacagaaattgttactcgccattaagaccaagaattttggttttgtgtagagtataaaaagtgtgtattgctgtgtaatattactagcaaattttgtagatttttttccatttgtctataaaagtttatggaagttaatgctgtcatacccccctggtggtaccttaaagagataaaatgcagacattccttgctgagtttatagcttaaaggcctaaggagcactagcaacatttggctatattggtttgctagtcaccaacttctgggtctaaccccagccaaagatgacagcagaacaacataatttacactgtgatttatctttttgctgagggggaaaaaatgtaaatgttctgaaaattcactgctgcctttgtggaaactgtttcagcaaaggttcttgtatagagggaatagggaatttcaaaataaaaaattaagtatgttctgtgttttcattttaactttttttatggtgtttaatttgtggttggctgcaactgtgtatcatgtatatggaacttgtaaaaaagttctcgacattcagatcttaagagatgaaatcacttttacctataaaaaccacttttattgcggtttgactgcattgagctctaggatattaaatgatatcactaatattttgcatgtaatttgctcatttgagtgagggcactttttttgtacatatgatggggccaatgcacaatacttttatcacaatcaactttttctttgtatccctatttcaatgagcagtcagtctcaagaggttactgcacttcagttctaactagacatttgtactaaggtatttcagttatgtaaactcagcctgggcactttctgataactgtaaaatgttttataagatcatgattattgaagatacattttggaaaattttaaatgttcgtgagcagcttaactacttttgtatctagccttttttaagtatcttgttacatttacttttttaaataaagaaattacagaagaaatgtcaagtaatattgaagaaacaatagtttttatttatgtagttgtacatttttaaactaagggcaatacactgacatggttatgtgcataaaaattttgacttaaagaactggaagtttatatacacctggactataagaaacagaagccaccttttcattttacaaatgggggaagtgaagtgtgaccccttacttggcataggaagttaacttacacctaataactgacaggtttttgttttgatgacctattaattatgtagcctaggattaatatcccaaaattactctggtttaagtagctttattcagtggcataataacactgttttcttccttaagtcttcaatgaagtgacttaaaacagtcactttacatattaaaaatgaggagagcaattctctggaatctctcctttcagttcctttgtaggatttctggccttgaggatagtcttcatgttcaaaggcactatgcttttattatataacttccttcagaagactgaaccacatgatattctcagccctgttaacactaaaaatatttaaaactgaatgatagtagtgactcattgtattacttaaaacttatataacacgctgtattagatgtgtgtaaattagccaaaggttattttacaaagtgagacattggtttttatgtctaaatgctatttctgaataaatgaaatagtaattagatcaagagctgattagcatcaatgtgtttgaaagatataaaatttatacatcaccttaacctctgtatgcacatgatgggattgataaaatattaaatgagaacaaactagatatgattaggacatttgaaaccctaattgtgaatttatttttaatagttactgaaatgaaaatatttaaaataatgcacaatgtcttaagtcttcctaaatcaagattttggttaaaaaatacttctaataatagtaaaagattttttttttaagtaaatcataaaacggttctaaatgtaaaataaagacatgtaaaataaagttctcttttggtcttgtttagtgtttaaatctaacaattgaaaacaaatttaggaagagaag

SEQ ID NO: 300586 - DNA, 9084 bp, Homo sapiens
cgccctcgagtggaggacgagaaggaaagcaccatgacgtccatccatttcgtggttcacccgctgccgggcaccgaggaccagctcaatgacaggttacgagaagtttctgagaagctgaacaaatataatttaaacagccacccccctttgaatgtattggaacaggctactattaaacagtgtgtggtgggaccaaatcatgctgcctttcttcttgaggatggtagagtttgcaggattggtttttcagtacagccagacagattggaattgggtaaacctgataataatgatgggtcaaagttgaacagcaactcgggggcagggaggacgtcaaggcctggtaggacaagcgactctccatggtttctctcaggttctgagactctaggcaggctggcaggcaacaccttaggaagccgctggagttctggagtgggtggaagtggtggaggatcctctggtaggtcatcagctggagctcgagattcccgccggcagactcgagttattcggacaggacgggatcgagggtctgggcttttgggcagtcagccccagccagttattccagcatctgtcattccagaggagctgatttcacaggcccaagttgttttacaaggcaaatccagaagtgtcattattcgagaacttcagagaacaaatcttgatgtgaaccttgctgtaaataatttacttagccgggatgatgaagatggagatgatggggatgatacagccagcgaatcttatttgcctggagaggatcttatgtctctccttgatgccgacattcattctgcccacccaagtgtcattattgatgcagatgccatgttttctgaagacattagctattttggttacccttcttttcgtcgttcatcactttccaggctaggctcatctcgagttctccttcttcccttagagagagactctgagctgttgcgtgaacgtgaatccgttttacgtttacgtgaacgaaggtggcttgatggagcctcatttgataatgaaaggggttctaccagcaaggaaggagagccaaacttggataagaagaatacacctgttcaaagtccagtatctctaggagaagatttgcagtggtggcctgataaggatggaacaaaattcatctgtattggggctctgtattctgaacttctggctgtcagcagtaaaggagaactttatcagtggaaatggagtgaatctgagccttacagaaatgcccagaatccttcattacatcatccacgagcaacatttttggggttaaccaatgaaaagatagtcctcctgtctgcaaatagcataagagcaactgtagctacagaaaataacaaggttgctacatgggtggatgaaactttaagttctgtggcttctaaattagagcacactgctcagacttactctgaacttcaaggagagcggatagtttctttacattgctgtgccctttacacctgcgctcagctggaaaacagtttatattggtggggtgtagttccttttagtcaaaggaagaaaatgttagagaaagctagagcaaaaaataaaaagcctaaatccagtgctggtatttcttcaatgccgaacatcactgttggtacccaggtatgcttgagaaataatcctctttatcatgctggagcagttgcattttcaattagtgctgggattcctaaagttggtgtcttaatggagtcagtttggaatatgaatgacagctgtagatttcaacttagatctcctgaaagcttgaaaaacatggaaaaagctagcaaaactactgaagctaagcctgaaagtaagcaggagccagtgaaaacagaaatgggtcctccaccatctccagcatccacgtgtagtgatgcatcctcaattgccagcagtgcatcaatgccatacaaacgacgacggtcaacccctgcaccaaaagaagaggaaaaggtgaatgaagagcagtggtctcttcgggaagtggtttttgtggaagatgtcaagaatgttcctgttggcaaggtgctaaaagtagatggtgcctatgttgctgtaaaatttccaggaacctccagtaatactaactgtcagaacagctctggtccagatgctgacccttcttctctcctgcaggattgtaggttacttagaattgatgaattgcaggttgtcaaaactggtggaacaccgaaggttcccgactgtttccaaaggactcctaaaaagctttgtatacctgaaaaaacagaaatattagcagtgaatgtagattccaaaggtgttcatgctgttctgaagactggaaattgggtacgatactgtatctttgatcttgctacaggaaaagcagaacaggaaaataattttcctacaagcagcattgctttccttggtcagaatgagaggaatgtagccattttcactgctggacaggaatctcccattattcttcgagatggaaatggtaccatctacccaatggccaaagattgcatgggaggaataagggatcccgattggctggatcttccacctattagtagtcttggaatgggtgtgcattctttaataaatcttcctgccaattcaacaatcaaaaagaaagctgctgttatcatcatggctgtagagaaacaaaccttaatgcaacacattctgcgctgtgactatgaggcctgtcgacaatatctaatgaatcttgagcaagcggttgttttagagcagaatctacagatgctgcagacattcatcagccacagatgtgatggaaatcgaaatattttgcatgcttgtgtatcagtttgctttccaaccagcaataaagaaactaaagaagaagaggaagcggagcgttctgaaagaaatacatttgcagaaaggctttctgctgttgaggccattgcaaatgcaatatcagttgtttcaagtaatggcccaggtaatcgggctggatcatcaagtagccgaagtttgagattacgggaaatgatgagacgttcgttgagagcagctggtttgggtagacatgaagctggagcttcatccagtgaccaccaggatccagtttcaccccccatagctccccctagttgggttcctgaccctcctgcgatggatcctgatggtgacattgattttatcctggcccccgctgtgggatctcttaccacagcagcaaccggtactggtcaaggaccaagcacctccactattccaggtccttccacagagccatctgtagtagaatccaaggatcgaaaggcgaatgctcattttatattgaaattgttatgtgacagtgtggttctccagccctatctacgagaacttctttctgccaaggatgcaagagggatgaccccatttatgtcagctgtaagtggccgagcttatcctgctgcaattaccatcttagaaactgctcagaaaattgcaaaagctgaaatatcctcaagtgaaaaagaggaagatgtattcatgggaatggtttgcccatcaggtaccaaccctgatgactctcctttatatgttttatgttgtaatgacacttgcagttttacatggactggagcagagcacattaaccaggatatttttgagtgtcgaacttgtggcttgctggagtcactgtgttgttgtacggaatgtgcaagggtttgtcataaaggtcatgattgcaaactcaaacggacatcaccaacagcctactgtgattgttgggagaaatgtaaatgtaaaactcttattgctggacagaaatctgctcgtcttgatctactttatcgcctgctcactgctactaatctggttactctgccaaacagcaggggagagcacctcttactattcttagtacagacagtcgcaaggcagacggtggagcattgtcaatacaggccacctcgaatcagggaagatcgtaaccgaaaaacagccagtcctgaagattcagatatgccagatcatgatttagagcctccaagatttgcccagcttgcattggagcgtgttctacaggactggaatgccttgaaatctatgattatgtttgggtcgcaggagaataaagaccctcttagtgccagcagtagaataggccatcttttgccagaagagcaagtatacctcaatcagcaaagtggcacaattcggctggactgtttcactcattgccttatagttaagtgtacagcagatattttgcttttagatactctactaggtacactagtgaaagaactccaaaacaaatatacacctggacgtagagaagaagctattgctgtgacaatgaggtttctacgttcagtggcaagagtttttgttattctgagtgtggaaatggcttcatccaaaaagaaaaacaactttattccacagccaattggaaaatgcaagcgtgtattccaagcattgctaccttacgctgtggaagaattgtgcaacgtagcagagtcactgattgttcctgtcagaatggggattgctcgtccaactgcaccatttaccctggctagtactagcatagatgccatgcagggcagtgaagaattattttcagtggaaccactaccaccacgaccatcatctgatcagtctagcagctccagtcagtctcagtcatcctacatcatcaggaatccacagcagaggcgcatcagccagtcacagcccgttcggggcagagatgaagaacaggatgatattgtttcagcagatgtggaagaggttgaggtggtggagggtgtggctggagaagaggatcatcatgatgaacaggaagaacacggggaagaaaatgctgaggcagagggacaacatgatgagcatgatgaagacgggagtgatatggagctggacttgttagcagcagctgaaacagaaagtgatagtgaaagtaaccacagcaaccaagataatgctagtgggcgcagaagcgttgtcactgcagcaactgctggttcagaagcaggagcaagcagtgttcctgccttcttttctgaagatgattctcaatcgaatgactcaagtgattctgatagcagtagtagtcagagtgacgacatagaacaggagacctttatgcttgatgagccattagaaagaaccacaaatagctcccatgccaatggtgctgcccaagctccccgttcaatgcagtgggctgtccgcaacacccagcatcagcgagcagccagtacagccccttccagtacatctacaccagcagcaagttcagcgggtttgatttatattgatccttcaaacttacgccggagtggtaccatcagtacaagtgctgcagctgcagcagctgctttggaagctagcaacgccagcagttacctaacatctgcaagcagtttagccagggcttacagcattgtcattagacaaatctcggacttgatgggccttattcctaagtataatcacctagtatactctcagattccagcagctgtgaaattgacttaccaagatgcagtaaacttacagaactatgtagaagaaaagcttattcccacttggaactggatggtcagtattatggattctactgaagctcaattacgttatggttctgcattagcatctgctggtgatcctggacatccaaatcatcctcttcacgcttctcagaattcagcgagaagagagaggatgactgcgcgagaagaagctagcttacgaacacttgaaggcagacgacgtgccaccttgcttagcgcccgtcaaggaatgatgtctgcacgaggagacttcctaaattatgctctgtctctaatgcggtctcataatgatgagcattctgatgttcttccagttttggatgtttgctcattgaagcatgtggcatatgtttttcaagcacttatatactggattaaggcaatgaatcagcagacaacattggatacacctcaactagaacgcaaaaggacgcgagaactcttggaactgggtattgataatgaagattcagaacatgaaaatgatgatgacaccaatcaaagtgctactttgaatgataaggatgatgactctcttcctgcagaaactggccaaaaccatccatttttccgacgttcagactccatgacattccttgggtgtatacccccaaatccatttgaagtgcctctggctgaagccatccccttggctgatcagccacatctgttgcagccaaatgctagaaaggaggatctttttggccgtccaagtcagggtctttattcttcatctgccagtagtgggaaatgtttaatggaggttacagtggatagaaactgcctagaggttcttccaacaaaaatgtcttatgctgccaatctgaaaaatgtaatgaacatgcaaaaccggcaaaaaaaagaaggggaagaacagcccgtgctgccagaagaaactgagagttcaaaaccagggccatctgctcatgatcttgctgcacaattaaaaagtagcttactagcagaaataggacttactgaaagtgaagggccacctctcacatctttcaggccacagtgtagctttatgggaatggttatttcccatgatatgctgctaggacgttggcgcctttctttagaactgttcggcagggtattcatggaagatgttggagcagaacctggatcaatcctaactgaattgggtggttttgaggtaaaagaatcaaaattccgcagagaaatggaaaaactgagaaaccagcagtcaagagatttgtcactagaggttgatcgggatcgagatcttctcattcagcagactatgaggcagcttaacaatcactttggtcgaagatgtgctactacaccaatggctgtacacagagtaaaagtcacatttaaggatgagccaggagagggcagtggtgtagcacgaagtttttatacagccattgcacaagcatttttatcaaatgaaaaattgccaaatctagagtgtatccaaaatgccaacaaaggcacccacacaagtttaatgcagagattaaggaaccgaggagagagagaccgggaaagggagagagaaagggaaatgaggaggagtagtggtttgcgagcaggttctcggagggaccgggatagagactttagaagacagctttccatcgacactaggccctttagaccagcctctgaagggaatcctagcgatgatcctgagcctttgccagcacatcggcaggcacttggagagaggctttatcctcgtgtacaagcaatgcaaccagcatttgcaagtaaaatcactggcatgttgttggaattatccccagctcagctgcttctccttctagcaagtgaggattctctgagagcaagagtggatgaggccatggaactcattattgcacatggacgggaaaatggagctgatagtatcctggatcttggattagtagactcctcagaaaaggtacagcaggaaaaccgaaagcgccatggctctagtcgaagtgtagtagatatggatttagatgatacagatgatggtgatgacaatgcccctttgttttaccaacctgggaaaagaggattttatactccaaggcctggcaagaacacagaagcaaggttgaattgtttcagaaacattggcaggattcttggactatgtctgttacagaatgaactatgtcctatcacattgaatagacatgtaattaaagtattgcttggtagaaaagtcaattggcatgattttgctttttttgatcctgtaatgtatgagagtttgcggcaactaatcctcgcgtctcagagttcagatgctgatgctgttttctcagcaatggatttggcatttgcaattgacctgtgtaaagaagaaggtggaggacaggttgaactcattcctaatggtgtaaatataccagtcactccacagaatgtatatgagtatgtgcggaaatacgcagaacacagaatgttggtagttgcagaacagcccttacatgcaatgaggaaaggtctactagatgtgcttccaaaaaattcattagaagatttaacggcagaagattttaggcttttggtaaatggctgcggtgaagtcaatgtgcaaatgctgatcagttttacctctttcaatgatgaatcaggagaaaatgctgagaagcttctgcagttcaagcgttggttctggtcaatagtagagaagatgagcatgacagaacgacaagatcttgtttacttttggacatcaagcccatcactgccagccagtgaagaaggattccagcctatgccctcaatcacaataagaccaccagatgaccaacatcttcctactgcaaatacttgcatttctcgactttacgtcccactctattcctctaaacagattctcaaacagaaattgttactcgccattaagaccaagaattttggttttgtgtagagtataaaaagtgtgtattgctgtgtaatattactagcaaattttgtagatttttttccatttgtctataaaagtttatggaagttaatgctgtcatacccccctggtggtaccttaaagagataaaatgcagacattccttgctgagtttatagcttaaaggcctaaggagcactagcaacatttggctatattggtttgctagtcaccaacttctgggtctaaccccagccaaagatgacagcagaacaacataatttacactgtgatttatctttttgctgagggggaaaaaatgtaaatgttctgaaaattcactgctgcctttgtggaaactgtttcagcaaaggttcttgtatagagggaatagggaatttcaaaataaaaaattaagtatgttctgtgttttcattttaaaaaaaaagaaaaatggcctttttagccctaagggagagctctggggccgttgcctttaagagggtaattaatgacctggtctatgactagtgcgttggacgttgggttggcgaagcggatcacttactcaaggcgggaaactgtatccccgaatcggggaaaccgaggaaaacactggacgcaaggcggctaagggcggaaccggaaagggccggtgctgcggttccataggcg

SEQ ID NO: 300587 - DNA, 8907 bp, Homo sapiens
  misc_feature (8824)..(8824): n is a, c, g, or t
cgccctcgagtggaggacgagaaggaaagcaccatgacgtccatccatttcgtggttcacccgctgccgggcaccgaggaccagctcaatgacaggttacgagaagtttctgagaagctgaacaaatataatttaaacagccacccccctttgaatgtattggaacaggctactattaaacagtgtgtggtgggaccaaatcatgctgcctttcttcttgaggatggtagagtttgcaggattggtttttcagtacagccagacagattggaattgggtaaacctgataataatgatgggtcaaagttgaacagcaactcgggggcagggaggacgtcaaggcctggtaggacaagcgactctccatggtttctctcaggttctgagactctaggcaggctggcaggcaacaccttaggaagccgctggagttctggagtgggtggaagtggtggaggatcctctggtaggtcatcagctggagctcgagattcccgccggcagactcgagttattcggacaggacgggatcgagggtctgggcttttgggcagtcagccccagccagttattccagcatctgtcattccagaggagctgatttcacaggcccaagttgttttacaaggcaaatccagaagtgtcattattcgagaacttcagagaacaaatcttgatgtgaaccttgctgtaaataatttacttagccgggatgatgaagatggagatgatggggatgatacagccagcgaatcttatttgcctggagaggatcttatgtctctccttgatgccgacattcattctgcccacccaagtgtcattattgatgcagatgccatgttttctgaagacattagctattttggttacccttcttttcgtcgttcatcactttccaggctaggctcatctcgagttctccttcttcccttagagagagactctgagctgttgcgtgaacgtgaatccgttttacgtttacgtgaacgaaggtggcttgatggagcctcatttgataatgaaaggggttctaccagcaaggaaggagagccaaacttggataagaagaatacacctgttcaaagtccagtatctctaggagaagatttgcagtggtggcctgataaggatggaacaaaattcatctgtattggggctctgtattctgaacttctggctgtcagcagtaaaggagaactttatcagtggaaatggagtgaatctgagccttacagaaatgcccagaatccttcattacatcatccacgagcaacatttttggggttaaccaatgaaaagatagtcctcctgtctgcaaatagcataagagcaactgtagctacagaaaataacaaggttgctacatgggtggatgaaactttaagttctgtggcttctaaattagagcacactgctcagacttactctgaacttcaaggagagcggatagtttctttacattgctgtgccctttacacctgcgctcagctggaaaacagtttatattggtggggtgtagttccttttagtcaaaggaagaaaatgttagagaaagctagagcaaaaaataaaaagcctaaatccagtgctggtatttcttcaatgccgaacatcactgttggtacccaggtatgcttgagaaataatcctctttatcatgctggagcagttgcattttcaattagtgctgggattcctaaagttggtgtcttaatggagtcagtttggaatatgaatgacagctgtagatttcaacttagatctcctgaaagcttgaaaaacatggaaaaagctagcaaaactactgaagctaagcctgaaagtaagcaggagccagtgaaaacagaaatgggtcctccaccatctccagcatccacgtgtagtgatgcatcctcaattgccagcagtgcatcaatgccatacaaacgacgacggtcaacccctgcaccaaaagaagaggaaaaggtgaatgaagagcagtggtctcttcgggaagtggtttttgtggaagatgtcaagaatgttcctgttggcaaggtgctaaaagtagatggtgcctatgttgctgtaaaatttccaggaacctccagtaatactaactgtcagaacagctctggtccagatgctgacccttcttctctcctgcaggattgtaggttacttagaattgatgaattgcaggttgtcaaaactggtggaacaccgaaggttcccgactgtttccaaaggactcctaaaaagctttgtatacctgaaaaaacagaaatattagcagtgaatgtagattccaaaggtgttcatgctgttctgaagactggaaattgggtacgatactgtatctttgatcttgctacaggaaaagcagaacaggaaaataattttcctacaagcagcattgctttccttggtcagaatgagaggaatgtagccattttcactgctggacaggaatctcccattattcttcgagatggaaatggtaccatctacccaatggccaaagattgcatgggaggaataagggatcccgattggctggatcttccacctattagtagtcttggaatgggtgtgcattctttaataaatcttcctgccaattcaacaatcaaaaagaaagctgctgttatcatcatggctgtagagaaacaaaccttaatgcaacacattctgcgctgtgactatgaggcctgtcgacaatatctaatgaatcttgagcaagcggttgttttagagcagaatctacagatgctgcagacattcatcagccacagatgtgatggaaatcgaaatattttgcatgcttgtgtatcagtttgctttccaaccagcaataaagaaactaaagaagaagaggaagcggagcgttctgaaagaaatacatttgcagaaaggctttctgctgttgaggccattgcaaatgcaatatcagttgtttcaagtaatggcccaggtaatcgggctggatcatcaagtagccgaagtttgagattacgggaaatgatgagacgttcgttgagagcagctggtttgggtagacatgaagctggagcttcatccagtgaccaccaggatccagtttcaccccccatagctccccctagttgggttcctgaccctcctgcgatggatcctgatggtgacattgattttatcctggcccccgctgtgggatctcttaccacagcagcaaccggtactggtcaaggaccaagcacctccactattccaggtccttccacagagccatctgtagtagaatccaaggatcgaaaggcgaatgctcattttatattgaaattgttatgtgacagtgtggttctccagccctatctacgagaacttctttctgccaaggatgcaagagggatgaccccatttatgtcagctgtaagtggccgagcttatcctgctgcaattaccatcttagaaactgctcagaaaattgcaaaagctgaaatatcctcaagtgaaaaagaggaagatgtattcatgggaatggtttgcccatcaggtaccaaccctgatgactctcctttatatgttttatgttgtaatgacacttgcagttttacatggactggagcagagcacattaaccaggatatttttgagtgtcgaacttgtggcttgctggagtcactgtgttgttgtacggaatgtgcaagggtttgtcataaaggtcatgattgcaaactcaaacggacatcaccaacagcctactgtgattgttgggagaaatgtaaatgtaaaactcttattgctggacagaaatctgctcgtcttgatctactttatcgcctgctcactgctactaatctggttactctgccaaacagcaggggagagcacctcttactattcttagtacagacagtcgcaaggcagacggtggagcattgtcaatacaggccacctcgaatcagggaagatcgtaaccgaaaaacagccagtcctgaagattcagatatgccagatcatgatttagagcctccaagatttgcccagcttgcattggagcgtgttctacaggactggaatgccttgaaatctatgattatgtttgggtcgcaggagaataaagaccctcttagtgccagcagtagaataggccatcttttgccagaagagcaagtatacctcaatcagcaaagtggcacaattcggctggactgtttcactcattgccttatagttaagtgtacagcagatattttgcttttagatactctactaggtacactagtgaaagaactccaaaacaaatatacacctggacgtagagaagaagctattgctgtgacaatgaggtttctacgttcagtggcaagagtttttgttattctgagtgtggaaatggcttcatccaaaaagaaaaacaactttattccacagccaattggaaaatgcaagcgtgtattccaagcattgctaccttacgctgtggaagaattgtgcaacgtagcagagtcactgattgttcctgtcagaatggggattgctcgtccaactgcaccatttaccctggctagtactagcatagatgccatgcagggcagtgaagaattattttcagtggaaccactaccaccacgaccatcatctgatcagtctagcagctccagtcagtctcagtcatcctacatcatcaggaatccacagcagaggcgcatcagccagtcacagcccgttcggggcagagatgaagaacaggatgatattgtttcagcagatgtggaagaggttgaggtggtggagggtgtggctggagaagaggatcatcatgatgaacaggaagaacacggggaagaaaatgctgaggcagagggacaacatgatgagcatgatgaagacgggagtgatatggagctggacttgttagcagcagctgaaacagaaagtgatagtgaaagtaaccacagcaaccaagataatgctagtgggcgcagaagcgttgtcactgcagcaactgctggttcagaagcaggagcaagcagtgttcctgccttcttttctgaagatgattctcaatcgaatgactcaagtgattctgatagcagtagtagtcagagtgacgacatagaacaggagacctttatgcttgatgagccattagaaagaaccacaaatagctcccatgccaatggtgctgcccaagctccccgttcaatgcagtgggctgtccgcaacacccagcatcagcgagcagccagtacagccccttccagtacatctacaccagcagcaagttcagcgggtttgatttatattgatccttcaaacttacgccggagtggtaccatcagtacaagtgctgcagctgcagcagctgctttggaagctagcaacgccagcagttacctaacatctgcaagcagtttagccagggcttacagcattgtcattagacaaatctcggacttgatgggccttattcctaagtataatcacctagtatactctcagattccagcagctgtgaaattgacttaccaagatgcagtaaacttacagaactatgtagaagaaaagcttattcccacttggaactggatggtcagtattatggattctactgaagctcaattacgttatggttctgcattagcatctgctggtgatcctggacatccaaatcatcctcttcacgcttctcagaattcagcgagaagagagaggatgactgcgcgagaagaagctagcttacgaacacttgaaggcagacgacgtgccaccttgcttagcgcccgtcaaggaatgatgtctgcacgaggagacttcctaaattatgctctgtctctaatgcggtctcataatgatgagcattctgatgttcttccagttttggatgtttgctcattgaagcatgtggcatatgtttttcaagcacttatatactggattaaggcaatgaatcagcagacaacattggatacacctcaactagaacgcaaaaggacgcgagaactcttggaactgggtattgataatgaagattcagaacatgaaaatgatgatgacaccaatcaaagtgctactttgaatgataaggatgatgactctcttcctgcagaaactggccaaaaccatccatttttccgacgttcagactccatgacattccttgggtgtatacccccaaatccatttgaagtgcctctggctgaagccatccccttggctgatcagccacatctgttgcagccaaatgctagaaaggaggatctttttggccgtccaagtcagggtctttattcttcatctgccagtagtgggaaatgtttaatggaggttacagtggatagaaactgcctagaggttcttccaacaaaaatgtcttatgctgccaatctgaaaaatgtaatgaacatgcaaaaccggcaaaaaaaagaaggggaagaacagcccgtgctgccagaagaaactgagagttcaaaaccagggccatctgctcatgatcttgctgcacaattaaaaagtagcttactagcagaaataggacttactgaaagtgaagggccacctctcacatctttcaggccacagtgtagctttatgggaatggttatttcccatgatatgctgctaggacgttggcgcctttctttagaactgttcggcagggtattcatggaagatgttggagcagaacctggatcaatcctaactgaattgggtggttttgaggtaaaagaatcaaaattccgcagagaaatggaaaaactgagaaaccagcagtcaagagatttgtcactagaggttgatcgggatcgagatcttctcattcagcagactatgaggcagcttaacaatcactttggtcgaagatgtgctactacaccaatggctgtacacagagtaaaagtcacatttaaggatgagccaggagagggcagtggtgtagcacgaagtttttatacagccattgcacaagcatttttatcaaatgaaaaattgccaaatctagagtgtatccaaaatgccaacaaaggcacccacacaagtttaatgcagagattaaggaaccgaggagagagagaccgggaaagggagagagaaagggaaatgaggaggagtagtggtttgcgagcaggttctcggagggaccgggatagagactttagaagacagctttccatcgacactaggccctttagaccagcctctgaagggaatcctagcgatgatcctgagcctttgccagcacatcggcaggcacttggagagaggctttatcctcgtgtacaagcaatgcaaccagcatttgcaagtaaaatcactggcatgttgttggaattatccccagctcagctgcttctccttctagcaagtgaggattctctgagagcaagagtggatgaggccatggaactcattattgcacatggacgggaaaatggagctgatagtatcctggatcttggattagtagactcctcagaaaaggtacagcaggaaaaccgaaagcgccatggctctagtcgaagtgtagtagatatggatttagatgatacagatgatggtgatgacaatgcccctttgttttaccaacctgggaaaagaggattttatactccaaggcctggcaagaacacagaagcaaggttgaattgtttcagaaacattggcaggattcttggactatgtctgttacagaatgaactatgtcctatcacattgaatagacatgtaattaaagtattgcttggtagaaaagtcaattggcatgattttgctttttttgatcctgtaatgtatgagagtttgcggcaactaatcctcgcgtctcagagttcagatgctgatgctgttttctcagcaatggatttggcatttgcaattgacctgtgtaaagaagaaggtggaggacaggttgaactcattcctaatggtgtaaatataccagtcactccacagaatgtatatgagtatgtgcggaaatacgcagaacacagaatgttggtagttgcagaacagcccttacatgcaatgaggaaaggtctactagatgtgcttccaaaaaattcattagaagatttaacggcagaagattttaggcttttggtaaatggctgcggtgaagtcaatgtgcaaatgctgatcagttttacctctttcaatgatgaatcaggagaaaatgctgagaagcttctgcagttcaagcgttggttctggtcaatagtagagaagatgagcatgacagaacgacaagatcttgtttacttttggacatcaagcccatcactgccagccagtgaagaaggattccagcctatgccctcaatcacaataagaccaccagatgaccaacatcttcctactgcaaatacttgcatttctcgactttacgtcccactctattcctctaaacagattctcaaacagaaattgttactcgccattaagaccaagaattttggttttgtgtagagtataaaaagtgtgtattgctgtgtaatattactagcaaattttgtagatttttttccatttgtctataaaagtttatggaagttaatgctgtcatacccccctggtggtaccttaaagagataaaatgcagacattccttgctgagtttatagcttaaaggcctaaggagcactagcaacatttggctatattggtttgctagtcaccaacttctgggtctaaccccagccaaagatgacagcagaacaacataatttacactgtgatttatctttttgctgagggggaaaaaatgtaaatgttctgaaaattcactgctgcctttgtggaaactgtttcagcaaaggttcttgtatagagggaatagggaatttcaaaataaaaagtnaaaaaaaaaacaattggcctcactggccctcagaggtggaagtcctgcaggccccttcctttgagagaggggtgaatcaagga

SEQ ID NO: 300588 - DNA, 10052 bp, Homo sapiens
atccgcctgcctcagcctcccaaagcgctgggattacagatgtgagccaccgtgcccggccacaagtgttatatcttaacgagtgatctttcttgtgattatgtagtaagtagctcaggcgacatttatgcatttgatgttctttaaaatctttgttaataatgtaggttgttgtgtttttcctcaggcgatgtcattccctagtttttaaatgtatgtgaatttttagagctctttcagcagtctacagttgctctttgtgtgtatgctgcagtgatgtttgtttctgtttatagaggatcttatgtctctccttgatgccgacattcattctgcccacccaagtgtcattattgatgcagatgccatgttttctgaagacattagctattttggttacccttcttttcgtcgttcatcactttccaggctaggctcatctcgagttctccttcttcccttagagagagactctgagctgttgcgtgaacgtgaatccgttttacgtttacgtgaacgaaggtggcttgatggagcctcatttgataatgaaaggggttctaccagcaaggaaggagagccaaacttggataagaagaatacacctgttcaaagtccagtatctctaggagaagatttgcagtggtggcctgataaggatggaacaaaattcatctgtattggggctctgtattctgaacttctggctgtcagcagtaaaggagaactttatcagtggaaatggagtgaatctgagccttacagaaatgcccagaatccttcattacatcatccacgagcaacatttttggggttaaccaatgaaaagatagtcctcctgtctgcaaatagcataagagcaactgtagctacagaaaataacaaggttgctacatgggtggatgaaactttaagttctgtggcttctaaattagagcacactgctcagacttactctgaacttcaaggagagcggatagtttctttacattgctgtgccctttacacctgcgctcagctggaaaacagtttatattggtggggtgtagttccttttagtcaaaggaagaaaatgttagagaaagctagagcaaaaaataaaaagcctaaatccagtgctggtatttcttcaatgccgaacatcactgttggtacccaggtatgcttgagaaataatcctctttatcatgctggagcagttgcattttcaattagtgctgggattcctaaagttggtgtcttaatggagtcagtttggaatatgaatgacagctgtagatttcaacttagatctcctgaaagcttgaaaaacatggaaaaagctagcaaaactactgaagctaagcctgaaagtaagcaggagccagtgaaaacagaaatgggtcctccaccatctccagcatccacgtgtagtgatgcatcctcaattgccagcagtgcatcaatgccatacaaacgacgacggtcaacccctgcaccaaaagaagaggaaaaggtgaatgaagagcagtggtctcttcgggaagtggtttttgtggaagatgtcaagaatgttcctgttggcaaggtgctaaaagtagatggtgcctatgttgctgtaaaatttccaggaacctccagtaatactaactgtcagaacagctctggtccagatgctgacccttcttctctcctgcaggattgtaggttacttagaattgatgaattgcaggttgtcaaaactggtggaacaccgaaggttcccgactgtttccaaaggactcctaaaaagctttgtatacctgaaaaaacagaaatattagcagtgaatgtagattccaaaggtgttcatgctgttctgaagactggaaattgggtacgatactgtatctttgatcttgctacaggaaaagcagaacaggaaaataattttcctacaagcagcattgctttccttggtcagaatgagaggaatgtagccattttcactgctggacaggaatctcccattattcttcgagatggaaatggtaccatctacccaatggccaaagattgcatgggaggaataagggatcccgattggctggatcttccacctattagtagtcttggaatgggtgtgcattctttaataaatcttcctgccaattcaacaatcaaaaagaaagctgctgttatcatcatggctgtagagaaacaaaccttaatgcaacacattctgcgctgtgactatgaggcctgtcgacaatatctaatgaatcttgagcaagcggttgttttagagcagaatctacagatgctgcagacattcatcagccacagatgtgatggaaatcgaaatattttgcatgcttgtgtatcagtttgctttccaaccagcaataaagaaactaaagaagaagaggaagcggagcgttctgaaagaaatacatttgcagaaaggctttctgctgttgaggccattgcaaatgcaatatcagttgtttcaagtaatggcccaggtaatcgggctggatcatcaagtagccgaagtttgagattacgggaaatgatgagacgttcgttgagagcagctggtttgggtagacatgaagctggagcttcatccagtgaccaccaggatccagtttcaccccccatagctccccctagttgggttcctgaccctcctgcgatggatcctgatggtgacattgattttatcctggcccccgctgtgggatctcttaccacagcagcaaccggtactggtcaaggaccaagcacctccactattccaggtccttccacagagccatctgtagtagaatccaaggatcgaaaggcgaatgctcattttatattgaaattgttatgtgacagtgtggttctccagccctatctacgagaacttctttctgccaaggatgcaagagggatgaccccatttatgtcagctgtaagtggccgagcttatcctgctgcaattaccatcttagaaactgctcagaaaattgcaaaagctgaaatatcctcaagtgaaaaagaggaagatgtattcatgggaatggtttgcccatcaggtaccaaccctgatgactctcctttatatgttttatgttgtaatgacacttgcagttttacatggactggagcagagcacattaaccaggatatttttgagtgtcgaacttgtggcttgctggagtcactgtgttgttgtacggaatgtgcaagggtttgtcataaaggtcatgattgcaaactcaaacggacatcaccaacagcctactgtgattgttgggagaaatgtaaatgtaaaactcttattgctggacagaaatctgctcgtcttgatctactttatcgcctgctcactgctactaatctggttactctgccaaacagcaggggagagcacctcttactattcttagtacagacagtcgcaaggcagacggtggagcattgtcaatacaggccacctcgaatcagggaagatcgtaaccgaaaaacagccagtcctgaagattcagatatgccagatcatgatttagagcctccaagatttgcccagcttgcattggagcgtgttctacaggactggaatgccttgaaatctatgattatgtttgggtcgcaggagaataaagaccctcttagtgccagcagtagaataggccatcttttgccagaagagcaagtatacctcaatcagcaaagtggcacaattcggctggactgtttcactcattgccttatagttaagtgtacagcagatattttgcttttagatactctactaggtacactagtgaaagaactccaaaacaaatatacacctggacgtagagaagaagctattgctgtgacaatgaggtttctacgttcagtggcaagagtttttgttattctgagtgtggaaatggcttcatccaaaaagaaaaacaactttattccacagccaattggaaaatgcaagcgtgtattccaagcattgctaccttacgctgtggaagaattgtgcaacgtagcagagtcactgattgttcctgtcagaatggggattgctcgtccaactgcaccatttaccctggctagtactagcatagatgccatgcagggcagtgaagaattattttcagtggaaccactaccaccacgaccatcatctgatcagtctagcagctccagtcagtctcagtcatcctacatcatcaggaatccacagcagaggcgcatcagccagtcacagcccgttcggggcagagatgaagaacaggatgatattgtttcagcagatgtggaagaggttgaggtggtggagggtgtggctggagaagaggatcatcatgatgaacaggaagaacacggggaagaaaatgctgaggcagagggacaacatgatgagcatgatgaagacgggagtgatatggagctggacttgttagcagcagctgaaacagaaagtgatagtgaaagtaaccacagcaaccaagataatgctagtgggcgcagaagcgttgtcactgcagcaactgctggttcagaagcaggagcaagcagtgttcctgccttcttttctgaagatgattctcaatcgaatgactcaagtgattctgatagcagtagtagtcagagtgacgacatagaacaggagacctttatgcttgatgagccattagaaagaaccacaaatagctcccatgccaatggtgctgcccaagctccccgttcaatgcagtgggctgtccgcaacacccagcatcagcgagcagccagtacagccccttccagtacatctacaccagcagcaagttcagcgggtttgatttatattgatccttcaaacttacgccggagtggtaccatcagtacaagtgctgcagctgcagcagctgctttggaagctagcaacgccagcagttacctaacatctgcaagcagtttagccagggcttacagcattgtcattagacaaatctcggacttgatgggccttattcctaagtataatcacctagtatactctcagattccagcagctgtgaaattgacttaccaagatgcagtaaacttacagaactatgtagaagaaaagcttattcccacttggaactggatggtcagtattatggattctactgaagctcaattacgttatggttctgcattagcatctgctggtgatcctggacatccaaatcatcctcttcacgcttctcagaattcagcgagaagagagaggatgactgcgcgagaagaagctagcttacgaacacttgaaggcagacgacgtgccaccttgcttagcgcccgtcaaggaatgatgtctgcacgaggagacttcctaaattatgctctgtctctaatgcggtctcataatgatgagcattctgatgttcttccagttttggatgtttgctcattgaagcatgtggcatatgtttttcaagcacttatatactggattaaggcaatgaatcagcagacaacattggatacacctcaactagaacgcaaaaggacgcgagaactcttggaactgggtattgataatgaagattcagaacatgaaaatgatgatgacaccaatcaaagtgctactttgaatgataaggatgatgactctcttcctgcagaaactggccaaaaccatccatttttccgacgttcagactccatgacattccttgggtgtatacccccaaatccatttgaagtgcctctggctgaagccatccccttggctgatcagccacatctgttgcagccaaatgctagaaaggaggatctttttggccgtccaagtcagggtctttattcttcatctgccagtagtgggaaatgtttaatggaggttacagtggatagaaactgcctagaggttcttccaacaaaaatgtcttatgctgccaatctgaaaaatgtaatgaacatgcaaaaccggcaaaaaaaagaaggggaagaacagcccgtgctgccagaagaaactgagagttcaaaaccagggccatctgctcatgatcttgctgcacaattaaaaagtagcttactagcagaaataggacttactgaaagtgaagggccacctctcacatctttcaggccacagtgtagctttatgggaatggttatttcccatgatatgctgctaggacgttggcgcctttctttagaactgttcggcagggtattcatggaagatgttggagcagaacctggatcaatcctaactgaattgggtggttttgaggtaaaagaatcaaaattccgcagagaaatggaaaaactgagaaaccagcagtcaagagatttgtcactagaggttgatcgggatcgagatcttctcattcagcagactatgaggcagcttaacaatcactttggtcgaagatgtgctactacaccaatggctgtacacagagtaaaagtcacatttaaggatgagccaggagagggcagtggtgtagcacgaagtttttatacagccattgcacaagcatttttatcaaatgaaaaattgccaaatctagagtgtatccaaaatgccaacaaaggcacccacacaagtttaatgcagagattaaggaaccgaggagagagagaccgggaaagggagagagaaagggaaatgaggaggagtagtggtttgcgagcaggttctcggagggaccgggatagagactttagaagacagctttccatcgacactaggccctttagaccagcctctgaagggaatcctagcgatgatcctgagcctttgccagcacatcggcaggcacttggagagaggctttatcctcgtgtacaagcaatgcaaccagcatttgcaagtaaaatcactggcatgttgttggaattatccccagctcagctgcttctccttctagcaagtgaggattctctgagagcaagagtggatgaggccatggaactcattattgcacatggacgggaaaatggagctgatagtatcctggatcttggattagtagactcctcagaaaaggtacagcaggaaaaccgaaagcgccatggctctagtcgaagtgtagtagatatggatttagatgatacagatgatggtgatgacaatgcccctttgttttaccaacctgggaaaagaggattttatactccaaggcctggcaagaacacagaagcaaggttgaattgtttcagaaacattggcaggattcttggactatgtctgttacagaatgaactatgtcctatcacattgaatagacatgtaattaaagtattgcttggtagaaaagtcaattggcatgattttgctttttttgatcctgtaatgtatgagagtttgcggcaactaatcctcgcgtctcagagttcagatgctgatgctgttttctcagcaatggatttggcatttgcaattgacctgtgtaaagaagaaggtggaggacaggttgaactcattcctaatggtgtaaatataccagtcactccacagaatgtatatgagtatgtgcggaaatacgcagaacacagaatgttggtagttgcagaacagcccttacatgcaatgaggaaaggtctactagatgtgcttccaaaaaattcattagaagatttaacggcagaagattttaggcttttggtaaatggctgcggtgaagtcaatgtgcaaatgctgatcagttttacctctttcaatgatgaatcaggagaaaatgctgagaagcttctgcagttcaagcgttggttctggtcaatagtagagaagatgagcatgacagaacgacaagatcttgtttacttttggacatcaagcccatcactgccagccagtgaagaaggattccagcctatgccctcaatcacaataagaccaccagatgaccaacatcttcctactgcaaatacttgcatttctcgactttacgtcccactctattcctctaaacagattctcaaacagaaattgttactcgccattaagaccaagaattttggttttgtgtagagtataaaaagtgtgtattgctgtgtaatattactagcaaattttgtagatttttttccatttgtctataaaagtttatggaagttaatgctgtcatacccccctggtggtaccttaaagagataaaatgcagacattccttgctgagtttatagcttaaaggcctaaggagcactagcaacatttggctatattggtttgctagtcaccaacttctgggtctaaccccagccaaagatgacagcagaacaacataatttacactgtgatttatctttttgctgagggggaaaaaatgtaaatgttctgaaaattcactgctgcctttgtggaaactgtttcagcaaaggttcttgtatagagggaatagggaatttcaaaataaaaaattaagtatgttctgtgttttcattttaactttttttatggtgtttaatttgtggttggctgcaactgtgtatcatgtatatggaacttgtaaaaaagttctcgacattcagatcttaagagatgaaatcacttttacctataaaaaccacttttattgcggtttgactgcattgagctctaggatattaaatgatatcactaatattttgcatgtaatttgctcatttgagtgagggcactttttttgtacatatgatggggccaatgcacaatacttttatcacaatcaactttttctttgtatccctatttcaatgagcagtcagtctcaagaggttactgcacttcagttctaactagacatttgtactaaggtatttcagttatgtaaactcagcctgggcactttctgataactgtaaaatgttttataagatcatgattattgaagatacattttggaaaattttaaatgttcgtgagcagcttaactacttttgtatctagccttttttaagtatcttgttacatttacttttttaaataaagaaattacagaagaaatgtcaagtaatattgaagaaacaatagtttttatttatgtagttgtacatttttaaactaagggcaatacactgacatggttatgtgcataaaaattttgacttaaagaactggaagtttatatacacctggactataagaaacagaagaaaatcagtccacattttacagttagcagagaatcctaaatggcactggcctggccaccttttcattttacaaatgggggaagtgaagtgtgaccccttacttggcataggaagttaacttacacctaataactgacaggtttttgttttgatgacctattaattatgtagcctaggattaatatcccaaaattactctggtttaagtagctttattcagtggcataataacactgttttcttccttaagtcttcaatgaagtgacttaaaacagtcactttacatattaaaaatgaggagagcaattctctggaatctctcctttcagttcctttgtaggatttctggccttgaggatagtcttcatgttcaaaggcactatgcttttattatataacttccttcagaagactgaaccacatgatattctcagccctgttaacactaaaaatatttaaaactgaatgatagtagtgactcattgtattacttaaaacttatataacacgctgtattagatgtgtgtaaattagccaaaggttattttacaaagtgagacattggtttttatgtctaaatgctatttctgaataaatgaaatagtaattagatcaagagctgattagcatcaatgtgtttgaaagatataaaatttatacatcaccttaacctctgtatgcacatgatgggattgataaaatattaaatgagaacaaactagatatgattaggacatttgaaaccctaattgtgaatttatttttaatagttactgaaatgaaaatatttaaaataatgcacaatgtcttaagtcttcctaaatcaagattttggttaaaaaatacttctaataatagtaaaagattttttttttaagtaaatcataaaacggttctaaatgtaaaataaagacatgtaaaataaagttctcttttggtcttgtttagtgtttaaatctaacaattgaaaacaaatttaggaagagaag

SEQ ID NO: 300589 - DNA, 10643 bp, Homo sapiens
tgcctttcttcttgaggatggtagagtttgcaggattggtttttcagtacagccagacagattggaattgggtaaacctgataataatgatgggtcaaagttggacagcaactcgggggctgggaggacgtcaaggcctgctaggacaaacgactctccatggtttctatcagattctgagactctagacaggctggcaggcaacaccttagggttacgagaagtttctgagaagctgaacaaatataatttaaacagccacccccctttgaatgtattggaacaggctactattaaacagtgtgtggtgggaccaaatcatgctgcctttcttcttgaggatggtagagtttgcaggattggtttttcagtacagccagacagattggaattgggtaaacctgataataatgatgggtcaaagttgaacagcaactcgggggcagggaggacgtcaaggcctggtaggacaagcgactctccatggtttctctcaggttctgagactctaggcaggctggcaggcaacaccttaggaagccgctggagttctggagtgggtggaagtggtggaggatcctctggtaggtcatcagctggagctcgagattcccgccggcagactcgagttattcggacaggacgggatcgagggtctgggcttttgggcagtcagccccagccagttattccagcatctgtcattccagaggagctgatttcacaggcccaagttgttttacaaggcaaatccagaagtgtcattattcgagaacttcagagaacaaatcttgatgtgaaccttgctgtaaataatttacttagccgggatgatgaagatggagatgatggggatgatacagccagcgaatcttatttgcctggagaggatcttatgtctctccttgatgccgacattcattctgcccacccaagtgtcattattgatgcagatgccatgttttctgaagacattagctattttggttacccttcttttcgtcgttcatcactttccaggctaggctcatctcgagttctccttcttcccttagagagagactctgagctgttgcgtgaacgtgaatccgttttacgtttacgtgaacgaaggtggcttgatggagcctcatttgataatgaaaggggttctaccagcaaggaaggagagccaaacttggataagaagaatacacctgttcaaagtccagtatctctaggagaagatttgcagtggtggcctgataaggatggaacaaaattcatctgtattggggctctgtattctgaacttctggctgtcagcagtaaaggagaactttatcagtggaaatggagtgaatctgagccttacagaaatgcccagaatccttcattacatcatccacgagcaacatttttggggttaaccaatgaaaagatagtcctcctgtctgcaaatagcataagagcaactgtagctacagaaaataacaaggttgctacatgggtggatgaaactttaagttctgtggcttctaaattagagcacactgctcagacttactctgaacttcaaggagagcggatagtttctttacattgctgtgccctttacacctgcgctcagctggaaaacagtttatattggtggggtgtagttccttttagtcaaaggaagaaaatgttagagaaagctagagcaaaaaataaaaagcctaaatccagtgctggtatttcttcaatgccgaacatcactgttggtacccaggtatgcttgagaaataatcctctttatcatgctggagcagttgcattttcaattagtgctgggattcctaaagttggtgtcttaatggagtcagtttggaatatgaatgacagctgtagatttcaacttagatctcctgaaagcttgaaaaacatggaaaaagctagcaaaactactgaagctaagcctgaaagtaagcaggagccagtgaaaacagaaatgggtcctccaccatctccagcatccacgtgtagtgatgcatcctcaattgccagcagtgcatcaatgccatacaaacgacgacggtcaacccctgcaccaaaagaagaggaaaaggtgaatgaagagcagtggtctcttcgggaagtggtttttgtggaagatgtcaagaatgttcctgttggcaaggtgctaaaagtagatggtgcctatgttgctgtaaaatttccaggaacctccagtaatactaactgtcagaacagctctggtccagatgctgacccttcttctctcctgcaggattgtaggttacttagaattgatgaattgcaggttgtcaaaactggtggaacaccgaaggttcccgactgtttccaaaggactcctaaaaagctttgtatacctgaaaaaacagaaatattagcagtgaatgtagattccaaaggtgttcatgctgttctgaagactggaaattgggtacgatactgtatctttgatcttgctacaggaaaagcagaacaggaaaataattttcctacaagcagcattgctttccttggtcagaatgagaggaatgtagccattttcactgctggacaggaatctcccattattcttcgagatggaaatggtaccatctacccaatggccaaagattgcatgggaggaataagggatcccgattggctggatcttccacctattagtagtcttggaatgggtgtgcattctttaataaatcttcctgccaattcaacaatcaaaaagaaagctgctgttatcatcatggctgtagagaaacaaaccttaatgcaacacattctgcgctgtgactatgaggcctgtcgacaatatctaatgaatcttgagcaagcggttgttttagagcagaatctacagatgctgcagacattcatcagccacagatgtgatggaaatcgaaatattttgcatgcttgtgtatcagtttgctttccaaccagcaataaagaaactaaagaagaagaggaagcggagcgttctgaaagaaatacatttgcagaaaggctttctgctgttgaggccattgcaaatgcaatatcagttgtttcaagtaatggcccaggtaatcgggctggatcatcaagtagccgaagtttgagattacgggaaatgatgagacgttcgttgagagcagctggtttgggtagacatgaagctggagcttcatccagtgaccaccaggatccagtttcaccccccatagctccccctagttgggttcctgaccctcctgcgatggatcctgatggtgacattgattttatcctggcccccgctgtgggatctcttaccacagcagcaaccggtactggtcaaggaccaagcacctccactattccaggtccttccacagagccatctgtagtagaatccaaggatcgaaaggcgaatgctcattttatattgaaattgttatgtgacagtgtggttctccagccctatctacgagaacttctttctgccaaggatgcaagagggatgaccccatttatgtcagctgtaagtggccgagcttatcctgctgcaattaccatcttagaaactgctcagaaaattgcaaaagctgaaatatcctcaagtgaaaaagaggaagatgtattcatgggaatggtttgcccatcaggtaccaaccctgatgactctcctttatatgttttatgttgtaatgacacttgcagttttacatggactggagcagagcacattaaccaggatatttttgagtgtcgaacttgtggcttgctggagtcactgtgttgttgtacggaatgtgcaagggtttgtcataaaggtcatgattgcaaactcaaacggacatcaccaacagcctactgtgattgttgggagaaatgtaaatgtaaaactcttattgctggacagaaatctgctcgtcttgatctactttatcgcctgctcactgctactaatctggttactctgccaaacagcaggggagagcacctcttactattcttagtacagacagtcgcaaggcagacggtggagcattgtcaatacaggccacctcgaatcagggaagatcgtaaccgaaaaacagccagtcctgaagattcagatatgccagatcatgatttagagcctccaagatttgcccagcttgcattggagcgtgttctacaggactggaatgccttgaaatctatgattatgtttgggtcgcaggagaataaagaccctcttagtgccagcagtagaataggccatcttttgccagaagagcaagtatacctcaatcagcaaagtggcacaattcggctggactgtttcactcattgccttatagttaagtgtacagcagatattttgcttttagatactctactaggtacactagtgaaagaactccaaaacaaatatacacctggacgtagagaagaagctattgctgtgacaatgaggtttctacgttcagtggcaagagtttttgttattctgagtgtggaaatggcttcatccaaaaagaaaaacaactttattccacagccaattggaaaatgcaagcgtgtattccaagcattgctaccttacgctgtggaagaattgtgcaacgtagcagagtcactgattgttcctgtcagaatggggattgctcgtccaactgcaccatttaccctggctagtactagcatagatgccatgcagggcagtgaagaattattttcagtggaaccactaccaccacgaccatcatctgatcagtctagcagctccagtcagtctcagtcatcctacatcatcaggaatccacagcagaggcgcatcagccagtcacagcccgttcggggcagagatgaagaacaggatgatattgtttcagcagatgtggaagaggttgaggtggtggagggtgtggctggagaagaggatcatcatgatgaacaggaagaacacggggaagaaaatgctgaggcagagggacaacatgatgagcatgatgaagacgggagtgatatggagctggacttgttagcagcagctgaaacagaaagtgatagtgaaagtaaccacagcaaccaagataatgctagtgggcgcagaagcgttgtcactgcagcaactgctggttcagaagcaggagcaagcagtgttcctgccttcttttctgaagatgattctcaatcgaatgactcaagtgattctgatagcagtagtagtcagagtgacgacatagaacaggagacctttatgcttgatgagccattagaaagaaccacaaatagctcccatgccaatggtgctgcccaagctccccgttcaatgcagtgggctgtccgcaacacccagcatcagcgagcagccagtacagccccttccagtacatctacaccagcagcaagttcagcgggtttgatttatattgatccttcaaacttacgccggagtggtaccatcagtacaagtgctgcagctgcagcagctgctttggaagctagcaacgccagcagttacctaacatctgcaagcagtttagccagggcttacagcattgtcattagacaaatctcggacttgatgggccttattcctaagtataatcacctagtatactctcagattccagcagctgtgaaattgacttaccaagatgcagtaaacttacagaactatgtagaagaaaagcttattcccacttggaactggatggtcagtattatggattctactgaagctcaattacgttatggttctgcattagcatctgctggtgatcctggacatccaaatcatcctcttcacgcttctcagaattcagcgagaagagagaggatgactgcgcgagaagaagctagcttacgaacacttgaaggcagacgacgtgccaccttgcttagcgcccgtcaaggaatgatgtctgcacgaggagacttcctaaattatgctctgtctctaatgcggtctcataatgatgagcattctgatgttcttccagttttggatgtttgctcattgaagcatgtggcatatgtttttcaagcacttatatactggattaaggcaatgaatcagcagacaacattggatacacctcaactagaacgcaaaaggacgcgagaactcttggaactgggtattgataatgaagattcagaacatgaaaatgatgatgacaccaatcaaagtgctactttgaatgataaggatgatgactctcttcctgcagaaactggccaaaaccatccatttttccgacgttcagactccatgacattccttgggtgtatacccccaaatccatttgaagtgcctctggctgaagccatccccttggctgatcagccacatctgttgcagccaaatgctagaaaggaggatctttttggccgtccaagtcagggtctttattcttcatctgccagtagtgggaaatgtttaatggaggttacagtggatagaaactgcctagaggttcttccaacaaaaatgtcttatgctgccaatctgaaaaatgtaatgaacatgcaaaaccggcaaaaaaaagaaggggaagaacagcccgtgctgccagaagaaactgagagttcaaaaccagggccatctgctcatgatcttgctgcacaattaaaaagtagcttactagcagaaataggacttactgaaagtgaagggccacctctcacatctttcaggccacagtgtagctttatgggaatggttatttcccatgatatgctgctaggacgttggcgcctttctttagaactgttcggcagggtattcatggaagatgttggagcagaacctggatcaatcctaactgaattgggtggttttgaggtaaaagaatcaaaattccgcagagaaatggaaaaactgagaaaccagcagtcaagagatttgtcactagaggttgatcgggatcgagatcttctcattcagcagactatgaggcagcttaacaatcactttggtcgaagatgtgctactacaccaatggctgtacacagagtaaaagtcacatttaaggatgagccaggagagggcagtggtgtagcacgaagtttttatacagccattgcacaagcatttttatcaaatgaaaaattgccaaatctagagtgtatccaaaatgccaacaaaggcacccacacaagtttaatgcagagattaaggaaccgaggagagagagaccgggaaagggagagagaaagggaaatgaggaggagtagtggtttgcgagcaggttctcggagggaccgggatagagactttagaagacagctttccatcgacactaggccctttagaccagcctctgaagggaatcctagcgatgatcctgagcctttgccagcacatcggcaggcacttggagagaggctttatcctcgtgtacaagcaatgcaaccagcatttgcaagtaaaatcactggcatgttgttggaattatccccagctcagctgcttctccttctagcaagtgaggattctctgagagcaagagtggatgaggccatggaactcattattgcacatggacgggaaaatggagctgatagtatcctggatcttggattagtagactcctcagaaaaggtacagcaggaaaaccgaaagcgccatggctctagtcgaagtgtagtagatatggatttagatgatacagatgatggtgatgacaatgcccctttgttttaccaacctgggaaaagaggattttatactccaaggcctggcaagaacacagaagcaaggttgaattgtttcagaaacattggcaggattcttggactatgtctgttacagaatgaactatgtcctatcacattgaatagacatgtaattaaagtattgcttggtagaaaagtcaattggcatgattttgctttttttgatcctgtaatgtatgagagtttgcggcaactaatcctcgcgtctcagagttcagatgctgatgctgttttctcagcaatggatttggcatttgcaattgacctgtgtaaagaagaaggtggaggacaggttgaactcattcctaatggtgtaaatataccagtcactccacagaatgtatatgagtatgtgcggaaatacgcagaacacagaatgttggtagttgcagaacagcccttacatgcaatgaggaaaggtctactagatgtgcttccaaaaaattcattagaagatttaacggcagaagattttaggcttttggtaaatggctgcggtgaagtcaatgtgcaaatgctgatcagttttacctctttcaatgatgaatcaggagaaaatgctgagaagcttctgcagttcaagcgttggttctggtcaatagtagagaagatgagcatgacagaacgacaagatcttgtttacttttggacatcaagcccatcactgccagccagtgaagaaggattccagcctatgccctcaatcacaataagaccaccagatgaccaacatcttcctactgcaaatacttgcatttctcgactttacgtcccactctattcctctaaacagattctcaaacagaaattgttactcgccattaagaccaagaattttggttttgtgtagagtataaaaagtgtgtattgctgtgtaatattactagcaaattttgtagatttttttccatttgtctataaaagtttatggaagttaatgctgtcatacccccctggtggtaccttaaagagataaaatgcagacattccttgctgagtttatagcttaaaggcctaaggagcactagcaacatttggctatattggtttgctagtcaccaacttctgggtctaaccccagccaaagatgacagcagaacaacataatttacactgtgatttatctttttgctgagggggaaaaaatgtaaatgttctgaaaattcactgctgcctttgtggaaactgtttcagcaaaggttcttgtatagagggaatagggaatttcaaaataaaaaattaagtatgttctgtgttttcattttaactttttttatggtgtttaatttgtggttggctgcaactgtgtatcatgtatatggaacttgtaaaaaagttctcgacattcagatcttaagagatgaaatcacttttacctataaaaaccacttttattgcggtttgactgcattgagctctaggatattaaatgatatcactaatattttgcatgtaatttgctcatttgagtgagggcactttttttgtacatatgatggggccaatgcacaatacttttatcacaatcaactttttctttgtatccctatttcaatgagcagtcagtctcaagaggttactgcacttcagttctaactagacatttgtactaaggtatttcagttatgtaaactcagcctgggcactttctgataactgtaaaatgttttataagatcatgattattgaagatacattttggaaaattttaaatgttcgtgagcagcttaactacttttgtatctagccttttttaagtatcttgttacatttacttttttaaataaagaaattacagaagaaatgtcaagtaatattgaagaaacaatagtttttatttatgtagttgtacatttttaaactaagggcaatacactgacatggttatgtgcataaaaattttgacttaaagaactggaagtttatatacacctggactataagaaacagaagaaaatcagtccacattttacagttagcagagaatcctaaatggcactggcctggccaccttttcattttacaaatgggggaagtgaagtgtgaccccttacttggcataggaagttaacttacacctaataactgacaggtttttgttttgatgacctattaattatgtagcctaggattaatatcccaaaattactctggtttaagtagctttattcagtggcataataacactgttttcttccttaagtcttcaatgaagtgacttaaaacagtcactttacatattaaaaatgaggagagcaattctctggaatctctcctttcagttcctttgtaggatttctggccttgaggatagtcttcatgttcaaaggcactatgcttttattatataacttccttcagaagactgaaccacatgatattctcagccctgttaacactaaaaatatttaaaactgaatgatagtagtgactcattgtattacttaaaacttatataacacgctgtattagatgtgtgtaaattagccaaaggttattttacaaagtgagacattggtttttatgtctaaatgctatttctgaataaatgaaatagtaattagatcaagagctgattagcatcaatgtgtttgaaagatataaaatttatacatcaccttaacctctgtatgcacatgatgggattgataaaatattaaatgagaacaaactagatatgattaggacatttgaaaccctaattgtgaatttatttttaatagttactgaaatgaaaatatttaaaataatgcacaatgtcttaagtcttcctaaatcaagattttggttaaaaaatacttctaataatagtaaaagattttttttttaagtaaatcataaaacggttctaaatgtaaaataaagacatgtaaaataaagttctcttttggtcttgtttagtgtttaaatctaacaattgaaaacaaatttaggaagagaag

SEQ ID NO: 300590 - DNA, 9994 bp, Homo sapiens
atccgcctgcctcagcctcccaaagcgctgggattacagatgtgagccaccgtgcccggccacaagtgttatatcttaacgagtgatctttcttgtgattatgtagtaagtagctcaggcgacatttatgcatttgatgttctttaaaatctttgttaataatgtaggttgttgtgtttttcctcaggcgatgtcattccctagtttttaaatgtatgtgaatttttagagctctttcagcagtctacagttgctctttgtgtgtatgctgcagtgatgtttgtttctgtttatagaggatcttatgtctctccttgatgccgacattcattctgcccacccaagtgtcattattgatgcagatgccatgttttctgaagacattagctattttggttacccttcttttcgtcgttcatcactttccaggctaggctcatctcgagttctccttcttcccttagagagagactctgagctgttgcgtgaacgtgaatccgttttacgtttacgtgaacgaaggtggcttgatggagcctcatttgataatgaaaggggttctaccagcaaggaaggagagccaaacttggataagaagaatacacctgttcaaagtccagtatctctaggagaagatttgcagtggtggcctgataaggatggaacaaaattcatctgtattggggctctgtattctgaacttctggctgtcagcagtaaaggagaactttatcagtggaaatggagtgaatctgagccttacagaaatgcccagaatccttcattacatcatccacgagcaacatttttggggttaaccaatgaaaagatagtcctcctgtctgcaaatagcataagagcaactgtagctacagaaaataacaaggttgctacatgggtggatgaaactttaagttctgtggcttctaaattagagcacactgctcagacttactctgaacttcaaggagagcggatagtttctttacattgctgtgccctttacacctgcgctcagctggaaaacagtttatattggtggggtgtagttccttttagtcaaaggaagaaaatgttagagaaagctagagcaaaaaataaaaagcctaaatccagtgctggtatttcttcaatgccgaacatcactgttggtacccaggtatgcttgagaaataatcctctttatcatgctggagcagttgcattttcaattagtgctgggattcctaaagttggtgtcttaatggagtcagtttggaatatgaatgacagctgtagatttcaacttagatctcctgaaagcttgaaaaacatggaaaaagctagcaaaactactgaagctaagcctgaaagtaagcaggagccagtgaaaacagaaatgggtcctccaccatctccagcatccacgtgtagtgatgcatcctcaattgccagcagtgcatcaatgccatacaaacgacgacggtcaacccctgcaccaaaagaagaggaaaaggtgaatgaagagcagtggtctcttcgggaagtggtttttgtggaagatgtcaagaatgttcctgttggcaaggtgctaaaagtagatggtgcctatgttgctgtaaaatttccaggaacctccagtaatactaactgtcagaacagctctggtccagatgctgacccttcttctctcctgcaggattgtaggttacttagaattgatgaattgcaggttgtcaaaactggtggaacaccgaaggttcccgactgtttccaaaggactcctaaaaagctttgtatacctgaaaaaacagaaatattagcagtgaatgtagattccaaaggtgttcatgctgttctgaagactggaaattgggtacgatactgtatctttgatcttgctacaggaaaagcagaacaggaaaataattttcctacaagcagcattgctttccttggtcagaatgagaggaatgtagccattttcactgctggacaggaatctcccattattcttcgagatggaaatggtaccatctacccaatggccaaagattgcatgggaggaataagggatcccgattggctggatcttccacctattagtagtcttggaatgggtgtgcattctttaataaatcttcctgccaattcaacaatcaaaaagaaagctgctgttatcatcatggctgtagagaaacaaaccttaatgcaacacattctgcgctgtgactatgaggcctgtcgacaatatctaatgaatcttgagcaagcggttgttttagagcagaatctacagatgctgcagacattcatcagccacagatgtgatggaaatcgaaatattttgcatgcttgtgtatcagtttgctttccaaccagcaataaagaaactaaagaagaagaggaagcggagcgttctgaaagaaatacatttgcagaaaggctttctgctgttgaggccattgcaaatgcaatatcagttgtttcaagtaatggcccaggtaatcgggctggatcatcaagtagccgaagtttgagattacgggaaatgatgagacgttcgttgagagcagctggtttgggtagacatgaagctggagcttcatccagtgaccaccaggatccagtttcaccccccatagctccccctagttgggttcctgaccctcctgcgatggatcctgatggtgacattgattttatcctggcccccgctgtgggatctcttaccacagcagcaaccggtactggtcaaggaccaagcacctccactattccaggtccttccacagagccatctgtagtagaatccaaggatcgaaaggcgaatgctcattttatattgaaattgttatgtgacagtgtggttctccagccctatctacgagaacttctttctgccaaggatgcaagagggatgaccccatttatgtcagctgtaagtggccgagcttatcctgctgcaattaccatcttagaaactgctcagaaaattgcaaaagctgaaatatcctcaagtgaaaaagaggaagatgtattcatgggaatggtttgcccatcaggtaccaaccctgatgactctcctttatatgttttatgttgtaatgacacttgcagttttacatggactggagcagagcacattaaccaggatatttttgagtgtcgaacttgtggcttgctggagtcactgtgttgttgtacggaatgtgcaagggtttgtcataaaggtcatgattgcaaactcaaacggacatcaccaacagcctactgtgattgttgggagaaatgtaaatgtaaaactcttattgctggacagaaatctgctcgtcttgatctactttatcgcctgctcactgctactaatctggttactctgccaaacagcaggggagagcacctcttactattcttagtacagacagtcgcaaggcagacggtggagcattgtcaatacaggccacctcgaatcagggaagatcgtaaccgaaaaacagccagtcctgaagattcagatatgccagatcatgatttagagcctccaagatttgcccagcttgcattggagcgtgttctacaggactggaatgccttgaaatctatgattatgtttgggtcgcaggagaataaagaccctcttagtgccagcagtagaataggccatcttttgccagaagagcaagtatacctcaatcagcaaagtggcacaattcggctggactgtttcactcattgccttatagttaagtgtacagcagatattttgcttttagatactctactaggtacactagtgaaagaactccaaaacaaatatacacctggacgtagagaagaagctattgctgtgacaatgaggtttctacgttcagtggcaagagtttttgttattctgagtgtggaaatggcttcatccaaaaagaaaaacaactttattccacagccaattggaaaatgcaagcgtgtattccaagcattgctaccttacgctgtggaagaattgtgcaacgtagcagagtcactgattgttcctgtcagaatggggattgctcgtccaactgcaccatttaccctggctagtactagcatagatgccatgcagggcagtgaagaattattttcagtggaaccactaccaccacgaccatcatctgatcagtctagcagctccagtcagtctcagtcatcctacatcatcaggaatccacagcagaggcgcatcagccagtcacagcccgttcggggcagagatgaagaacaggatgatattgtttcagcagatgtggaagaggttgaggtggtggagggtgtggctggagaagaggatcatcatgatgaacaggaagaacacggggaagaaaatgctgaggcagagggacaacatgatgagcatgatgaagacgggagtgatatggagctggacttgttagcagcagctgaaacagaaagtgatagtgaaagtaaccacagcaaccaagataatgctagtgggcgcagaagcgttgtcactgcagcaactgctggttcagaagcaggagcaagcagtgttcctgccttcttttctgaagatgattctcaatcgaatgactcaagtgattctgatagcagtagtagtcagagtgacgacatagaacaggagacctttatgcttgatgagccattagaaagaaccacaaatagctcccatgccaatggtgctgcccaagctccccgttcaatgcagtgggctgtccgcaacacccagcatcagcgagcagccagtacagccccttccagtacatctacaccagcagcaagttcagcgggtttgatttatattgatccttcaaacttacgccggagtggtaccatcagtacaagtgctgcagctgcagcagctgctttggaagctagcaacgccagcagttacctaacatctgcaagcagtttagccagggcttacagcattgtcattagacaaatctcggacttgatgggccttattcctaagtataatcacctagtatactctcagattccagcagctgtgaaattgacttaccaagatgcagtaaacttacagaactatgtagaagaaaagcttattcccacttggaactggatggtcagtattatggattctactgaagctcaattacgttatggttctgcattagcatctgctggtgatcctggacatccaaatcatcctcttcacgcttctcagaattcagcgagaagagagaggatgactgcgcgagaagaagctagcttacgaacacttgaaggcagacgacgtgccaccttgcttagcgcccgtcaaggaatgatgtctgcacgaggagacttcctaaattatgctctgtctctaatgcggtctcataatgatgagcattctgatgttcttccagttttggatgtttgctcattgaagcatgtggcatatgtttttcaagcacttatatactggattaaggcaatgaatcagcagacaacattggatacacctcaactagaacgcaaaaggacgcgagaactcttggaactgggtattgataatgaagattcagaacatgaaaatgatgatgacaccaatcaaagtgctactttgaatgataaggatgatgactctcttcctgcagaaactggccaaaaccatccatttttccgacgttcagactccatgacattccttgggtgtatacccccaaatccatttgaagtgcctctggctgaagccatccccttggctgatcagccacatctgttgcagccaaatgctagaaaggaggatctttttggccgtccaagtcagggtctttattcttcatctgccagtagtgggaaatgtttaatggaggttacagtggatagaaactgcctagaggttcttccaacaaaaatgtcttatgctgccaatctgaaaaatgtaatgaacatgcaaaaccggcagggccatctgctcatgatcttgctgcacaattaaaaagtagcttactagcagaaataggacttactgaaagtgaagggccacctctcacatctttcaggccacagtgtagctttatgggaatggttatttcccatgatatgctgctaggacgttggcgcctttctttagaactgttcggcagggtattcatggaagatgttggagcagaacctggatcaatcctaactgaattgggtggttttgaggtaaaagaatcaaaattccgcagagaaatggaaaaactgagaaaccagcagtcaagagatttgtcactagaggttgatcgggatcgagatcttctcattcagcagactatgaggcagcttaacaatcactttggtcgaagatgtgctactacaccaatggctgtacacagagtaaaagtcacatttaaggatgagccaggagagggcagtggtgtagcacgaagtttttatacagccattgcacaagcatttttatcaaatgaaaaattgccaaatctagagtgtatccaaaatgccaacaaaggcacccacacaagtttaatgcagagattaaggaaccgaggagagagagaccgggaaagggagagagaaagggaaatgaggaggagtagtggtttgcgagcaggttctcggagggaccgggatagagactttagaagacagctttccatcgacactaggccctttagaccagcctctgaagggaatcctagcgatgatcctgagcctttgccagcacatcggcaggcacttggagagaggctttatcctcgtgtacaagcaatgcaaccagcatttgcaagtaaaatcactggcatgttgttggaattatccccagctcagctgcttctccttctagcaagtgaggattctctgagagcaagagtggatgaggccatggaactcattattgcacatggacgggaaaatggagctgatagtatcctggatcttggattagtagactcctcagaaaaggtacagcaggaaaaccgaaagcgccatggctctagtcgaagtgtagtagatatggatttagatgatacagatgatggtgatgacaatgcccctttgttttaccaacctgggaaaagaggattttatactccaaggcctggcaagaacacagaagcaaggttgaattgtttcagaaacattggcaggattcttggactatgtctgttacagaatgaactatgtcctatcacattgaatagacatgtaattaaagtattgcttggtagaaaagtcaattggcatgattttgctttttttgatcctgtaatgtatgagagtttgcggcaactaatcctcgcgtctcagagttcagatgctgatgctgttttctcagcaatggatttggcatttgcaattgacctgtgtaaagaagaaggtggaggacaggttgaactcattcctaatggtgtaaatataccagtcactccacagaatgtatatgagtatgtgcggaaatacgcagaacacagaatgttggtagttgcagaacagcccttacatgcaatgaggaaaggtctactagatgtgcttccaaaaaattcattagaagatttaacggcagaagattttaggcttttggtaaatggctgcggtgaagtcaatgtgcaaatgctgatcagttttacctctttcaatgatgaatcaggagaaaatgctgagaagcttctgcagttcaagcgttggttctggtcaatagtagagaagatgagcatgacagaacgacaagatcttgtttacttttggacatcaagcccatcactgccagccagtgaagaaggattccagcctatgccctcaatcacaataagaccaccagatgaccaacatcttcctactgcaaatacttgcatttctcgactttacgtcccactctattcctctaaacagattctcaaacagaaattgttactcgccattaagaccaagaattttggttttgtgtagagtataaaaagtgtgtattgctgtgtaatattactagcaaattttgtagatttttttccatttgtctataaaagtttatggaagttaatgctgtcatacccccctggtggtaccttaaagagataaaatgcagacattccttgctgagtttatagcttaaaggcctaaggagcactagcaacatttggctatattggtttgctagtcaccaacttctgggtctaaccccagccaaagatgacagcagaacaacataatttacactgtgatttatctttttgctgagggggaaaaaatgtaaatgttctgaaaattcactgctgcctttgtggaaactgtttcagcaaaggttcttgtatagagggaatagggaatttcaaaataaaaaattaagtatgttctgtgttttcattttaactttttttatggtgtttaatttgtggttggctgcaactgtgtatcatgtatatggaacttgtaaaaaagttctcgacattcagatcttaagagatgaaatcacttttacctataaaaaccacttttattgcggtttgactgcattgagctctaggatattaaatgatatcactaatattttgcatgtaatttgctcatttgagtgagggcactttttttgtacatatgatggggccaatgcacaatacttttatcacaatcaactttttctttgtatccctatttcaatgagcagtcagtctcaagaggttactgcacttcagttctaactagacatttgtactaaggtatttcagttatgtaaactcagcctgggcactttctgataactgtaaaatgttttataagatcatgattattgaagatacattttggaaaattttaaatgttcgtgagcagcttaactacttttgtatctagccttttttaagtatcttgttacatttacttttttaaataaagaaattacagaagaaatgtcaagtaatattgaagaaacaatagtttttatttatgtagttgtacatttttaaactaagggcaatacactgacatggttatgtgcataaaaattttgacttaaagaactggaagtttatatacacctggactataagaaacagaagaaaatcagtccacattttacagttagcagagaatcctaaatggcactggcctggccaccttttcattttacaaatgggggaagtgaagtgtgaccccttacttggcataggaagttaacttacacctaataactgacaggtttttgttttgatgacctattaattatgtagcctaggattaatatcccaaaattactctggtttaagtagctttattcagtggcataataacactgttttcttccttaagtcttcaatgaagtgacttaaaacagtcactttacatattaaaaatgaggagagcaattctctggaatctctcctttcagttcctttgtaggatttctggccttgaggatagtcttcatgttcaaaggcactatgcttttattatataacttccttcagaagactgaaccacatgatattctcagccctgttaacactaaaaatatttaaaactgaatgatagtagtgactcattgtattacttaaaacttatataacacgctgtattagatgtgtgtaaattagccaaaggttattttacaaagtgagacattggtttttatgtctaaatgctatttctgaataaatgaaatagtaattagatcaagagctgattagcatcaatgtgtttgaaagatataaaatttatacatcaccttaacctctgtatgcacatgatgggattgataaaatattaaatgagaacaaactagatatgattaggacatttgaaaccctaattgtgaatttatttttaatagttactgaaatgaaaatatttaaaataatgcacaatgtcttaagtcttcctaaatcaagattttggttaaaaaatacttctaataatagtaaaagattttttttttaagtaaatcataaaacggttctaaatgtaaaataaagacatgtaaaataaagttctcttttggtcttgtttagtgtttaaatctaacaattgaaaacaaatttaggaagagaag

SEQ ID NO: 300591 - DNA, 5810 bp, Homo sapiens
  misc_feature (89)..(89): n is a, c, g, or t
ctattttatctaaataactgcgctgtaacaaactttgtgttagacagttgaaactgttagagttgggggctctgctttttccccctggnaattttcccttggtataagatgtgctagattaatttcattgtgaggtgaagacgggagtgatatggagctggacttgttagcagcagctgaaacagaaagtgatagtgaaagtaaccacagcaaccaagataatgctagtgggcgcagaagcgttgtcactgcagcaactgctggttcagaagcaggagcaagcagtgttcctgccttcttttctgaagatgattctcaatcgaatgactcaagtgattctgatagcagtagtagtcagagtgacgacatagaacaggagacctttatgcttgatgagccattagaaagaaccacaaatagctcccatgccaatggtgctgcccaagctccccgttcaatgcagtgggctgtccgcaacacccagcatcagcgagcagccagtacagccccttccagtacatctacaccagcagcaagttcagcgggtttgatttatattgatccttcaaacttacgccggagtggtaccatcagtacaagtgctgcagctgcagcagctgctttggaagctagcaacgccagcagttacctaacatctgcaagcagtttagccagggcttacagcattgtcattagacaaatctcggacttgatgggccttattcctaagtataatcacctagtatactctcagattccagcagctgtgaaattgacttaccaagatgcagtaaacttacagaactatgtagaagaaaagcttattcccacttggaactggatggtcagtattatggattctactgaagctcaattacgttatggttctgcattagcatctgctggtgatcctggacatccaaatcatcctcttcacgcttctcagaattcagcgagaagagagaggatgactgcgcgagaagaagctagcttacgaacacttgaaggcagacgacgtgccaccttgcttagcgcccgtcaaggaatgatgtctgcacgaggagacttcctaaattatgctctgtctctaatgcggtctcataatgatgagcattctgatgttcttccagttttggatgtttgctcattgaagcatgtggcatatgtttttcaagcacttatatactggattaaggcaatgaatcagcagacaacattggatacacctcaactagaacgcaaaaggacgcgagaactcttggaactgggtattgataatgaagattcagaacatgaaaatgatgatgacaccaatcaaagtgctactttgaatgataaggatgatgactctcttcctgcagaaactggccaaaaccatccatttttccgacgttcagactccatgacattccttgggtgtatacccccaaatccatttgaagtgcctctggctgaagccatccccttggctgatcagccacatctgttgcagccaaatgctagaaaggaggatctttttggccgtccaagtcagggtctttattcttcatctgccagtagtgggaaatgtttaatggaggttacagtggatagaaactgcctagaggttcttccaacaaaaatgtcttatgctgccaatctgaaaaatgtaatgaacatgcaaaaccggcaaaaaaaagaaggggaagaacagcccgtgctgccagaagaaactgagagttcaaaaccagggccatctgctcatgatcttgctgcacaattaaaaagtagcttactagcagaaataggacttactgaaagtgaagggccacctctcacatctttcaggccacagtgtagctttatgggaatggttatttcccatgatatgctgctaggacgttggcgcctttctttagaactgttcggcagggtattcatggaagatgttggagcagaacctggatcaatcctaactgaattgggtggttttgaggtaaaagaatcaaaattccgcagagaaatggaaaaactgagaaaccagcagtcaagagatttgtcactagaggttgatcgggatcgagatcttctcattcagcagactatgaggcagcttaacaatcactttggtcgaagatgtgctactacaccaatggctgtacacagagtaaaagtcacatttaaggatgagccaggagagggcagtggtgtagcacgaagtttttatacagccattgcacaagcatttttatcaaatgaaaaattgccaaatctagagtgtatccaaaatgccaacaaaggcacccacacaagtttaatgcagagattaaggaaccgaggagagagagaccgggaaagggagagagaaagggaaatgaggaggagtagtggtttgcgagcaggttctcggagggaccgggatagagactttagaagacagctttccatcgacactaggccctttagaccagcctctgaagggaatcctagcgatgatcctgagcctttgccagcacatcggcaggcacttggagagaggctttatcctcgtgtacaagcaatgcaaccagcatttgcaagtaaaatcactggcatgttgttggaattatccccagctcagctgcttctccttctagcaagtgaggattctctgagagcaagagtggatgaggccatggaactcattattgcacatggacgggaaaatggagctgatagtatcctggatcttggattagtagactcctcagaaaaggtacagcaggaaaaccgaaagcgccatggctctagtcgaagtgtagtagatatggatttagatgatacagatgatggtgatgacaatgcccctttgttttaccaacctgggaaaagaggattttatactccaaggcctggcaagaacacagaagcaaggttgaattgtttcagaaacattggcaggattcttggactatgtctgttacagaatgaactatgtcctatcacattgaatagacatgtaattaaagtattgcttggtagaaaagtcaattggcatgattttgctttttttgatcctgtaatgtatgagagtttgcggcaactaatcctcgcgtctcagagttcagatgctgatgctgttttctcagcaatggatttggcatttgcaattgacctgtgtaaagaagaaggtggaggacaggttgaactcattcctaatggtgtaaatataccagtcactccacagaatgtatatgagtatgtgcggaaatacgcagaacacagaatgttggtagttgcagaacagcccttacatgcaatgaggaaaggtctactagatgtgcttccaaaaaattcattagaagatttaacggcagaagattttaggcttttggtaaatggctgcggtgaagtcaatgtgcaaatgctgatcagttttacctctttcaatgatgaatcaggagaaaatgctgagaagcttctgcagttcaagcgttggttctggtcaatagtagagaagatgagcatgacagaacgacaagatcttgtttacttttggacatcaagcccatcactgccagccagtgaagaaggattccagcctatgccctcaatcacaataagaccaccagatgaccaacatcttcctactgcaaatacttgcatttctcgactttacgtcccactctattcctctaaacagattctcaaacagaaattgttactcgccattaagaccaagaattttggttttgtgtagagtataaaaagtgtgtattgctgtgtaatattactagcaaattttgtagatttttttccatttgtctataaaagtttatggaagttaatgctgtcatacccccctggtggtaccttaaagagataaaatgcagacattccttgctgagtttatagcttaaaggcctaaggagcactagcaacatttggctatattggtttgctagtcaccaacttctgggtctaaccccagccaaagatgacagcagaacaacataatttacactgtgatttatctttttgctgagggggaaaaaatgtaaatgttctgaaaattcactgctgcctttgtggaaactgtttcagcaaaggttcttgtatagagggaatagggaatttcaaaataaaaaattaagtatgttctgtgttttcattttaactttttttatggtgtttaatttgtggttggctgcaactgtgtatcatgtatatggaacttgtaaaaaagttctcgacattcagatcttaagagatgaaatcacttttacctataaaaaccacttttattgcggtttgactgcattgagctctaggatattaaatgatatcactaatattttgcatgtaatttgctcatttgagtgagggcactttttttgtacatatgatggggccaatgcacaatacttttatcacaatcaactttttctttgtatccctatttcaatgagcagtcagtctcaagaggttactgcacttcagttctaactagacatttgtactaaggtatttcagttatgtaaactcagcctgggcactttctgataactgtaaaatgttttataagatcatgattattgaagatacattttggaaaattttaaatgttcgtgagcagcttaactacttttgtatctagccttttttaagtatcttgttacatttacttttttaaataaagaaattacagaagaaatgtcaagtaatattgaagaaacaatagtttttatttatgtagttgtacatttttaaactaagggcaatacactgacatggttatgtgcataaaaattttgacttaaagaactggaagtttatatacacctggactataagaaacagaagaaaatcagtccacattttacagttagcagagaatcctaaatggcactggcctggccaccttttcattttacaaatgggggaagtgaagtgtgaccccttacttggcataggaagttaacttacacctaataactgacaggtttttgttttgatgacctattaattatgtagcctaggattaatatcccaaaattactctggtttaagtagctttattcagtggcataataacactgttttcttccttaagtcttcaatgaagtgacttaaaacagtcactttacatattaaaaatgaggagagcaattctctggaatctctcctttcagttcctttgtaggatttctggccttgaggatagtcttcatgttcaaaggcactatgcttttattatataacttccttcagaagactgaaccacatgatattctcagccctgttaacactaaaaatatttaaaactgaatgatagtagtgactcattgtattacttaaaacttatataacacgctgtattagatgtgtgtaaattagccaaaggttattttacaaagtgagacattggtttttatgtctaaatgctatttctgaataaatgaaatagtaattagatcaagagctgattagcatcaatgtgtttgaaagatataaaatttatacatcaccttaacctctgtatgcacatgatgggattgataaaatattaaatgagaacaaactagatatgattaggacatttgaaaccctaattgtgaatttatttttaatagttactgaaatgaaaatatttaaaataatgcacaatgtcttaagtcttcctaaatcaagattttggttaaaaaatacttctaataatagtaaaagattttttttttaagtaaatcataaaacggttctaaatgtaaaataaagacatgtaaaataaagttctcttttggtcttgtttagtgtttaaatctaacaattgaaaacaaatttaggaagagaag

SEQ ID NO: 300592 - DNA, 10007 bp, Homo sapiens
atccgcctgcctcagcctcccaaagcgctgggattacagatgtgagccaccgtgcccggccacaagtgttatatcttaacgagtgatctttcttgtgattatgtagtaagtagctcaggcgacatttatgcatttgatgttctttaaaatctttgttaataatgtaggttgttgtgtttttcctcaggcgatgtcattccctagtttttaaatgtatgtgaatttttagagctctttcagcagtctacagttgctctttgtgtgtatgctgcagtgatgtttgtttctgtttatagaggatcttatgtctctccttgatgccgacattcattctgcccacccaagtgtcattattgatgcagatgccatgttttctgaagacattagctattttggttacccttcttttcgtcgttcatcactttccaggctaggctcatctcgagttctccttcttcccttagagagagactctgagctgttgcgtgaacgtgaatccgttttacgtttacgtgaacgaaggtggcttgatggagcctcatttgataatgaaaggggttctaccagcaaggaaggagagccaaacttggataagaagaatacacctgttcaaagtccagtatctctaggagaagatttgcagtggtggcctgataaggatggaacaaaattcatctgtattggggctctgtattctgaacttctggctgtcagcagtaaaggagaactttatcagtggaaatggagtgaatctgagccttacagaaatgcccagaatccttcattacatcatccacgagcaacatttttggggttaaccaatgaaaagatagtcctcctgtctgcaaatagcataagagcaactgtagctacagaaaataacaaggttgctacatgggtggatgaaactttaagttctgtggcttctaaattagagcacactgctcagacttactctgaacttcaaggagagcggatagtttctttacattgctgtgccctttacacctgcgctcagctggaaaacagtttatattggtggggtgtagttccttttagtcaaaggaagaaaatgttagagaaagctagagcaaaaaataaaaagcctaaatccagtgctggtatttcttcaatgccgaacatcactgttggtacccaggtatgcttgagaaataatcctctttatcatgctggagcagttgcattttcaattagtgctgggattcctaaagttggtgtcttaatggagtcagtttggaatatgaatgacagctgtagatttcaacttagatctcctgaaagcttgaaaaacatggaaaaagctagcaaaactactgaagctaagcctgaaagtaagcaggagccagtgaaaacagaaatgggtcctccaccatctccagcatccacgtgtagtgatgcatcctcaattgccagcagtgcatcaatgccatacaaacgacgacggtcaacccctgcaccaaaagaagaggaaaaggtgaatgaagagcagtggtctcttcgggaagtggtttttgtggaagatgtcaagaatgttcctgttggcaaggtgctaaaagtagatggtgcctatgttgctgtaaaatttccaggaacctccagtaatactaactgtcagaacagctctggtccagatgctgacccttcttctctcctgcaggattgtaggttacttagaattgatgaattgcaggttgtcaaaactggtggaacaccgaaggttcccgactgtttccaaaggactcctaaaaagctttgtatacctgaaaaaacagaaatattagcagtgaatgtagattccaaaggtgttcatgctgttctgaagactggaaattgggtacgatactgtatctttgatcttgctacaggaaaagcagaacaggaaaataattttcctacaagcagcattgctttccttggtcagaatgagaggaatgtagccattttcactgctggacaggaatctcccattattcttcgagatggaaatggtaccatctacccaatggccaaagattgcatgggaggaataagggatcccgattggctggatcttccacctattagtagtcttggaatgggtgtgcattctttaataaatcttcctgccaattcaacaatcaaaaagaaagctgctgttatcatcatggctgtagagaaacaaaccttaatgcaacacattctgcgctgtgactatgaggcctgtcgacaatatctaatgaatcttgagcaagcggttgttttagagcagaatctacagatgctgcagacattcatcagccacagatgtgatggaaatcgaaatattttgcatgcttgtgtatcagtttgctttccaaccagcaataaagaaactaaagaagaagaggaagcggagcgttctgaaagaaatacatttgcagaaaggctttctgctgttgaggccattgcaaatgcaatatcagttgtttcaagtaatggcccaggtaatcgggctggatcatcaagtagccgaagtttgagattacgggaaatgatgagacgttcgttgagagcagctggtttgggtagacatgaagctggagcttcatccagtgaccaccaggatccagtttcaccccccatagctccccctagttgggttcctgaccctcctgcgatggatcctgatggtgacattgattttatcctggcccccgctgtgggatctcttaccacagcagcaaccggtactggtcaaggaccaagcacctccactattccaggtccttccacagagccatctgtagtagaatccaaggatcgaaaggcgaatgctcattttatattgaaattgttatgtgacagtgtggttctccagccctatctacgagaacttctttctgccaaggatgcaagagggatgaccccatttatgtcagctgtaagtggccgagcttatcctgctgcaattaccatcttagaaactgctcagaaaattgcaaaagctgaaatatcctcaagtgaaaaagaggaagatgtattcatgggaatggtttgcccatcaggtaccaaccctgatgactctcctttatatgttttatgttgtaatgacacttgcagttttacatggactggagcagagcacattaaccaggatatttttgagtgtcgaacttgtggcttgctggagtcactgtgttgttgtacggaatgtgcaagggtttgtcataaaggtcatgattgcaaactcaaacggacatcaccaacagcctactgtgattgttgggagaaatgtaaatgtaaaactcttattgctggacagaaatctgctcgtcttgatctactttatcgcctgctcactgctactaatctggttactctgccaaacagcaggggagagcacctcttactattcttagtacagacagtcgcaaggcagacggtggagcattgtcaatacaggccacctcgaatcagggaagatcgtaaccgaaaaacagccagtcctgaagattcagatatgccagatcatgatttagagcctccaagatttgcccagcttgcattggagcgtgttctacaggactggaatgccttgaaatctatgattatgtttgggtcgcaggagaataaagaccctcttagtgccagcagtagaataggccatcttttgccagaagagcaagtatacctcaatcagcaaagtggcacaattcggctggactgtttcactcattgccttatagttaagtgtacagcagatattttgcttttagatactctactaggtacactagtgaaagaactccaaaacaaatatacacctggacgtagagaagaagctattgctgtgacaatgaggtttctacgttcagtggcaagagtttttgttattctgagtgtggaaatggcttcatccaaaaagaaaaacaactttattccacagccaattggaaaatgcaagcgtgtattccaagcattgctaccttacgctgtggaagaattgtgcaacgtagcagagtcactgattgttcctgtcagaatggggattgctcgtccaactgcaccatttaccctggctagtactagcatagatgccatgcagggcagtgaagaattattttcagtggaaccactaccaccacgaccatcatctgatcagtctagcagctccagtcagtctcagtcatcctacatcatcaggaatccacagcagaggcgcatcagccagtcacagcccgttcggggcagagatgaagaacaggatgatattgtttcagcagatgtggaagaggttgaggtggtggagggtgtggctggagaagaggatcatcatgatgaacaggaagaacacggggaagaaaatgctgaggcagagggacaacatgatgagcatgatgaagacgggagtgatatggagctggacttgttagcagcagctgaaacagaaagtgatagtgaaagtaaccacagcaaccaagataatgctagtgggcgcagaagcgttgtcactgcagcaactgctggttcagaagcaggagcaagcagtgttcctgccttcttttctgaagatgattctcaatcgaatgactcaagtgattctgatagcagtagtagtcagagtgacgacatagaacaggagacctttatgcttgatgagccattagaaagaaccacaaatagctcccatgccaatggtgctgcccaagctccccgttcaatgcagtgggctgtccgcaacacccagcatcagcgagcagccagtacagccccttccagtacatctacaccagcagcaagttcagcgggtttgatttatattgatccttcaaacttacgccggagtggtaccatcagtacaagtgctgcagctgcagcagctgctttggaagctagcaacgccagcagttacctaacatctgcaagcagtttagccagggcttacagcattgtcattagacaaatctcggacttgatgggccttattcctaagtataatcacctagtatactctcagattccagcagctgtgaaattgacttaccaagatgcagtaaacttacagaactatgtagaagaaaagcttattcccacttggaactggatggtcagtattatggattctactgaagctcaattacgttatggttctgcattagcatctgctggtgatcctggacatccaaatcatcctcttcacgcttctcagaattcagcgagaagagagaggatgactgcgcgagaagaagctagcttacgaacacttgaaggcagacgacgtgccaccttgcttagcgcccgtcaaggaatgatgtctgcacgaggagacttcctaaattatgctctgtctctaatgcggtctcataatgatgagcattctgatgttcttccagttttggatgtttgctcattgaagcatgtggcatatgtttttcaagcacttatatactggattaaggcaatgaatcagcagacaacattggatacacctcaactagaacgcaaaaggacgcgagaactcttggaactgggtattgataatgaagattcagaacatgaaaatgatgatgacaccaatcaaagtgctactttgaatgataaggatgatgactctcttcctgcagaaactggccaaaaccatccatttttccgacgttcagactccatgacattccttgggtgtatacccccaaatccatttgaagtgcctctggctgaagccatccccttggctgatcagccacatctgttgcagccaaatgctagaaaggaggatctttttggccgtccaagtcagggtctttattcttcatctgccagtagtgggaaatgtttaatggaggttacagtggatagaaactgcctagaggttcttccaacaaaaatgtcttatgctgccaatctgaaaaatgtaatgaacatgcaaaaccggcaaaaaaaagaaggggaagaacagcccgtgctgccagaagaaactgagagttcaaaaccagggccatctgctcatgatcttgctgcacaattaaaaagtagcttactagcagaaataggacttactgaaagtgaagggccacctctcacatctttcaggccacagtgtagctttatgggaatggttatttcccatgatatgctgctaggacgttggcgcctttctttagaactgttcggcagggtattcatggaagatgttggagcagaacctggatcaatcctaactgaattgggtggttttgaggtaaaagaatcaaaattccgcagagaaatggaaaaactgagaaaccagcagtcaagagatttgtcactagaggttgatcgggatcgagatcttctcattcagcagactatgaggcagcttaacaatcactttggtcgaagatgtgctactacaccaatggctgtacacagagtaaaagtcacatttaaggatgagccaggagagggcagtggtgtagcacgaagtttttatacagccattgcacaagcatttttatcaaatgaaaaattgccaaatctagagtgtatccaaaatgccaacaaaggcacccacacaagtttaatgcagagattaaggaaccgaggagagagagaccgggaaagggagagagaaagggaaatgaggaggagtagtggtttgcgagcaggttctcggagggaccgggatagagactttagaagacagctttccatcgacactaggccctttagaccagcctctgaagggaatcctagcgatgatcctgagcctttgccagcacatcggcaggcacttggagagaggctttatcctcgtgtacaagcaatgcaaccagcatttgcaagtaaaatcactggcatgttgttggaattatccccagctcagctgcttctccttctagcaagtgaggattctctgagagcaagagtggatgaggccatggaactcattattgcacatggacgggaaaatggagctgatagtatcctggatcttggattagtagactcctcagaaaaggtacagcaggaaaaccgaaagcgccatggctctagtcgaagtgtagtagatatggatttagatgatacagatgatggtgatgacaatgcccctttgttttaccaacctgggaaaagaggattttatactccaaggcctggcaagaacacagaagcaaggttgaattgtttcagaaacattggcaggattcttggactatgtctgttacagaatgaactatgtcctatcacattgaatagacatgtaattaaagtattgcttggtagaaaaagtttgcggcaactaatcctcgcgtctcagagttcagatgctgatgctgttttctcagcaatggatttggcatttgcaattgacctgtgtaaagaagaaggtggaggacaggttgaactcattcctaatggtgtaaatataccagtcactccacagaatgtatatgagtatgtgcggaaatacgcagaacacagaatgttggtagttgcagaacagcccttacatgcaatgaggaaaggtctactagatgtgcttccaaaaaattcattagaagatttaacggcagaagattttaggcttttggtaaatggctgcggtgaagtcaatgtgcaaatgctgatcagttttacctctttcaatgatgaatcaggagaaaatgctgagaagcttctgcagttcaagcgttggttctggtcaatagtagagaagatgagcatgacagaacgacaagatcttgtttacttttggacatcaagcccatcactgccagccagtgaagaaggattccagcctatgccctcaatcacaataagaccaccagatgaccaacatcttcctactgcaaatacttgcatttctcgactttacgtcccactctattcctctaaacagattctcaaacagaaattgttactcgccattaagaccaagaattttggttttgtgtagagtataaaaagtgtgtattgctgtgtaatattactagcaaattttgtagatttttttccatttgtctataaaagtttatggaagttaatgctgtcatacccccctggtggtaccttaaagagataaaatgcagacattccttgctgagtttatagcttaaaggcctaaggagcactagcaacatttggctatattggtttgctagtcaccaacttctgggtctaaccccagccaaagatgacagcagaacaacataatttacactgtgatttatctttttgctgagggggaaaaaatgtaaatgttctgaaaattcactgctgcctttgtggaaactgtttcagcaaaggttcttgtatagagggaatagggaatttcaaaataaaaaattaagtatgttctgtgttttcattttaactttttttatggtgtttaatttgtggttggctgcaactgtgtatcatgtatatggaacttgtaaaaaagttctcgacattcagatcttaagagatgaaatcacttttacctataaaaaccacttttattgcggtttgactgcattgagctctaggatattaaatgatatcactaatattttgcatgtaatttgctcatttgagtgagggcactttttttgtacatatgatggggccaatgcacaatacttttatcacaatcaactttttctttgtatccctatttcaatgagcagtcagtctcaagaggttactgcacttcagttctaactagacatttgtactaaggtatttcagttatgtaaactcagcctgggcactttctgataactgtaaaatgttttataagatcatgattattgaagatacattttggaaaattttaaatgttcgtgagcagcttaactacttttgtatctagccttttttaagtatcttgttacatttacttttttaaataaagaaattacagaagaaatgtcaagtaatattgaagaaacaatagtttttatttatgtagttgtacatttttaaactaagggcaatacactgacatggttatgtgcataaaaattttgacttaaagaactggaagtttatatacacctggactataagaaacagaagaaaatcagtccacattttacagttagcagagaatcctaaatggcactggcctggccaccttttcattttacaaatgggggaagtgaagtgtgaccccttacttggcataggaagttaacttacacctaataactgacaggtttttgttttgatgacctattaattatgtagcctaggattaatatcccaaaattactctggtttaagtagctttattcagtggcataataacactgttttcttccttaagtcttcaatgaagtgacttaaaacagtcactttacatattaaaaatgaggagagcaattctctggaatctctcctttcagttcctttgtaggatttctggccttgaggatagtcttcatgttcaaaggcactatgcttttattatataacttccttcagaagactgaaccacatgatattctcagccctgttaacactaaaaatatttaaaactgaatgatagtagtgactcattgtattacttaaaacttatataacacgctgtattagatgtgtgtaaattagccaaaggttattttacaaagtgagacattggtttttatgtctaaatgctatttctgaataaatgaaatagtaattagatcaagagctgattagcatcaatgtgtttgaaagatataaaatttatacatcaccttaacctctgtatgcacatgatgggattgataaaatattaaatgagaacaaactagatatgattaggacatttgaaaccctaattgtgaatttatttttaatagttactgaaatgaaaatatttaaaataatgcacaatgtcttaagtcttcctaaatcaagattttggttaaaaaatacttctaataatagtaaaagattttttttttaagtaaatcataaaacggttctaaatgtaaaataaagacatgtaaaataaagttctcttttggtcttgtttagtgtttaaatctaacaattgaaaacaaatttaggaagagaag

SEQ ID NO: 300593 - DNA, 3177 bp, Homo sapiens
tggagacagtcttgctttgtcgccctggccagagcatatgagccaagaccatgccattgcactccagcctgggcgacagagcgagactccatctcaaaaaataaataagtaaataaataaataagctgggtgtggtggtgagcacctgtaatcccagctactcgagaggctgaggcagggagaattgcttaaacccgggagacagaggttgcagtgagctgagattgcgccactgcactccagcctatgtgacagagcgagcctctgtctcaaaaaaaaagaaaaaaaaagggaagataggtcacatttatgctgtagtttctatcctggggctaatctgatacccagtttgaaactttgaagtgtttattattttagatgaaaagttgtatttttttcttcctaatgagttaggaatttagattagatacactcctagagatgtataagctggtaggctgggcactagagctaaacagccacttctagagccttttaatggtccaagccaaagactgttgagagaactgtattttctttgctgatgctcttttcttctctggattttatgtactgttcgtttattcctctgccctgtctctggagctactgcatactggtatagcttagtccattataggaaaaatcaagaacaatgtacatttttgggtgaaaagatttttgtgagtatatgttaagagttgcgtatttagtcatgttttctgttgaatgcaaccaatgtacaatattgacagctttcacctggctttctggagtaaacagtgaatttattggtgttctagaatcattaaattcgctagagaatttgctagtgaatttggattgctttctgaacatttttctgttcttctgtagtgctccctctgagcattgtagaagtgttccagcacccctatgaagaccacattcattttgtcagggagcctttagtccactatcttgaatcatacatgaaggatctagtgatacacttttttaaagatttgtattaccaacttctctgctcatactgcattagtactagcaggtgcattggatatttattgactccaaaacttgaatgtattttgtaagtaagtccttttaaatttaaattatacgctaaattctagaagtctccgttatctggaatgtgaaaggctttttgtttttagggaaaatggagctgatagtatcctggatcttggattagtagactcctcagaaaaggtacagcaggaaaaccgaaagcgccatggctctagtcgaagtgtagtagatatggatttagatgatacagatgatggtgatgacaatgcccctttgttttaccaacctgggaaaagaggattttatactccaaggcctggcaagaacacagaagcaaggttgaattgtttcagaaacattggcaggattcttggactatgtctgttacagaatgaactatgtcctatcacattgaatagacatgtaattaaagtattgcttggtagaaaagtcaattggcatgattttgctttttttgatcctgtaatgtatgagagtttgcggcaactaatcctcgcgtctcagagttcagatgctgatgctgttttctcagcaatggatttggcatttgcaattgacctgtgtaaagaagaaggtggaggacaggttgaactcattcctaatggtgtaaatataccagtcactccacagaatgtatatgagtatgtgcggaaatacgcagaacacagaatgttggtagttgcagaacagcccttacatgcaatgaggaaaggtctactagatgtgcttccaaaaaattcattagaagatttaacggcagaagattttaggcttttggtaaatggctgcggtgaagtcaatgtgcaaatgctgatcagttttacctctttcaatgatgaatcaggagaaaatgctgagaagcttctgcagttcaagcgttggttctggtcaatagtagagaagatgagcatgacagaacgacaagatcttgtttacttttggacatcaagcccatcactgccagccagtgaagaaggattccagcctatgccctcaatcacaataagaccaccagatgaccaacatcttcctactgcaaatacttgcatttctcgactttacgtcccactctattcctctaaacagattctcaaacagaaattgttactcgccattaagaccaagaattttggttttgtgtagagtataaaaagtgtgtattgctgtgtaatattactagcaaattttgtagatttttttccatttgtctataaaagtttatggaagttaatgctgtcatacccccctggtggtaccttaaagagataaaatgcagacattccttgctgagtttatagcttaaaggcctaaggagcactagcaacatttggctatattggtttgctagtcaccaacttctgggtctaaccccagccaaagatgacagcagaacaacataatttacactgtgatttatctttttgctgagggggaaaaaatgtaaatgttctgaaaattcactgctgcctttgtggaaactgtttcagcaaaggttcttgtatagagggaatagggaatttcaaaataaaaaattaagtatgttctgtgttttcattttaactttttttatggtgtttaatttgtggttggctgcaactgtgtatcatgtatatggaacttgtaaaaaagttctcgacattcagatcttaagagatgaaatcacttttacctataaaaaccacttttattgcggtttgactgcattgagctctaggatattaaatgatatcactaatattttgcatgtaatttgctcatttgagtgagggcactttttttgtacatatgatggggccaatgcacaatacttttatcacaatcaactttttctttgtatccctatttcaatgagcagtcagtctcaagaggttactgcacttcagttctaactagacatttgtactaaggtatttcagttatgtaaactcagcctgggcactttctgataactgtaaaatgttttataagatcatgattattgaagatacattttggaaaattttaaatgttcgtgagcagcttaactacttttgtatctagccttttttaagtatcttgttacatttacttttttaaataaagaaattacagaagaaatgtcaagta

SEQ ID NO: 300594 - DNA, 3918 bp, Homo sapiens
cattatatttattgtatcttcatttgaacaaattattactacttttggagcagactttatctgttagcaagctgtagttggaacacattaatgctgattagtattgcaggaagaattttattttgaatgttctatcaagagtttttctttatatgatatgaaacacaaattagttatgttttttgtctttatgcataactgtatgtacacattttatagtgaaagaataacagaaaactattatttcttccagcaagtcctcagccttaaacataggtatatttttctctaccctacccccttctttttttctaccctaaataaaagatatttctggctctctgatgaagaaaaaaatatggaaattgagtatatgtatgtttaactcagagatataaaaaaacctaaaaagaaaacttgtcatacaaatattataagtagccttaacaagatgtggtactgcatggactgtttattccctgccaagtttctctataattgatcttccagtttcataaaagaccttactggttctgaaattttgtatttgttacccaagtttcttattttattttttttttaaataaaagattgtagatgtaattagacaagaggttttagagagtagtcaagtaacatttgttcatcatttacaggcatttgcaagtaaaatcactggcatgttgttggaattatccccagctcagctgcttctccttctagcaagtgaggattctctgagagcaagagtggatgaggccatggaactcattattgcacatggacgggaaaatggagctgatagtatcctggatcttggattagtagactcctcagaaaaggtacagcaggaaaaccgaaagcgccatggctctagtcgaagtgtagtagatatggatttagatgatacagatgatggtgatgacaatgcccctttgttttaccaacctgggaaaagaggattttatactccaaggcctggcaagaacacagaagcaaggttgaattgtttcagaaacattggcaggattcttggactatgtctgttacagaatgaactatgtcctatcacattgaatagacatgtaattaaagtattgcttggtagaaaagtcaattggcatgattttgctttttttgatcctgtaatgtatgagagtttgcggcaactaatcctcgcgtctcagagttcagatgctgatgctgttttctcagcaatggatttggcatttgcaattgacctgtgtaaagaagaaggtggaggacaggttgaactcattcctaatggtgtaaatataccagtcactccacagaatgtatatgagtatgtgcggaaatacgcagaacacagaatgttggtagttgcagaacagcccttacatgcaatgaggaaaggtctactagatgtgcttccaaaaaattcattagaagatttaacggcagaagattttaggcttttggtaaatggctgcggtgaagtcaatgtgcaaatgctgatcagttttacctctttcaatgatgaatcaggagaaaatgctgagaagcttctgcagttcaagcgttggttctggtcaatagtagagaagatgagcatgacagaacgacaagatcttgtttacttttggacatcaagcccatcactgccagccagtgaagaaggattccagcctatgccctcaatcacaataagaccaccagatgaccaacatcttcctactgcaaatacttgcatttctcgactttacgtcccactctattcctctaaacagattctcaaacagaaattgttactcgccattaagaccaagaattttggttttgtgtagagtataaaaagtgtgtattgctgtgtaatattactagcaaattttgtagatttttttccatttgtctataaaagtttatggaagttaatgctgtcatacccccctggtggtaccttaaagagataaaatgcagacattccttgctgagtttatagcttaaaggcctaaggagcactagcaacatttggctatattggtttgctagtcaccaacttctgggtctaaccccagccaaagatgacagcagaacaacataatttacactgtgatttatctttttgctgagggggaaaaaatgtaaatgttctgaaaattcactgctgcctttgtggaaactgtttcagcaaaggttcttgtatagagggaatagggaatttcaaaataaaaaattaagtatgttctgtgttttcattttaactttttttatggtgtttaatttgtggttggctgcaactgtgtatcatgtatatggaacttgtaaaaaagttctcgacattcagatcttaagagatgaaatcacttttacctataaaaaccacttttattgcggtttgactgcattgagctctaggatattaaatgatatcactaatattttgcatgtaatttgctcatttgagtgagggcactttttttgtacatatgatggggccaatgcacaatacttttatcacaatcaactttttctttgtatccctatttcaatgagcagtcagtctcaagaggttactgcacttcagttctaactagacatttgtactaaggtatttcagttatgtaaactcagcctgggcactttctgataactgtaaaatgttttataagatcatgattattgaagatacattttggaaaattttaaatgttcgtgagcagcttaactacttttgtatctagccttttttaagtatcttgttacatttacttttttaaataaagaaattacagaagaaatgtcaagtaatattgaagaaacaatagtttttatttatgtagttgtacatttttaaactaagggcaatacactgacatggttatgtgcataaaaattttgacttaaagaactggaagtttatatacacctggactataagaaacagaagaaaatcagtccacattttacagttagcagagaatcctaaatggcactggcctggccaccttttcattttacaaatgggggaagtgaagtgtgaccccttacttggcataggaagttaacttacacctaataactgacaggtttttgttttgatgacctattaattatgtagcctaggattaatatcccaaaattactctggtttaagtagctttattcagtggcataataacactgttttcttccttaagtcttcaatgaagtgacttaaaacagtcactttacatattaaaaatgaggagagcaattctctggaatctctcctttcagttcctttgtaggatttctggccttgaggatagtcttcatgttcaaaggcactatgcttttattatataacttccttcagaagactgaaccacatgatattctcagccctgttaacactaaaaatatttaaaactgaatgatagtagtgactcattgtattacttaaaacttatataacacgctgtattagatgtgtgtaaattagccaaaggttattttacaaagtgagacattggtttttatgtctaaatgctatttctgaataaatgaaatagtaattagatcaagagctgattagcatcaatgtgtttgaaagatataaaatttatacatcaccttaacctctgtatgcacatgatgggattgataaaatattaaatgagaacaaactagatatgattaggacatttgaaaccctaattgtgaatttatttttaatagttactgaaatgaaaatatttaaaataatgcacaatgtcttaagtcttcctaaatcaagattttggttaaaaaatacttctaataatagtaaaagattttttttttaagtaaatcataaaacggttctaaatgtaaaataaagacatgtaaaataaagttctcttttggtcttgtttagtgtttaaatctaacaattgaaaacaaatttaggaagagaag

SEQ ID NO: 300595 - DNA, 2603 bp, Homo sapiens
tttagggttctactactttgtacgacagcgcgcactgtgtgggtacactctgaattcggccattatggcaatgaggaaaggtctactagatgtgcttccaaaaaattcattagaagatttaacggcagaagattttaggcttttggtaaatggctgcggtgaagtcaatgtgcaaatgctgatcagttttacctctttcaatgatgaatcaggagaaaatgctgagaagcttctgcagttcaagcgttggttctggtcaatagtagagaagatgagcatgacagaacgacaagatcttgtttacttttggacatcaagcccatcactgccagccagtgaagaaggattccagcctatgccctcaatcacaataagaccaccagatgaccaacatcttcctactgcaaatacttgcatttctcgactttacgtcccactctattcctctaaacagattctcaaacagaaattgttactcgccattaagaccaagaattttggttttgtgtagagtataaaaagtgtgtattgctgtgtaatattactagcaaattttgtagatttttttccatttgtctataaaagtttatggaagttaatgctgtcatacccccctggtggtaccttaaagagataaaatgcagacattccttgctgagtttatagcttaaaggcctaaggagcactagcaacatttggctatattggtttgctagtcaccaacttctgggtctaaccccagccaaagatgacagcagaacaacataatttacactgtgatttatctttttgctgagggggaaaaaatgtaaatgttctgaaaattcactgctgcctttgtggaaactgtttcagcaaaggttcttgtatagagggaatagggaatttcaaaataaaaaattaagtatgttctgtgttttcattttaactttttttatggtgtttaatttgtggttggctgcaactgtgtatcatgtatatggaacttgtaaaaaagttctcgacattcagatcttaagagatgaaatcacttttacctataaaaaccacttttattgcggtttgactgcattgagctctaggatattaaatgatatcactaatattttgcatgtaatttgctcatttgagtgagggcactttttttgtacatatgatggggccaatgcacaatacttttatcacaatcaactttttctttgtatccctatttcaatgagcagtcagtctcaagaggttactgcacttcagttctaactagacatttgtactaaggtatttcagttatgtaaactcagcctgggcactttctgataactgtaaaatgttttataagatcatgattattgaagatacattttggaaaattttaaatgttcgtgagcagcttaactacttttgtatctagccttttttaagtatcttgttacatttacttttttaaataaagaaattacagaagaaatgtcaagtaatattgaagaaacaatagtttttatttatgtagttgtacatttttaaactaagggcaatacactgacatggttatgtgcataaaaattttgacttaaagaactggaagtttatatacacctggactataagaaacagaagaaaatcagtccacattttacagttagcagagaatcctaaatggcactggcctggccaccttttcattttacaaatgggggaagtgaagtgtgaccccttacttggcataggaagttaacttacacctaataactgacaggtttttgttttgatgacctattaattatgtagcctaggattaatatcccaaaattactctggtttaagtagctttattcagtggcataataacactgttttcttccttaagtcttcaatgaagtgacttaaaacagtcactttacatattaaaaatgaggagagcaattctctggaatctctcctttcagttcctttgtaggatttctggccttgaggatagtcttcatgttcaaaggcactatgcttttattatataacttccttcagaagactgaaccacatgatattctcagccctgttaacactaaaaatatttaaaactgaatgatagtagtgactcattgtattacttaaaacttatataacacgctgtattagatgtgtgtaaattagccaaaggttattttacaaagtgagacattggtttttatgtctaaatgctatttctgaataaatgaaatagtaattagatcaagagctgattagcatcaatgtgtttgaaagatataaaatttatacatcaccttaacctctgtatgcacatgatgggattgataaaatattaaatgagaacaaactagatatgattaggacatttgaaaccctaattgtgaatttatttttaatagttactgaaatgaaaatatttaaaataatgcacaatgtcttaagtcttcctaaatcaagattttggttaaaaaatacttctaataatagtaaaagattttttttttaagtaaatcataaaacggttctaaatgtaaaataaagacatgtaaaataaagttctcttttggtcttgtttagtgtttaaatctaacaattgaaaacaaatttaggaagagaag

SEQ ID NO: 300596 - DNA, 2741 bp, Homo sapiens
ctgaagaatgtagctggtcaccagacttgcctctgaaacacagatccttgagggctctttgggaatatctgtaaagtcacactgcagcacaggtgatgctcatacagtcctgagtgagtctaacagaaatgatgagcactgtggaaattctaacaacaaatgtgaagtaattccagaaagcaccagtgcagaacagcccttacatgcaatgaggaaaggtctactagatgtgcttccaaaaaattcattagaagatttaacggcagaagattttaggcttttggtaaatggctgcggtgaagtcaatgtgcaaatgctgatcagttttacctctttcaatgatgaatcaggagaaaatgctgagaagcttctgcagttcaagcgttggttctggtcaatagtagagaagatgagcatgacagaacgacaagatcttgtttacttttggacatcaagcccatcactgccagccagtgaagaaggattccagcctatgccctcaatcacaataagaccaccagatgaccaacatcttcctactgcaaatacttgcatttctcgactttacgtcccactctattcctctaaacagattctcaaacagaaattgttactcgccattaagaccaagaattttggttttgtgtagagtataaaaagtgtgtattgctgtgtaatattactagcaaattttgtagatttttttccatttgtctataaaagtttatggaagttaatgctgtcatacccccctggtggtaccttaaagagataaaatgcagacattccttgctgagtttatagcttaaaggcctaaggagcactagcaacatttggctatattggtttgctagtcaccaacttctgggtctaaccccagccaaagatgacagcagaacaacataatttacactgtgatttatctttttgctgagggggaaaaaatgtaaatgttctgaaaattcactgctgcctttgtggaaactgtttcagcaaaggttcttgtatagagggaatagggaatttcaaaataaaaaattaagtatgttctgtgttttcattttaactttttttatggtgtttaatttgtggttggctgcaactgtgtatcatgtatatggaacttgtaaaaaagttctcgacattcagatcttaagagatgaaatcacttttacctataaaaaccacttttattgcggtttgactgcattgagctctaggatattaaatgatatcactaatattttgcatgtaatttgctcatttgagtgagggcactttttttgtacatatgatggggccaatgcacaatacttttatcacaatcaactttttctttgtatccctatttcaatgagcagtcagtctcaagaggttactgcacttcagttctaactagacatttgtactaaggtatttcagttatgtaaactcagcctgggcactttctgataactgtaaaatgttttataagatcatgattattgaagatacattttggaaaattttaaatgttcgtgagcagcttaactacttttgtatctagccttttttaagtatcttgttacatttacttttttaaataaagaaattacagaagaaatgtcaagtaatattgaagaaacaatagtttttatttatgtagttgtacatttttaaactaagggcaatacactgacatggttatgtgcataaaaattttgacttaaagaactggaagtttatatacacctggactataagaaacagaagaaaatcagtccacattttacagttagcagagaatcctaaatggcactggcctggccaccttttcattttacaaatgggggaagtgaagtgtgaccccttacttggcataggaagttaacttacacctaataactgacaggtttttgttttgatgacctattaattatgtagcctaggattaatatcccaaaattactctggtttaagtagctttattcagtggcataataacactgttttcttccttaagtcttcaatgaagtgacttaaaacagtcactttacatattaaaaatgaggagagcaattctctggaatctctcctttcagttcctttgtaggatttctggccttgaggatagtcttcatgttcaaaggcactatgcttttattatataacttccttcagaagactgaaccacatgatattctcagccctgttaacactaaaaatatttaaaactgaatgatagtagtgactcattgtattacttaaaacttatataacacgctgtattagatgtgtgtaaattagccaaaggttattttacaaagtgagacattggtttttatgtctaaatgctatttctgaataaatgaaatagtaattagatcaagagctgattagcatcaatgtgtttgaaagatataaaatttatacatcaccttaacctctgtatgcacatgatgggattgataaaatattaaatgagaacaaactagatatgattaggacatttgaaaccctaattgtgaatttatttttaatagttactgaaatgaaaatatttaaaataatgcacaatgtcttaagtcttcctaaatcaagattttggttaaaaaatacttctaataatagtaaaagattttttttttaagtaaatcataaaacggttctaaatgtaaaataaagacatgtaaaataaagttctcttttggtcttgtttagtgtttaaatctaacaattgaaaacaaatttaggaagagaag

SEQ ID NO: 300597 - DNA, 3216 bp, Homo sapiens
caaacacttcctagattcctagaatctaggaagaataaggagtggtagtgaaagtcctcttgaaagaaaaacttttatctccagtgtttgatttgctgcaattctttcttttgaaagtcctatggtctaggaataggctttttagctgtgagctgtacattagaagctccaagaagttctctgtgaaaggattatacctatattccaagattattatgtacacaaaggtactgatttttttcccctttatttttcctattttgcaagcagcttcagccaaattatatattgtaatagtttttgtgctaccttgtaatacagtttttaatactaataagaatttgtctcatttacaaaccaaaaatttaggaaggaaaacagtatccaaataaactgcctaagatcttgccactccaagtatgatcctcagatcagtagcattggcatcatctgaaagcgttttagacaggcagaatctctggtctcccctctctgcattccccacccagtgaatgaatgagaatctgcatttcttgagatcataagaatactgacatacagatgagataaaactcatgtgaatatcagttttaaggctggtggttcatttgttttggtcatattgagtcaggattgactaatgaactgtagaggttttgcattatgcaaatgctcttaatttcttgtattaggaattagacgctcccccccaagtcttaaataatgttttaatctgtatccttttattataagaagattagtaatattctacagataataacaacaactggtatagtatattttatttacattcttcattcttaggagaaaatgctgagaagcttctgcagttcaagcgttggttctggtcaatagtagagaagatgagcatgacagaacgacaagatcttgtttacttttggacatcaagcccatcactgccagccagtgaagaaggattccagcctatgccctcaatcacaataagaccaccagatgaccaacatcttcctactgcaaatacttgcatttctcgactttacgtcccactctattcctctaaacagattctcaaacagaaattgttactcgccattaagaccaagaattttggttttgtgtagagtataaaaagtgtgtattgctgtgtaatattactagcaaattttgtagatttttttccatttgtctataaaagtttatggaagttaatgctgtcatacccccctggtggtaccttaaagagataaaatgcagacattccttgctgagtttatagcttaaaggcctaaggagcactagcaacatttggctatattggtttgctagtcaccaacttctgggtctaaccccagccaaagatgacagcagaacaacataatttacactgtgatttatctttttgctgagggggaaaaaatgtaaatgttctgaaaattcactgctgcctttgtggaaactgtttcagcaaaggttcttgtatagagggaatagggaatttcaaaataaaaaattaagtatgttctgtgttttcattttaactttttttatggtgtttaatttgtggttggctgcaactgtgtatcatgtatatggaacttgtaaaaaagttctcgacattcagatcttaagagatgaaatcacttttacctataaaaaccacttttattgcggtttgactgcattgagctctaggatattaaatgatatcactaatattttgcatgtaatttgctcatttgagtgagggcactttttttgtacatatgatggggccaatgcacaatacttttatcacaatcaactttttctttgtatccctatttcaatgagcagtcagtctcaagaggttactgcacttcagttctaactagacatttgtactaaggtatttcagttatgtaaactcagcctgggcactttctgataactgtaaaatgttttataagatcatgattattgaagatacattttggaaaattttaaatgttcgtgagcagcttaactacttttgtatctagccttttttaagtatcttgttacatttacttttttaaataaagaaattacagaagaaatgtcaagtaatattgaagaaacaatagtttttatttatgtagttgtacatttttaaactaagggcaatacactgacatggttatgtgcataaaaattttgacttaaagaactggaagtttatatacacctggactataagaaacagaagaaaatcagtccacattttacagttagcagagaatcctaaatggcactggcctggccaccttttcattttacaaatgggggaagtgaagtgtgaccccttacttggcataggaagttaacttacacctaataactgacaggtttttgttttgatgacctattaattatgtagcctaggattaatatcccaaaattactctggtttaagtagctttattcagtggcataataacactgttttcttccttaagtcttcaatgaagtgacttaaaacagtcactttacatattaaaaatgaggagagcaattctctggaatctctcctttcagttcctttgtaggatttctggccttgaggatagtcttcatgttcaaaggcactatgcttttattatataacttccttcagaagactgaaccacatgatattctcagccctgttaacactaaaaatatttaaaactgaatgatagtagtgactcattgtattacttaaaacttatataacacgctgtattagatgtgtgtaaattagccaaaggttattttacaaagtgagacattggtttttatgtctaaatgctatttctgaataaatgaaatagtaattagatcaagagctgattagcatcaatgtgtttgaaagatataaaatttatacatcaccttaacctctgtatgcacatgatgggattgataaaatattaaatgagaacaaactagatatgattaggacatttgaaaccctaattgtgaatttatttttaatagttactgaaatgaaaatatttaaaataatgcacaatgtcttaagtcttcctaaatcaagattttggttaaaaaatacttctaataatagtaaaagattttttttttaagtaaatcataaaacggttctaaatgtaaaataaagacatgtaaaataaagttctcttttggtcttgtttagtgtttaaatctaacaattgaaaacaaatttaggaagagaag

SEQ ID NO: 300598 - DNA, 2618 bp, Homo sapiens
caaacacttcctagattcctagaatctaggaagaataaggagtggtagtgaaagtcctcttgaaagaaaaacttttatctccagtgtttgatttgctgcaattctttcttttgaaagtcctatggtctaggaataggctttttagctgtgagctgtacattagaagctccaagaagttctctgtgaaaggattatacctatattccaagattattatgtacacaaaggagaaaatgctgagaagcttctgcagttcaagcgttggttctggtcaatagtagagaagatgagcatgacagaacgacaagatcttgtttacttttggacatcaagcccatcactgccagccagtgaagaaggattccagcctatgccctcaatcacaataagaccaccagatgaccaacatcttcctactgcaaatacttgcatttctcgactttacgtcccactctattcctctaaacagattctcaaacagaaattgttactcgccattaagaccaagaattttggttttgtgtagagtataaaaagtgtgtattgctgtgtaatattactagcaaattttgtagatttttttccatttgtctataaaagtttatggaagttaatgctgtcatacccccctggtggtaccttaaagagataaaatgcagacattccttgctgagtttatagcttaaaggcctaaggagcactagcaacatttggctatattggtttgctagtcaccaacttctgggtctaaccccagccaaagatgacagcagaacaacataatttacactgtgatttatctttttgctgagggggaaaaaatgtaaatgttctgaaaattcactgctgcctttgtggaaactgtttcagcaaaggttcttgtatagagggaatagggaatttcaaaataaaaaattaagtatgttctgtgttttcattttaactttttttatggtgtttaatttgtggttggctgcaactgtgtatcatgtatatggaacttgtaaaaaagttctcgacattcagatcttaagagatgaaatcacttttacctataaaaaccacttttattgcggtttgactgcattgagctctaggatattaaatgatatcactaatattttgcatgtaatttgctcatttgagtgagggcactttttttgtacatatgatggggccaatgcacaatacttttatcacaatcaactttttctttgtatccctatttcaatgagcagtcagtctcaagaggttactgcacttcagttctaactagacatttgtactaaggtatttcagttatgtaaactcagcctgggcactttctgataactgtaaaatgttttataagatcatgattattgaagatacattttggaaaattttaaatgttcgtgagcagcttaactacttttgtatctagccttttttaagtatcttgttacatttacttttttaaataaagaaattacagaagaaatgtcaagtaatattgaagaaacaatagtttttatttatgtagttgtacatttttaaactaagggcaatacactgacatggttatgtgcataaaaattttgacttaaagaactggaagtttatatacacctggactataagaaacagaagaaaatcagtccacattttacagttagcagagaatcctaaatggcactggcctggccaccttttcattttacaaatgggggaagtgaagtgtgaccccttacttggcataggaagttaacttacacctaataactgacaggtttttgttttgatgacctattaattatgtagcctaggattaatatcccaaaattactctggtttaagtagctttattcagtggcataataacactgttttcttccttaagtcttcaatgaagtgacttaaaacagtcactttacatattaaaaatgaggagagcaattctctggaatctctcctttcagttcctttgtaggatttctggccttgaggatagtcttcatgttcaaaggcactatgcttttattatataacttccttcagaagactgaaccacatgatattctcagccctgttaacactaaaaatatttaaaactgaatgatagtagtgactcattgtattacttaaaacttatataacacgctgtattagatgtgtgtaaattagccaaaggttattttacaaagtgagacattggtttttatgtctaaatgctatttctgaataaatgaaatagtaattagatcaagagctgattagcatcaatgtgtttgaaagatataaaatttatacatcaccttaacctctgtatgcacatgatgggattgataaaatattaaatgagaacaaactagatatgattaggacatttgaaaccctaattgtgaatttatttttaatagttactgaaatgaaaatatttaaaataatgcacaatgtcttaagtcttcctaaatcaagattttggttaaaaaatacttctaataatagtaaaagattttttttttaagtaaatcataaaacggttctaaatgtaaaataaagacatgtaaaataaagttctcttttggtcttgtttagtgtttaaatctaacaattgaaaacaaatttaggaagagaag

SEQ ID NO: 300599 - DNA, 3592 bp, Homo sapiens
agtcatccttcacatattgtttggtttcatcctgatgcatctagaggacataagaatggggtttctgaaacagttctcccatgaattaattagtcctgcaacttatagggtttccagagttattgggtaaactacagtttatttccctcttggagtgttataattcactagtaaaagtatttctcttccaacttcttagagatccagcagtgaggtcatctaccctggttaaccacattcatccttggagaaacactttatattaagcttgtttcttatctatgaaatgagtggtttagatcaacttcatctctagagtacctgttttctatttcttttcagattttatagatcctgatacttaactttttttttttttttctgtccctttatatagaattctagatgagctttcccatacaactgtgcttcaggaaatcttaagtttgtttaggtttcctagtcattctaggaaattggatatacttcattgttgtgcattataaaatgattagattaaaaaaaaagcttttccttaagagagacagacactgaagaatgatgcgtatgtatgaagggatggattgatgaggaatgttacatgttcagcaaactatttcagggaggcatatccttggttaagttaaaaagtgtaagttcacatttactgagcatcatttacactgtgttgcacaaagttttattacagaggtatgataaaacttagtgttaatatggcttattgcatgaattttgatgcatagatagatgttccccaataattactattataaaatgattctgtatcacaatgtagcagtaaatactttttttgctttattattttattatttgcattattttgctccttaatgcaaaataactttttaagataacctgtgtgagttttgaacctaagaccgtatcttttgtttggcagccttttttccactaatagacactttatggaattagctgcaagaaaggctcttagaaaccatttagtccaacagcctcatgttacagatgaaaatactgaggctctgtgacagaaagtcacctttttttcctctactaactctagacttactcctttggggaaaaaaaacaaaaacaaaaacctgtcttgaggtatgaatgatccctttcctttttagtacaagaaaatatatttaaaatccagttcaaaataatatctccttttaggttattaacataacaatagggctttgtgtatatactgccagagttaagagttaaatattaacctgttaaattcctgttcaggtttacttttggacatcaagcccatcactgccagccagtgaagaaggattccagcctatgccctcaatcacaataagaccaccagatgaccaacatcttcctactgcaaatacttgcatttctcgactttacgtcccactctattcctctaaacagattctcaaacagaaattgttactcgccattaagaccaagaattttggttttgtgtagagtataaaaagtgtgtattgctgtgtaatattactagcaaattttgtagatttttttccatttgtctataaaagtttatggaagttaatgctgtcatacccccctggtggtaccttaaagagataaaatgcagacattccttgctgagtttatagcttaaaggcctaaggagcactagcaacatttggctatattggtttgctagtcaccaacttctgggtctaaccccagccaaagatgacagcagaacaacataatttacactgtgatttatctttttgctgagggggaaaaaatgtaaatgttctgaaaattcactgctgcctttgtggaaactgtttcagcaaaggttcttgtatagagggaatagggaatttcaaaataaaaaattaagtatgttctgtgttttcattttaactttttttatggtgtttaatttgtggttggctgcaactgtgtatcatgtatatggaacttgtaaaaaagttctcgacattcagatcttaagagatgaaatcacttttacctataaaaaccacttttattgcggtttgactgcattgagctctaggatattaaatgatatcactaatattttgcatgtaatttgctcatttgagtgagggcactttttttgtacatatgatggggccaatgcacaatacttttatcacaatcaactttttctttgtatccctatttcaatgagcagtcagtctcaagaggttactgcacttcagttctaactagacatttgtactaaggtatttcagttatgtaaactcagcctgggcactttctgataactgtaaaatgttttataagatcatgattattgaagatacattttggaaaattttaaatgttcgtgagcagcttaactacttttgtatctagccttttttaagtatcttgttacatttacttttttaaataaagaaattacagaagaaatgtcaagtaatattgaagaaacaatagtttttatttatgtagttgtacatttttaaactaagggcaatacactgacatggttatgtgcataaaaattttgacttaaagaactggaagtttatatacacctggactataagaaacagaagaaaatcagtccacattttacagttagcagagaatcctaaatggcactggcctggccaccttttcattttacaaatgggggaagtgaagtgtgaccccttacttggcataggaagttaacttacacctaataactgacaggtttttgttttgatgacctattaattatgtagcctaggattaatatcccaaaattactctggtttaagtagctttattcagtggcataataacactgttttcttccttaagtcttcaatgaagtgacttaaaacagtcactttacatattaaaaatgaggagagcaattctctggaatctctcctttcagttcctttgtaggatttctggccttgaggatagtcttcatgttcaaaggcactatgcttttattatataacttccttcagaagactgaaccacatgatattctcagccctgttaacactaaaaatatttaaaactgaatgatagtagtgactcattgtattacttaaaacttatataacacgctgtattagatgtgtgtaaattagccaaaggttattttacaaagtgagacattggtttttatgtctaaatgctatttctgaataaatgaaatagtaattagatcaagagctgattagcatcaatgtgtttgaaagatataaaatttatacatcaccttaacctctgtatgcacatgatgggattgataaaatattaaatgagaacaaactagatatgattaggacatttgaaaccctaattgtgaatttatttttaatagttactgaaatgaaaatatttaaaataatgcacaatgtcttaagtcttcctaaatcaagattttggttaaaaaatacttctaataatagtaaaagattttttttttaagtaaatcataaaacggttctaaatgtaaaataaagacatgtaaaataaagttctcttttggtcttgtttagtgtttaaatctaacaattgaaaacaaatttaggaagagaag

SEQ ID NO: 300600 - DNA, 2361 bp, Homo sapiens
  misc_feature (30)..(30): n is a, c, g, or t
tcacgacacgacaaacggtcgagcaatacnaaaaagcaccaccacaccaaccgctggtttacttttggacatcaagcccatcactgccagccagtgaagaaggattccagcctatgccctcaatcacaataagaccaccagatgaccaacatcttcctactgcaaatacttgcatttctcgactttacgtcccactctattcctctaaacagattctcaaacagaaattgttactcgccattaagaccaagaattttggttttgtgtagagtataaaaagtgtgtattgctgtgtaatattactagcaaattttgtagatttttttccatttgtctataaaagtttatggaagttaatgctgtcatacccccctggtggtaccttaaagagataaaatgcagacattccttgctgagtttatagcttaaaggcctaaggagcactagcaacatttggctatattggtttgctagtcaccaacttctgggtctaaccccagccaaagatgacagcagaacaacataatttacactgtgatttatctttttgctgagggggaaaaaatgtaaatgttctgaaaattcactgctgcctttgtggaaactgtttcagcaaaggttcttgtatagagggaatagggaatttcaaaataaaaaattaagtatgttctgtgttttcattttaactttttttatggtgtttaatttgtggttggctgcaactgtgtatcatgtatatggaacttgtaaaaaagttctcgacattcagatcttaagagatgaaatcacttttacctataaaaaccacttttattgcggtttgactgcattgagctctaggatattaaatgatatcactaatattttgcatgtaatttgctcatttgagtgagggcactttttttgtacatatgatggggccaatgcacaatacttttatcacaatcaactttttctttgtatccctatttcaatgagcagtcagtctcaagaggttactgcacttcagttctaactagacatttgtactaaggtatttcagttatgtaaactcagcctgggcactttctgataactgtaaaatgttttataagatcatgattattgaagatacattttggaaaattttaaatgttcgtgagcagcttaactacttttgtatctagccttttttaagtatcttgttacatttacttttttaaataaagaaattacagaagaaatgtcaagtaatattgaagaaacaatagtttttatttatgtagttgtacatttttaaactaagggcaatacactgacatggttatgtgcataaaaattttgacttaaagaactggaagtttatatacacctggactataagaaacagaagaaaatcagtccacattttacagttagcagagaatcctaaatggcactggcctggccaccttttcattttacaaatgggggaagtgaagtgtgaccccttacttggcataggaagttaacttacacctaataactgacaggtttttgttttgatgacctattaattatgtagcctaggattaatatcccaaaattactctggtttaagtagctttattcagtggcataataacactgttttcttccttaagtcttcaatgaagtgacttaaaacagtcactttacatattaaaaatgaggagagcaattctctggaatctctcctttcagttcctttgtaggatttctggccttgaggatagtcttcatgttcaaaggcactatgcttttattatataacttccttcagaagactgaaccacatgatattctcagccctgttaacactaaaaatatttaaaactgaatgatagtagtgactcattgtattacttaaaacttatataacacgctgtattagatgtgtgtaaattagccaaaggttattttacaaagtgagacattggtttttatgtctaaatgctatttctgaataaatgaaatagtaattagatcaagagctgattagcatcaatgtgtttgaaagatataaaatttatacatcaccttaacctctgtatgcacatgatgggattgataaaatattaaatgagaacaaactagatatgattaggacatttgaaaccctaattgtgaatttatttttaatagttactgaaatgaaaatatttaaaataatgcacaatgtcttaagtcttcctaaatcaagattttggttaaaaaatacttctaataatagtaaaagattttttttttaagtaaatcataaaacggttctaaatgtaaaataaagacatgtaaaataaagttctcttttggtcttgtttagtgtttaaatctaacaattgaaaacaaatttaggaagagaag

SEQ ID NO: 300601 - DNA, 7541 bp, Homo sapiens
atccgcctgcctcagcctcccaaagcgctgggattacagatgtgagccaccgtgcccggccacaagtgttatatcttaacgagtgatctttcttgtgattatgtagtaagtagctcaggcgacatttatgcatttgatgttctttaaaatctttgttaataatgtaggttgttgtgtttttcctcaggcgatgtcattccctagtttttaaatgtatgtgaatttttagagctctttcagcagtctacagttgctctttgtgtgtatgctgcagtgatgtttgtttctgtttatagaggatcttatgtctctccttgatgccgacattcattctgcccacccaagtgtcattattgatgcagatgccatgttttctgaagacattagctattttggttacccttcttttcgtcgttcatcactttccaggctaggctcatctcgagttctccttcttcccttagagagagactctgagctgttgcgtgaacgtgaatccgttttacgtttacgtgaacgaaggtggcttgatggagcctcatttgataatgaaaggggttctaccagcaaggaaggagagccaaacttggataagaagaatacacctgttcaaagtccagtatctctaggagaagatttgcagtggtggcctgataaggatggaacaaaattcatctgtattggggctctgtattctgaacttctggctgtcagcagtaaaggagaactttatcagtggaaatggagtgaatctgagccttacagaaatgcccagaatccttcattacatcatccacgagcaacatttttggggttaaccaatgaaaagatagtcctcctgtctgcaaatagcataagagcaactgtagctacagaaaataacaaggttgctacatgggtggatgaaactttaagttctgtggcttctaaattagagcacactgctcagacttactctgaacttcaaggagagcggatagtttctttacattgctgtgccctttacacctgcgctcagctggaaaacagtttatattggtggggtgtagttccttttagtcaaaggaagaaaatgttagagaaagctagagcaaaaaataaaaagcctaaatccagtgctggtatttcttcaatgccgaacatcactgttggtacccaggtatgcttgagaaataatcctctttatcatgctggagcagttgcattttcaattagtgctgggattcctaaagttggtgtcttaatggagtcagtttggaatatgaatgacagctgtagatttcaacttagatctcctgaaagcttgaaaaacatggaaaaagctagcaaaactactgaagctaagcctgaaagtaagcaggagccagtgaaaacagaaatgggtcctccaccatctccagcatccacgtgtagtgatgcatcctcaattgccagcagtgcatcaatgccatacaaacgacgacggtcaacccctgcaccaaaagaagaggaaaaggtgaatgaagagcagtggtctcttcgggaagtggtttttgtggaagatgtcaagaatgttcctgttggcaaggtgctaaaagtagatggtgcctatgttgctgtaaaatttccaggaacctccagtaatactaactgtcagaacagctctggtccagatgctgacccttcttctctcctgcaggattgtaggttacttagaattgatgaattgcaggttgtcaaaactggtggaacaccgaaggttcccgactgtttccaaaggactcctaaaaagctttgtatacctgaaaaaacagaaatattagcagtgaatgtagattccaaaggtgttcatgctgttctgaagactggaaattgggtacgatactgtatctttgatcttgctacaggaaaagcagaacaggaaaataattttcctacaagcagcattgctttccttggtcagaatgagaggaatgtagccattttcactgctggacaggaatctcccattattcttcgagatggaaatggtaccatctacccaatggccaaagattgcatgggaggaataagggatcccgattggctggatcttccacctattagtagtcttggaatgggtgtgcattctttaataaatcttcctgccaattcaacaatcaaaaagaaagctgctgttatcatcatggctgtagagaaacaaaccttaatgcaacacattctgcgctgtgactatgaggcctgtcgacaatatctaatgaatcttgagcaagcggttgttttagagcagaatctacagatgctgcagacattcatcagccacagatgtgatggaaatcgaaatattttgcatgcttgtgtatcagtttgctttccaaccagcaataaagaaactaaagaagaagaggaagcggagcgttctgaaagaaatacatttgcagaaaggctttctgctgttgaggccattgcaaatgcaatatcagttgtttcaagtaatggcccaggtaatcgggctggatcatcaagtagccgaagtttgagattacgggaaatgatgagacgttcgttgagagcagctggtttgggtagacatgaagctggagcttcatccagtgaccaccaggatccagtttcaccccccatagctccccctagttgggttcctgaccctcctgcgatggatcctgatggtgacattgattttatcctggcccccgctgtgggatctcttaccacagcagcaaccggtactggtcaaggaccaagcacctccactattccaggtccttccacagagccatctgtagtagaatccaaggatcgaaaggcgaatgctcattttatattgaaattgttatgtgacagtgtggttctccagccctatctacgagaacttctttctgccaaggatgcaagagggatgaccccatttatgtcagctgtaagtggccgagcttatcctgctgcaattaccatcttagaaactgctcagaaaattgcaaaagctgaaatatcctcaagtgaaaaagaggaagatgtattcatgggaatggtttgcccatcaggtaccaaccctgatgactctcctttatatgttttatgttgtaatgacacttgcagttttacatggactggagcagagcacattaaccaggatatttttgagtgtcgaacttgtggcttgctggagtcactgtgttgttgtacggaatgtgcaagggtttgtcataaaggtcatgattgcaaactcaaacggacatcaccaacagcctactgtgattgttgggagaaatgtaaatgtaaaactcttattgctggacagaaatctgctcgtcttgatctactttatcgcctgctcactgctactaatctggttactctgccaaacagcaggggagagcacctcttactattcttagtacagacagtcgcaaggcagacggtggagcattgtcaatacaggccacctcgaatcagggaagatcgtaaccgaaaaacagccagtcctgaagattcagatatgccagatcatgatttagagcctccaagatttgcccagcttgcattggagcgtgttctacaggactggaatgccttgaaatctatgattatgtttgggtcgcaggagaataaagaccctcttagtgccagcagtagaataggccatcttttgccagaagagcaagtatacctcaatcagcaaagtggcacaattcggctggactgtttcactcattgccttatagttaagtgtacagcagatattttgcttttagatactctactaggtacactagtgaaagaactccaaaacaaatatacacctggacgtagagaagaagctattgctgtgacaatgaggtttctacgttcagtggcaagagtttttgttattctgagtgtggaaatggcttcatccaaaaagaaaaacaactttattccacagccaattggaaaatgcaagcgtgtattccaagcattgctaccttacgctgtggaagaattgtgcaacgtagcagagtcactgattgttcctgtcagaatggggattgctcgtccaactgcaccatttaccctggctagtactagcatagatgccatgcagggcagtgaagaattattttcagtggaaccactaccaccacgaccatcatctgatcagtctagcagctccagtcagtctcagtcatcctacatcatcaggaatccacagcagaggcgcatcagccagtcacagcccgttcggggcagagatgaagaacaggatgatattgtttcagcagatgtggaagaggttgaggtggtggagggtgtggctggagaagaggatcatcatgatgaacaggaagaacacggggaagaaaatgctgaggcagagggacaacatgatgagcatgatgaagacgggagtgatatggagctggacttgttagcagcagctgaaacagaaagtgatagtgaaagtaaccacagcaaccaagataatgctagtgggcgcagaagcgttgtcactgcagcaactgctggttcagaagcaggagcaagcagtgttcctgccttcttttctgaagatgattctcaatcgaatgactcaagtgattctgatagcagtagtagtcagagtgacgacatagaacaggagacctttatgcttgatgagccattagaaagaaccacaaatagctcccatgccaatggtgctgcccaagctccccgttcaatgcagtgggctgtccgcaacacccagcatcagcgagcagccagtacagccccttccagtacatctacaccagcagcaagttcagcgggtttgatttatattgatccttcaaacttacgccggagtggtaccatcagtacaagtgctgcagctgcagcagctgctttggaagctagcaacgccagcagttacctaacatctgcaagcagtttagccagggcttacagcattgtcattagacaaatctcggacttgatgggccttattcctaagtataatcacctagtatactctcagattccagcagctgtgaaattgacttaccaagatgcagtaaacttacagaactatgtagaagaaaagcttattcccacttggaactggatggtcagtattatggattctactgaagctcaattacgttatggttctgcattagcatctgctggtgatcctggacatccaaatcatcctcttcacgcttctcagaattcagcgagaagagagaggatgactgcgcgagaagaagctagcttacgaacacttgaaggcagacgacgtgccaccttgcttagcgcccgtcaaggaatgatgtctgcacgaggagacttcctaaattatgctctgtctctaatgcggtctcataatgatgagcattctgatgttcttccagttttggatgtttgctcattgaagcatgtggcatatgtttttcaagcacttatatactggattaaggcaatgaatcagcagacaacattggatacacctcaactagaacgcaaaaggacgcgagaactcttggaactgggtattgataatgaagattcagaacatgaaaatgatgatgacaccaatcaaagtgctactttgaatgataaggatgatgactctcttcctgcagaaactggccaaaaccatccatttttccgacgttcagactccatgacattccttgggtgtatacccccaaatccatttgaagtgcctctggctgaagccatccccttggctgatcagccacatctgttgcagccaaatgctagaaaggaggatctttttggccgtccaagtcagggtctttattcttcatctgccagtagtgggaaatgtttaatggaggttacagtggatagaaactgcctagaggttcttccaacaaaaatgtcttatgctgccaatctgaaaaatgtaatgaacatgcaaaaccggcaaaaaaaagaaggggaagaacagcccgtgctgccagaagaaactgagagttcaaaaccagggccatctgctcatgatcttgctgcacaattaaaaagtagcttactagcagaaataggacttactgaaagtgaagggccacctctcacatctttcaggccacagtgtagctttatgggaatggttatttcccatgatatgctgctaggacgttggcgcctttctttagaactgttcggcagggtattcatggaagatgttggagcagaacctggatcaatcctaactgaattgggtggttttgaggtaaaagaatcaaaattccgcagagaaatggaaaaactgagaaaccagcagtcaagagatttgtcactagaggttgatcgggatcgagatcttctcattcagcagactatgaggcagcttaacaatcactttggtcgaagatgtgctactacaccaatggctgtacacagagtaaaagtcacatttaaggatgagccaggagagggcagtggtgtagcacgaagtttttatacagccattgcacaagcatttttatcaaatgaaaaattgccaaatctagagtgtatccaaaatgccaacaaaggcacccacacaagtttaatgcagagattaaggaaccgaggagagagagaccgggaaagggagagagaaagggaaatgaggaggagtagtggtttgcgagcaggttctcggagggaccgggatagagactttagaagacagctttccatcgacactaggccctttagaccagcctctgaagggaatcctagcgatgatcctgagcctttgccagcacatcggcaggcacttggagagaggctttatcctcgtgtacaagcaatgcaaccagcatttgcaagtaaaatcactggcatgttgttggaattatccccagctcagctgcttctccttctagcaagtgaggattctctgagagcaagagtggatgaggccatggaactcattattgcacatggacgggaaaatggagctgatagtatcctggatcttggattagtagactcctcagaaaaggtacagcaggaaaaccgaaagcgccatggctctagtcgaagtgtagtagatatggatttagatgatacagatgatggtgatgacaatgcccctttgttttaccaacctgggaaaagaggattttatactccaaggcctggcaagaacacagaagcaaggttgaattgtttcagaaacattggcaggattcttggactatgtctgttacagaatgaactatgtcctatcacattgaatagacatgtaattaaagtattgcttggtagaaaagtcaattggcatgattttgctttttttgatcctgtaatgtatgagagtttgcggcaactaatcctcgcgtctcagagttcagatgctgatgctgttttctcagcaatggatttggcatttgcaattgacctgtgtaaagaagaaggtggaggacaggttgaactcattcctaatggtgtaaatataccagtcactccacagaatgtatatgagtatgtgcggaaatacgcagaacacagaatgttggtagttgcagaacagcccttacatgtaagtgtttctagaaagtgttgtg

SEQ ID NO: 300602 - DNA, 6934 bp, Homo sapiens
atccgcctgcctcagcctcccaaagcgctgggattacagatgtgagccaccgtgcccggccacaagtgttatatcttaacgagtgatctttcttgtgattatgtagtaagtagctcaggcgacatttatgcatttgatgttctttaaaatctttgttaataatgtaggttgttgtgtttttcctcaggcgatgtcattccctagtttttaaatgtatgtgaatttttagagctctttcagcagtctacagttgctctttgtgtgtatgctgcagtgatgtttgtttctgtttatagaggatcttatgtctctccttgatgccgacattcattctgcccacccaagtgtcattattgatgcagatgccatgttttctgaagacattagctattttggttacccttcttttcgtcgttcatcactttccaggctaggctcatctcgagttctccttcttcccttagagagagactctgagctgttgcgtgaacgtgaatccgttttacgtttacgtgaacgaaggtggcttgatggagcctcatttgataatgaaaggggttctaccagcaaggaaggagagccaaacttggataagaagaatacacctgttcaaagtccagtatctctaggagaagatttgcagtggtggcctgataaggatggaacaaaattcatctgtattggggctctgtattctgaacttctggctgtcagcagtaaaggagaactttatcagtggaaatggagtgaatctgagccttacagaaatgcccagaatccttcattacatcatccacgagcaacatttttggggttaaccaatgaaaagatagtcctcctgtctgcaaatagcataagagcaactgtagctacagaaaataacaaggttgctacatgggtggatgaaactttaagttctgtggcttctaaattagagcacactgctcagacttactctgaacttcaaggagagcggatagtttctttacattgctgtgccctttacacctgcgctcagctggaaaacagtttatattggtggggtgtagttccttttagtcaaaggaagaaaatgttagagaaagctagagcaaaaaataaaaagcctaaatccagtgctggtatttcttcaatgccgaacatcactgttggtacccaggtatgcttgagaaataatcctctttatcatgctggagcagttgcattttcaattagtgctgggattcctaaagttggtgtcttaatggagtcagtttggaatatgaatgacagctgtagatttcaacttagatctcctgaaagcttgaaaaacatggaaaaagctagcaaaactactgaagctaagcctgaaagtaagcaggagccagtgaaaacagaaatgggtcctccaccatctccagcatccacgtgtagtgatgcatcctcaattgccagcagtgcatcaatgccatacaaacgacgacggtcaacccctgcaccaaaagaagaggaaaaggtgaatgaagagcagtggtctcttcgggaagtggtttttgtggaagatgtcaagaatgttcctgttggcaaggtgctaaaagtagatggtgcctatgttgctgtaaaatttccaggaacctccagtaatactaactgtcagaacagctctggtccagatgctgacccttcttctctcctgcaggattgtaggttacttagaattgatgaattgcaggttgtcaaaactggtggaacaccgaaggttcccgactgtttccaaaggactcctaaaaagctttgtatacctgaaaaaacagaaatattagcagtgaatgtagattccaaaggtgttcatgctgttctgaagactggaaattgggtacgatactgtatctttgatcttgctacaggaaaagcagaacaggaaaataattttcctacaagcagcattgctttccttggtcagaatgagaggaatgtagccattttcactgctggacaggaatctcccattattcttcgagatggaaatggtaccatctacccaatggccaaagattgcatgggaggaataagggatcccgattggctggatcttccacctattagtagtcttggaatgggtgtgcattctttaataaatcttcctgccaattcaacaatcaaaaagaaagctgctgttatcatcatggctgtagagaaacaaaccttaatgcaacacattctgcgctgtgactatgaggcctgtcgacaatatctaatgaatcttgagcaagcggttgttttagagcagaatctacagatgctgcagacattcatcagccacagatgtgatggaaatcgaaatattttgcatgcttgtgtatcagtttgctttccaaccagcaataaagaaactaaagaagaagaggaagcggagcgttctgaaagaaatacatttgcagaaaggctttctgctgttgaggccattgcaaatgcaatatcagttgtttcaagtaatggcccaggtaatcgggctggatcatcaagtagccgaagtttgagattacgggaaatgatgagacgttcgttgagagcagctggtttgggtagacatgaagctggagcttcatccagtgaccaccaggatccagtttcaccccccatagctccccctagttgggttcctgaccctcctgcgatggatcctgatggtgacattgattttatcctggcccccgctgtgggatctcttaccacagcagcaaccggtactggtcaaggaccaagcacctccactattccaggtccttccacagagccatctgtagtagaatccaaggatcgaaaggcgaatgctcattttatattgaaattgttatgtgacagtgtggttctccagccctatctacgagaacttctttctgccaaggatgcaagagggatgaccccatttatgtcagctgtaagtggccgagcttatcctgctgcaattaccatcttagaaactgctcagaaaattgcaaaagctgaaatatcctcaagtgaaaaagaggaagatgtattcatgggaatggtttgcccatcaggtaccaaccctgatgactctcctttatatgttttatgttgtaatgacacttgcagttttacatggactggagcagagcacattaaccaggatatttttgagtgtcgaacttgtggcttgctggagtcactgtgttgttgtacggaatgtgcaagggtttgtcataaaggtcatgattgcaaactcaaacggacatcaccaacagcctactgtgattgttgggagaaatgtaaatgtaaaactcttattgctggacagaaatctgctcgtcttgatctactttatcgcctgctcactgctactaatctggttactctgccaaacagcaggggagagcacctcttactattcttagtacagacagtcgcaaggcagacggtggagcattgtcaatacaggccacctcgaatcagggaagatcgtaaccgaaaaacagccagtcctgaagattcagatatgccagatcatgatttagagcctccaagatttgcccagcttgcattggagcgtgttctacaggactggaatgccttgaaatctatgattatgtttgggtcgcaggagaataaagaccctcttagtgccagcagtagaataggccatcttttgccagaagagcaagtatacctcaatcagcaaagtggcacaattcggctggactgtttcactcattgccttatagttaagtgtacagcagatattttgcttttagatactctactaggtacactagtgaaagaactccaaaacaaatatacacctggacgtagagaagaagctattgctgtgacaatgaggtttctacgttcagtggcaagagtttttgttattctgagtgtggaaatggcttcatccaaaaagaaaaacaactttattccacagccaattggaaaatgcaagcgtgtattccaagcattgctaccttacgctgtggaagaattgtgcaacgtagcagagtcactgattgttcctgtcagaatggggattgctcgtccaactgcaccatttaccctggctagtactagcatagatgccatgcagggcagtgaagaattattttcagtggaaccactaccaccacgaccatcatctgatcagtctagcagctccagtcagtctcagtcatcctacatcatcaggaatccacagcagaggcgcatcagccagtcacagcccgttcggggcagagatgaagaacaggatgatattgtttcagcagatgtggaagaggttgaggtggtggagggtgtggctggagaagaggatcatcatgatgaacaggaagaacacggggaagaaaatgctgaggcagagggacaacatgatgagcatgatgaagacgggagtgatatggagctggacttgttagcagcagctgaaacagaaagtgatagtgaaagtaaccacagcaaccaagataatgctagtgggcgcagaagcgttgtcactgcagcaactgctggttcagaagcaggagcaagcagtgttcctgccttcttttctgaagatgattctcaatcgaatgactcaagtgattctgatagcagtagtagtcagagtgacgacatagaacaggagacctttatgcttgatgagccattagaaagaaccacaaatagctcccatgccaatggtgctgcccaagctccccgttcaatgcagtgggctgtccgcaacacccagcatcagcgagcagccagtacagccccttccagtacatctacaccagcagcaagttcagcgggtttgatttatattgatccttcaaacttacgccggagtggtaccatcagtacaagtgctgcagctgcagcagctgctttggaagctagcaacgccagcagttacctaacatctgcaagcagtttagccagggcttacagcattgtcattagacaaatctcggacttgatgggccttattcctaagtataatcacctagtatactctcagattccagcagctgtgaaattgacttaccaagatgcagtaaacttacagaactatgtagaagaaaagcttattcccacttggaactggatggtcagtattatggattctactgaagctcaattacgttatggttctgcattagcatctgctggtgatcctggacatccaaatcatcctcttcacgcttctcagaattcagcgagaagagagaggatgactgcgcgagaagaagctagcttacgaacacttgaaggcagacgacgtgccaccttgcttagcgcccgtcaaggaatgatgtctgcacgaggagacttcctaaattatgctctgtctctaatgcggtctcataatgatgagcattctgatgttcttccagttttggatgtttgctcattgaagcatgtggcatatgtttttcaagcacttatatactggattaaggcaatgaatcagcagacaacattggatacacctcaactagaacgcaaaaggacgcgagaactcttggaactgggtattgataatgaagattcagaacatgaaaatgatgatgacaccaatcaaagtgctactttgaatgataaggatgatgactctcttcctgcagaaactggccaaaaccatccatttttccgacgttcagactccatgacattccttgggtgtatacccccaaatccatttgaagtgcctctggctgaagccatccccttggctgatcagccacatctgttgcagccaaatgctagaaaggaggatctttttggccgtccaagtcagggtctttattcttcatctgccagtagtgggaaatgtttaatggaggttacagtggatagaaactgcctagaggttcttccaacaaaaatgtcttatgctgccaatctgaaaaatgtaatgaacatgcaaaaccggcaaaaaaaagaaggggaagaacagcccgtgctgccagaagaaactgagagttcaaaaccagggccatctgctcatgatcttgctgcacaattaaaaagtagcttactagcagaaataggacttactgaaagtgaagggccacctctcacatctttcaggccacagtgtagctttatgggaatggttatttcccatgatatgctgctaggacgttggcgcctttctttagaactgttcggcagggtattcatggaagatgttggagcagaacctggatcaatcctaactgaattgggtggttttgaggtaaaagaatcaaaattccgcagagaaatggaaaaactgagaaaccagcagtcaagagatttgtcactagaggttgatcgggatcgagatcttctcattcagcagactatgaggcagcttaacaatcactttggtcgaagatgtgctactacaccaatggctgtacacagagtaaaagtcacatttaaggatgagccaggagagggcagtggtgtagcacgaagtttttatacagccattgcacaagcatttttatcaaatgaaaaattgccaaatctagagtgtatccaaaatgccaacaaaggcacccacacaagtttaatgcagagattaaggaaccgaggagagagagaccgggaaagggagagagaaagggaaatgaggaggagtagtggtttgcgagcaggttctcggagggaccgggataggtaaattttgtatctttgattcaataccacctttttggatgaattagagataggcctgtaaatgaaagaatcttaattatggattattttttagaaaagtaaagttttaattttgaacatatgtatagtaactaagaatagtctgttaataaaatacaataactaagaatagtctattaactaataaaaagttctgctttaaaaacccagaggcggttgaaattatattctttttatctgactcaagttcctatttgaatttttttacccatatcattctctcctaagt

SEQ ID NO: 300603 - DNA, 368 bp, Homo sapiens
aaggccagtgtgaatggaggtgagtgagttaatggagggagccagggccaccttaattggataccttgtaggctgtgctaaagacttcgtatagttgtggtttatgtgtttacataattaatctagatctgatgaagtgattaaagtgacagtgttcaaatcagtagatttggcaatttttatatttatagtattgtattttactttataggatggaacaaaattcatctgtattggggctctgtattctgaacttctggctgtcagcagtaaaggagaactttatcagtggaaatggagtgaatctgagccttacagaaatgcccaggtattttattttatgaaatcttgcattgaatagctctaca

SEQ ID NO: 300604 - DNA, 240 bp, Homo sapiens
gtttaaaatgctaattttataaattctccaatatttagaagccgctggagttctggagtgggtggaagtggtggaggatcctctggtaggtcatcagctggagctcgagattcccgccggcagactcgagttattcggacaggacgggatcgagggtctgggcttttgggcagtcagccccagccagttattccagcatctgtcattccagaggagctgatttcacaggtatggatctcg

SEQ ID NO: 300605 - DNA, 397 bp, Homo sapiens
tcttagtgccagcagtagaataggccatcttttgccagaagagcaagtatacctcaatcagcaaagtggcacaattcggctggactgtttcactcattgccttatagttaagtgtacagcagatattttggtaagttctttgaatgtgtattacaagtacatgaaaagtatgtttttcaagtactcttctttgctgtgaaactagaaaagaatttaaaccttaagatccagtgcgaatgaggttatggtaataacacactcagatagggatggggtggcattgcatcgttcctttctctggaaaacataaaactatcagtgccctcagaacctgtcataaataaataatttacgatgtgagaaaaataaaggcatgtcacagaataatgtaaaattt

SEQ ID NO: 300606 - DNA, 667 bp, Homo sapiens
taaattctccaatatttagaagccgctggagttctggagtgggtggaagtggtggaggatcctctggtaggtcatcagctggagctcgagattcccgccggcagactcgagttattcggacaggacgggatcgagggtctgggcttttgggcagtcagccccagccagttattccagcatctgtcattccagaggagctgatttcacaggtatggatctcgtagaacacttaatgtcagacaacaggacaaggtgaggttttactgaatatggtgggttgtagtcatgactcatatcatgagttctgaaacaactgttttcctattttgatcctagaaaactttttttttttcctttgagagggagtctcactctgctgcccaggctggagtacagtggcatgatctcagctcactgcaacctccgtcccctgagttcaagcaattctcatgcctcagcctcccgagtagctggaattaatgggtgtgcaccaccacacccagctaatttttgtattttttagtagagacggggtttcaccatgttagccaggctggtcttgaactactgacctcaggtgatccgcccaccttggcctcccgaagtgctgggattacaggcttgagccaccacatcctgtcctagaaagctgattttgataaagaat

SEQ ID NO: 300607 - DNA, 394 bp, Homo sapiens
ttggactttaaggagaggaggtaaaatgaaagacgaagataagacatagcccagggatttatccgtatgtagaatacagaaggaataagggaggaaaaataataagttgtcgggaacaagtagctatggaaaagttctctgttaggacacagtttgaagaagttaagacctcagaatatttttttaaaaaagtaagttactaccattgaacaaaaaccaatcagtctttgaaattggctaaattatttctcccccccaccccttcccttaaacttcttacaggccacagtgtagctttatgggaatggttatttcccatgatatgctgctaggacgttggcgcctttctttagaactgttcggcagggtattcatggaagatgttggagcagaa

SEQ ID NO: 300608 - DNA, 679 bp, Homo sapiens
gtattcaatgtaactagaatatttctgttaaaattccagccaaatgctagaaaggaggatctttttggccgtccaagtcagggtctttattcttcatctgccagtagtgggaaatgtttaatggaggttacagtggatagaaactgcctagaggtaagacagtaaaagtttttttgcaatataacatttattaaggacaacttgtcccagcatatagatttttagaaatgcgttaattcagaatattatattttctgaaatgaagtgtcagaaattcctgccttgtggtataatgtaggaagaattccaacactgtcattaacttgctgtcagatcacttcatccataaaataccagcctccatatgtgctttgtctgtttcacagagctgactgctgtatgtggctgaaaatttgaatttttcatgtataataaaaatatatagatgagcatgtgtaattttggctacaacttttacttgctgaactaattttaatcaagactgtagataaatagcattaataatgatacctaatatttgttgactaattctgtttcctgggcattggtctccatctttataactatgtttggtagaatgcattatcaccctgattttttgggtgagaaatagagtcttgaagagagtaagtaaatttcacgtgggaatgtctgtgtc

SEQ ID NO: 300609 - DNA, 365 bp, Homo sapiens
tgactttgaaatttaaggtagttgaatttgcattcatctaaatacagtatatttctgattttcttctaggtttaatgcagagattaaggaaccgaggagagagagaccgggaaagggagagagaaagggaaatgaggaggagtagtggtttgcgagcaggttctcggagggaccgggataggtaaattttgtatctttgattcaataccacctttttggatgaattagagataggcctgtaaatgaaagaatcttaattatggattattttttagaaaagtaaagttttaattttgaacatatgtatagtaactaagaatagtctgttaataaaatacaataactaagaatagtctattaactaa

SEQ ID NO: 300610 - DNA, 4511 bp, Homo sapiens
caattgtcatacgacttgcagtgagcgtcaggagcacgtccaggaactcctcagcagcgcctccttcagctccacagccagacgccctcagacagcaaagcctacccccgcgccgcgccctgcccgccgctgcgatgctcgcccgcgccctgctgctgtgcgcggtcctggcgctcagccatacagcaaatccttgctgttcccacccatgtcaaaaccgaggtgtatgtatgagtgtgggatttgaccagtataagtgcgattgtacccggacaggattctatggagaaaactgctcaacaccggaatttttgacaagaataaaattatttctgaaacccactccaaacacagtgcactacatacttacccacttcaagggattttggaacgttgtgaataacattcccttccttcgaaatgcaattatgagttatgtgttgacatccagatcacatttgattgacagtccaccaacttacaatgctgactatggctacaaaagctgggaagccttctctaacctctcctattatactagagcccttcctcctgtgcctgatgattgcccgactcccttgggtgtcaaaggtaaaaagcagcttcctgattcaaatgagattgtggaaaaattgcttctaagaagaaagttcatccctgatccccagggctcaaacatgatgtttgcattctttgcccagcacttcacgcatcagtttttcaagacagatcataagcgagggccagctttcaccaacgggctgggccatggggtggacttaaatcatatttacggtgaaactctggctagacagcgtaaactgcgccttttcaaggatggaaaaatgaaatatcagataattgatggagagatgtatcctcccacagtcaaagatactcaggcagagatgatctaccctcctcaagtccctgagcatctacggtttgctgtggggcaggaggtctttggtctggtgcctggtctgatgatgtatgccacaatctggctgcgggaacacaacagagtatgcgatgtgcttaaacaggagcatcctgaatggggtgatgagcagttgttccagacaagcaggctaatactgataggagagactattaagattgtgattgaagattatgtgcaacacttgagtggctatcacttcaaactgaaatttgacccagaactacttttcaacaaacaattccagtaccaaaatcgtattgctgctgaatttaacaccctctatcactggcatccccttctgcctgacacctttcaaattcatgaccagaaatacaactatcaacagtttatctacaacaactctatattgctggaacatggaattacccagtttgttgaatcattcaccaggcaaattgctggcagggttgctggtggtaggaatgttccacccgcagtacagaaagtatcacaggcttccattgaccagagcaggcagatgaaataccagtcttttaatgagtaccgcaaacgctttatgctgaagccctatgaatcatttgaagaacttacaggagaaaaggaaatgtctgcagagttggaagcactctatggtgacatcgatgctgtggagctgtatcctgcccttctggtagaaaagcctcggccagatgccatctttggtgaaaccatggtagaagttggagcaccattctccttgaaaggacttatgggtaatgttatatgttctcctgcctactggaagccaagcacttttggtggagaagtgggttttcaaatcatcaacactgcctcaattcagtctctcatctgcaataacgtgaagggctgtccctttacttcattcagtgttccagatccagagctcattaaaacagtcaccatcaatgcaagttcttcccgctccggactagatgatatcaatcccacagtactactaaaagaacgttcgactgaactgtagaagtctaatgatcatatttatttatttatatgaaccatgtctattaatttaattatttaataatatttatattaaactccttatgttacttaacatcttctgtaacagaagtcagtactcctgttgcggagaaaggagtcatacttgtgaagacttttatgtcactactctaaagattttgctgttgctgttaagtttggaaaacagtttttattctgttttataaaccagagagaaatgagttttgacgtctttttacttgaatttcaacttatattataagaacgaaagtaaagatgtttgaatacttaaacactgtcacaagatggcaaaatgctgaaagtttttacactgtcgatgtttccaatgcatcttccatgatgcattagaagtaactaatgtttgaaattttaaagtacttttggttatttttctgtcatcaaacaaaaacaggtatcagtgcattattaaatgaatatttaaattagacattaccagtaatttcatgtctactttttaaaatcagcaatgaaacaataatttgaaatttctaaattcatagggtagaatcacctgtaaaagcttgtttgatttcttaaagttattaaacttgtacatataccaaaaagaagctgtcttggatttaaatctgtaaaatcagtagaaattttactacaattgcttgttaaaatattttataagtgatgttcctttttcaccaagagtataaacctttttagtgtgactgttaaaacttccttttaaatcaaaatgccaaatttattaaggtggtggagccactgcagtgttatcttaaaataagaatattttgttgagatattccagaatttgtttatatggctggtaacatgtaaaatctatatcagcaaaagggtctacctttaaaataagcaataacaaagaagaaaaccaaattattgttcaaatttaggtttaaacttttgaagcaaacttttttttatccttgtgcactgcaggcctggtactcagattttgctatgaggttaatgaagtaccaagctgtgcttgaataacgatatgttttctcagattttctgttgtacagtttaatttagcagtccatatcacattgcaaaagtagcaatgacctcataaaatacctcttcaaaatgcttaaattcatttcacacattaattttatctcagtcttgaagccaattcagtaggtgcattggaatcaagcctggctacctgcatgctgttccttttcttttcttcttttagccattttgctaagagacacagtcttctcatcacttcgtttctcctattttgttttactagttttaagatcagagttcactttctttggactctgcctatattttcttacctgaacttttgcaagttttcaggtaaacctcagctcaggactgctatttagctcctcttaagaagattaaaagagaaaaaaaaaggcccttttaaaaatagtatacacttattttaagtgaaaagcagagaattttatttatagctaattttagctatctgtaaccaagatggatgcaaagaggctagtgcctcagagagaactgtacggggtttgtgactggaaaaagttacgttcccattctaattaatgccctttcttatttaaaaacaaaaccaaatgatatctaagtagttctcagcaataataataatgacgataatacttcttttccacatctcattgtcactgacatttaatggtactgtatattacttaatttattgaagattattatttatgtcttattaggacactatggttataaactgtgtttaagcctacaatcattgatttttttttgttatgtcacaatcagtatattttctttggggttacctctctgaatattatgtaaacaatccaaagaaatgattgtattaagatttgtgaataaatttttagaaatctgattggcatattgagatatttaaggttgaatgtttgtccttaggataggcctatgtgctagcccacaaagaatattgtctcattagcctgaatgtgccataagactgaccttttaaaatgttttgagggatctgtggatgcttcgttaatttgttcagccacaatttattgagaaaatattctgtgtcaagcactgtgggttttaatatttttaaatcaaacgctgattacagataatagtatttatataaataattgaaaaaaattttcttttgggaagagggagaaaatgaaataaatatcattaaagataactcaggagaatcttctttacaattttacgtttagaatgtttaaggttaagaaagaaatagtcaatatgcttgtataaaacactgttcactgttttttttaaaaaaaaaacttgatttgttattaacattgatctgctgacaaaacctgggaatttgggttgtgtatgcgaatgtttcagtgcctcagacaaatgtgtatttaacttatgtaaaagataagtctggaaataaatgtctgtttatttttgtactatttaaaaattgacagatcttttctgaagataaactttgattgtttctata

SEQ ID NO: 300611 - DNA, 4605 bp, Homo sapiens
caattgtcatacgacttgcagtgagcgtcaggagcacgtccaggaactcctcagcagcgcctccttcagctccacagccagacgccctcagacagcaaagcctacccccgcgccgcgccctgcccgccgctgcgatgctcgcccgcgccctgctgctgtgcgcggtcctggcgctcagccatacagcaaatccttgctgttcccacccatgtcaaaaccgaggtgtatgtatgagtgtgggatttgaccagtataagtgcgattgtacccggacaggattctatggagaaaactgctcaacaccggaatttttgacaagaataaaattatttctgaaacccactccaaacacagtgcactacatacttacccacttcaagggattttggaacgttgtgaataacattcccttccttcgaaatgcaattatgagttatgtgttgacatccagatcacatttgattgacagtccaccaacttacaatgctgactatggctacaaaagctgggaagccttctctaacctctcctattatactagagcccttcctcctgtgcctgatgattgcccgactcccttgggtgtcaaaggtaaaaagcagcttcctgattcaaatgagattgtggaaaaattgcttctaagaagaaagttcatccctgatccccagggctcaaacatgatgtttgcattctttgcccagcacttcacgcatcagtttttcaagacagatcataagcgagggccagctttcaccaacgggctgggccatggggtggacttaaatcatatttacggtgaaactctggctagacagcgtaaactgcgccttttcaaggatggaaaaatgaaatatcagataattgatggagagatgtatcctcccacagtcaaagatactcaggcagagatgatctaccctcctcaagtccctgagcatctacggtttgctgtggggcaggaggtctttggtctggtgcctggtctgatgatgtatgccacaatctggctgcgggaacacaacagagtatgcgatgtgcttaaacaggagcatcctgaatggggtgatgagcagttgttccagacaagcaggctaatactgataggagagactattaagattgtgattgaagattatgtgcaacacttgagtggctatcacttcaaactgaaatttgacccagaactacttttcaacaaacaattccagtaccaaaatcgtattgctgctgaatttaacaccctctatcactggcatccccttctgcctgacacctttcaaattcatgaccagaaatacaactatcaacagtttatctacaacaactctatattgctggaacatggaattacccagtttgttgaatcattcaccaggcaaattgctggcagggttgctggtggtaggaatgttccacccgcagtacagaaagtatcacaggcttccattgaccagagcaggcagatgaaataccagtcttttaatgagtaccgcaaacgctttatgctgaagccctatgaatcatttgaagaacttacaggagaaaaggaaatgtctgcagagttggaagcactctatggtgacatcgatgctgtggagctgtatcctgcccttctggtagaaaagcctcggccagatgccatctttggtgaaaccatggtagaagttggagcaccattctccttgaaaggacttatgggtaatgttatatgttctcctgcctactggaagccaagcacttttggtggagaagtgggttttcaaatcatcaacactgcctcaattcagtctctcatctgcaataacgtgaagggctgtccctttacttcattcagtgttccagatccagagctcattaaaacagtcaccatcaatgcaagttcttcccgctccggactagatgatatcaatcccacagtactactaaaagaacgttcgactgaactgtagaagtctaatgatcatatttatttatttatatgaaccatgtctattaatttaattatttaataatatttatattaaactccttatgttacttaacatcttctgtaacagaagtcagtactcctgttgcggagaaaggagtcatacttgtgaagacttttatgtcactactctaaagattttgctgttgctgttaagtttggaaaacagtttttattctgttttataaaccagagagaaatgagttttgacgtctttttacttgaatttcaacttatattataagaacgaaagtaaagatgtttgaatacttaaacactgtcacaagatggcaaaatgctgaaagtttttacactgtcgatgtttccaatgcatcttccatgatgcattagaagtaactaatgtttgaaattttaaagtacttttggttatttttctgtcatcaaacaaaaacaggtatcagtgcattattaaatgaatatttaaattagacattaccagtaatttcatgtctactttttaaaatcagcaatgaaacaataatttgaaatttctaaattcatagggtagaatcacctgtaaaagcttgtttgatttcttaaagttattaaacttgtacatataccaaaaagaagctgtcttggatttaaatctgtaaaatcagtagaaattttactacaattgcttgttaaaatattttataagtgatgttcctttttcaccaagagtataaacctttttagtgtgactgttaaaacttccttttaaatcaaaatgccaaatttattaaggtggtggagccactgcagtgttatcttaaaataagaatattttgttgagatattccagaatttgtttatatggctggtaacatgtaaaatctatatcagcaaaagggtctacctttaaaataagcaataacaaagaagaaaaccaaattattgttcaaatttaggtttaaacttttgaagcaaacttttttttatccttgtgcactgcaggcctggtactcagattttgctatgaggttaatgaagtaccaagctgtgcttgaataacgatatgttttctcagattttctgttgtacagtttaatttagcagtccatatcacattgcaaaagtagcaatgacctcataaaatacctcttcaaaatgcttaaattcatttcacacattaattttatctcagtcttgaagccaattcagtaggtgcattggaatcaagcctggctacctgcatgctgttccttttcttttcttcttttagccattttgctaagagacacagtcttctcatcacttcgtttctcctattttgttttactagttttaagatcagagttcactttctttggactctgcctatattttcttacctgaacttttgcaagttttcaggtaaacctcagctcaggactgctatttagctcctcttaagaagattaaaagagaaaaaaaaaggcccttttaaaaatagtatacacttattttaagtgaaaagcagagaattttatttatagctaattttagctatctgtaaccaagatggatgcaaagaggctagtgcctcagagagaactgtacggggtttgtgactggaaaaagttacgttcccattctaattaatgccctttcttatttaaaaacaaaaccaaatgatatctaagtagttctcagcaataataataatgacgataatacttcttttccacatctcattgtcactgacatttaatggtactgtatattacttaatttattgaagattattatttatgtcttattaggacactatggttataaactgtgtttaagcctacaatcattgatttttttttgttatgtcacaatcagtatattttctttggggttacctctctgaatattatgtaaacaatccaaagaaatgattgtattaagatttgtgaataaatttttagaaatctgattggcatattgagatatttaaggttgaatgtttgtccttaggataggcctatgtgctagcccacaaagaatattgtctcattagcctgaatgtgccataagactgaccttttaaaatgttttgagggatctgtggatgcttcgttaatttgttcagccacaatttattgagaaaatattctgtgtcaagcactgtgggttttaatatttttaaatcaaacgctgattacagataatagtatttatataaataattgaaaaaaattttcttttgggaagagggagaaaatgaaataaatatcattaaagataactcaggagaatcttctttacaattttacgtttagaatgtttaaggttaagaaagaaatagtcaatatgcttgtataaaacactgttcactgttttttttaaaaaaaaaacttgatttgttattaacattgatctgctgacaaaacctgggaatttgggttgtgtatgcgaatgtttcagtgcctcagacaaatgtgtatttaacttatgtaaaagataagtctggaaataaatgttctgcagaaaaaaaaaaaaaaaaaaaaaaaaattttttggggggctggctggaaaaggtttaaacatttttgggggggggccatggtatttgaaatggcaaggtttccaagaaccgggcgacaaggggggtttcccaaaaaagggggccgggttgaaaccgg

SEQ ID NO: 300612 - DNA, 454 bp, Homo sapiens
ttgaattttaagcagagctcctgttgaaatgtaggtaagcatctttccagcaaataaaaattgtctccgctgggagtttcagttttacctgatttgtacctaaggcaagctgaatacaaacagtaaatatgcctaaaattcttgttttacaactaattttactttccacaggttgctggtggtaggaatgttccacccgcagtacagaaagtatcacaggcttccattgaccagagcaggcagatgaaataccagtcttttaatgagtaccgcaaacgctttatgctgaagccctatgaatcatttgaagaacttacaggtaagaaacagtttctaaacttcttcgttttttgtttgtttgtttgtttttgttgtttttggttttcttttcgagatggagccgccctctgtcacccaggctggagtgcagtggcgccatctcggctcactgcaa

SEQ ID NO: 300613 - DNA, 427 bp, Homo sapiens
tcgacctatcggtctagaccaagacgctacgtagagcctcctgaaatgattgggcctatgcggcccgagcagttcagtgatgaagtggaaccagcaacacctgaagaaggggaaccagcaactcaacgtcaggatcctgcagctgctcaggagggagaggatgagggagcatctgcaggtcaagggccgaagcctgaagctcatagccaggaacagggtcacccacagactgggtgtgagtgtgaagatggtcctgatgggcaggagatggacccgccaaatccagaggaggtgaaaacgcctgaagaaggtgaaaagcaatcacagtgttaaaagaagacacgttgaaatgatgcaggctgctcctatgttggaaatttgttcattaaaattctcccaataaagctttacagccttctgcaaagaa

SEQ ID NO: 300614 - DNA, 410 bp, Homo sapiens
ataacgaaacttattttttatttgcacacccacacgtattccccagcccgagcagttcagtgatgaagtggaaccagcaacacctgaagaaggggaaccagcaactcaacgtcaggatcctgcagctgctcaggagggagaggatgagggagcatctgcaggtcaagggccgaagcctgaagctcatagccaggaacagggtcacccacagactgggtgtgagtgtgaagatggtcctgatgggcaggagatggacccgccaaatccagaggaggtgaaaacgcctgaagaaggtgaaaagcaatcacagtgttaaaagaagacacgttgaaatgatgcaggctgctcctatgttggaaatttgttcattaaaattctcccaataaagctttacagccttctgcaaagaa

SEQ ID NO: 300615 - DNA, 449 bp, Homo sapiens
tagtacttcctgagtaatcaactgaagtatgctttacacatgtgttttccaaattgctgactgttaattgtaagtgcttgtgacttgaaaggaagcacttgatgttcagggaggaaattccttttaaattctgcaggtctacgctcaaagtttatgcagaggttcaattgcgtgtaagacacgggatcacccatagggttctgtttttagtccatttaataaaacccaaactgtagtgtgctttgtatgcctttagggtcatctgaataatctgttgctaagtcatgttcccaatcgttgtgtttctgttacaggtgaaaagcaatcacagtgttaaaagaagacacgttgaaatgatgcaggctgctcctatgttggaaatttgttcattaaaattctcccaataaagctttacagccttctgcaaagaagtcttgcgcatcttttgt

SEQ ID NO: 300616 - DNA, 3782 bp, Homo sapiens
cgcccagctaatttttgtatttttggtagagacagggtttcgccatgttgcccaggctggtcttgaacttctgacctcaagtgatatgcctgcctcagcctcccaaggggtacctccccacagtcctggagcagactgtggcccctcagggccttgagtggcacgctggtggggcagctcttgtcttggagccgtcaggcaccgtgtgaaagtttggaggagggaggcaggaggtgaggttggaagttgagcaaggttccaggagtcagccggagctggggcagcatacggggttgcaagtgaagccgctgagaggcaaaagggatgagtgttagctgctgtgggattgggaagcgcaggagcttcaggaccagcttgtcttgggggtggtaaggagcctaggatgggatggttgggtgttagcagggtggaggaggcctggtgtgggcccttgtttctgcgtcaccctgtcctctgccctttccccttcctggacaggggtctctgcagttcccagaaacccagtgcccggtgcagagaagagggtggagccttgccgccccctgcccccggcctccgacccgagcccccacccgcctgtgcttgcctcccaggtaccccagtgtggcctgcgagattctgacctcagatgtgccccagatcaatgatgccctgggtgctgatgagtcccttctgaaccggctctacggcttcctgcagagcaccggcagcctcaacccactgctggccagcttcttcagcaaggtcatgggcatcctcatcaaccgcaagacagaccagctcgtgtcctttcttcggaagaaggatgacttcgtggacctgctgctgcagcacattggcacctcggccatcatggacctcctgctgcgcctgctcacctgtgtggagcggcctcagctgaggcaggatgttgtcaattggctcaacgaggagaagatcgtccagcggctgattgagcagatccacccgtcgaaggatgagaatcaacattccaacgcatcccagtccctgtgtgacatcatccgcctgagccgggagcagatgatccaagtccaggacagcccagagcctgaccaactgctggccaccctggagaagcaggagacgattgagcagctcttaagcaacatgttcgagggggagcagagccagtctgtcatcgtcagtgggatccaggtgctgctgaccctgctggagcccaggaggccgaggtccgagtccgtgaccgtgaacagcttcttcagcagtgtggatgggcagctggagctcctggcccagggggccctggaaagcactgtgtccagtgtgggcgccttgcacgccctacgcccgcggctcagctgcttccaccagctcctgctggagcctcccaagctggagccgctacagatgacatggggcatgctggctccgcctctgggcaacacgcggctgcacgtggtcaagctcctggccagtgccctgagcgccaatgatgcagccctgacgcacgagctcctggcactggacgtgcccaacaccatgctggacctcttcttccattatgtcttcaacaacttcttgcatgcccaagtagagggatgcgtgagcaccatgctgagcttggggccacctcctgacagcagccctgagacgcccatccaaaaccctgttgtgaaacatctgctgcagcagtgccgcctggtggagcggatcctgacgtcctgggaggagaacgaccgtgtacagtgtgcgggaggccctcggaaaggctacatgggtcacctgacaagagtggccggtgccctggtgcagaacacggagaaggggcccaatgcagagcagctgcggcagctgctgaaggagctgcccagcgagcagcaggagcagtgggaagccttcgtatcggggcccctggcggagaccaacaagaagaacatggtggacctggtgaacacccaccacctacactcctccagtgacgatgaggacgaccggctcaaggagttcaacttccctgaggaggctgtgctgcagcaggccttcatggacttccagatgcagcgcatgacctctgccttcattgaccacttcggcttcaatgatgaggagtttggggagcaggaggagagtgtgaacgcaccttttgacaagacagccaacatcaccttctccctcaatgctgacgatgagaaccccaacgccaacctacttgagatatgctacaaggaccgcatccagcagtttgatgatgatgaggaagaggaggacgaggaagaggcccagggctcaggggagtctgatggagaagatggcgcctggcagggcagccagctggccaggggggcccgtctgggccagccacctggtgtccggagtggaggcagcacagacagtgaggacgaagaagaggaggacgaggaggaggaggaagacgaggagggcattggctgtgcagcccgtggaggggccacccctctgtcctaccccagccctggccctcagcctccaggccccagctggacagccacctttgacccagtgcctacagatgccccgaccagcccccgagtctccggggaggaagagctgcacactgggcctccagccccacaggggcccctcagtgtgccccagggcctccccactcagagcctggccagccctcctgcccgtgacgccctgcagctcaggtctcaggaccccacacccccctcagcacctcaggaagccacagaaggcagcaaagtcacggagccctcagccccttgccaggccttggttagcatcggggaccttcaggccaccttccacgggatccgttctgcccccagctcctcggacagtgcaaccagagacccctctacctctgtcccagcctccggggcccaccagcccccccagaccacagaaggggagaagagcccagagcccttggggcttccccaaagccagagtgcccaggccctcacgcctcctccgatacccaatggctctgccccggaagggcctgcatccccaggctcccaatagctgcctggtgcggcagcggcggccaaatcttccgtcctcccgtggatctcccggggtgggggcagggcgggtcccacgatggcccccattgccctcatcaccctgacacccccacattctctcctctggacccccaggaggctggtgccagggagacaggcccaacccacccccatttgcactgagaagagaagttttggagcgttgcctcctagaataaagatacagagagtcaaatagagagaatggagagagagaaacatatattatatattatatagagagagggaggagagcgagagagagtgaggacaccgaactgggctggcggctccaaagcacagccttccctgttccgtcccagcgggagctggtgttaggggtcccaaggttgccacccacgtgcccagctgtcccacgctgcagcgcagacggccacgcccacacccggccttttagctcaggtccaccatgggggacggcccagcgtgggtgggggtgccagagggtcccgagtgggggccgtgcctttgcccagaccctgcactttcaaccaggccagtccggctctggggagcaggggcctccccggcaacagccccaggggccttgagggtctgaggtcccagccctgttgccaagtgaccttgtccccagctccctcctcccaggctggtgtgagtgtgcgtgcgtttgtgccgagcttctatttcatattgcaaatataaataaaggaaggcagtttacga

SEQ ID NO: 300617 - DNA, 3538 bp, Homo sapiens
  misc_feature (47)..(47): n is a, c, g, or t
gagcgggcgcgagtcccgacgccgccccgccctctactcaccgggcnccgcagcaggggccggagccgccggcggcggggcgggggggggcgccccgatgagccccgagtgcgaggagccgccgccccccctcgcagggcgccatgttttggaagtttgacctgcacacaagctcgcacctggacacgctgctggagcgggaggacctgagcctgcccgagctgctggacgaggaagacgtgctgcaggagtgcaaggtcgtcaaccgcaagctgctggacttcctgctgcagccaccccacctgcaagcaatggtggcctgggtcacccaggagccgccagatagcggtgaggagcggctgcgctacaagtaccccagtgtggcctgcgagattctgacctcagatgtgccccagatcaatgatgccctgggtgctgatgagtcccttctgaaccggctctacggcttcctgcagagcaccggcagcctcaacccactgctggccagcttcttcagcaaggtcatgggcatcctcatcaaccgcaagacagaccagctcgtgtcctttcttcggaagaaggatgacttcgtggacctgctgctgcagcacattggcacctcggccatcatggacctcctgctgcgcctgctcacctgtgtggagcggcctcagctgaggcaggatgttgtcaattggctcaacgaggagaagatcgtccagcggctgattgagcagatccacccgtcgaaggatgagaatcaacattccaacgcatcccagtccctgtgtgacatcatccgcctgagccgggagcagatgatccaagtccaggacagcccagagcctgaccaactgctggccaccctggagaagcaggagacgattgagcagctcttaagcaacatgttcgagggggagcagagccagtctgtcatcgtcagtgggatccaggtgctgctgaccctgctggagcccaggaggccgaggtccgagtccgtgaccgtgaacagcttcttcagcagtgtggatgggcagctggagctcctggcccagggggccctggaaagcactgtgtccagtgtgggcgccttgcacgccctacgcccgcggctcagctgcttccaccagctcctgctggagcctcccaagctggagccgctacagatgacatggggcatgctggctccgcctctgggcaacacgcggctgcacgtggtcaagctcctggccagtgccctgagcgccaatgatgcagccctgacgcacgagctcctggcactggacgtgcccaacaccatgctggacctcttcttccattatgtcttcaacaacttcttgcatgcccaagtagagggatgcgtgagcaccatgctgagcttggggccacctcctgacagcagccctgagacgcccatccaaaaccctgttgtgaaacatctgctgcagcagtgccgcctggtggagcggatcctgacgtcctgggaggagaacgaccgtgtacagtgtgcgggaggccctcggaaaggctacatgggtcacctgacaagagtggccggtgccctggtgcagaacacggagaaggggcccaatgcagagcagctgcggcagctgctgaaggagctgcccagcgagcagcaggagcagtgggaagccttcgtatcggggcccctggcggagaccaacaagaagaacatggtggacctggtgaacacccaccacctacactcctccagtgacgatgaggacgaccggctcaaggagttcaacttccctgaggaggctgtgctgcagcaggccttcatggacttccagatgcagcgcatgacctctgccttcattgaccacttcggcttcaatgatgaggagtttggggagcaggaggagagtgtgaacgcaccttttgacaagacagccaacatcaccttctccctcaatgctgacgatgagaaccccaacgccaacctacttgagatatgctacaaggaccgcatccagcagtttgatgatgatgaggaagaggaggacgaggaagaggcccagggctcaggggagtctgatggagaagatggcgcctggcagggcagccagctggccaggggggcccgtctgggccagccacctggtgtccggagtggaggcagcacagacagtgaggacgaagaagaggaggacgaggaggaggaggaagacgaggagggcattggctgtgcagcccgtggaggggccacccctctgtcctaccccagccctggccctcagcctccaggccccagctggacagccacctttgacccagtgcctacagatgccccgaccagcccccgagtctccggggaggaagagctgcacactgggcctccagccccacaggggcccctcagtgtgccccagggcctccccactcagagcctggccagccctcctgcccgtgacgccctgcagctcaggtctcaggaccccacacccccctcagcacctcaggaagccacagaaggcagcaaagtcacggagccctcagccccttgccaggccttggttagcatcggggaccttcaggccaccttccacgggatccgttctgcccccagctcctcggacagtgcaaccagagacccctctacctctgtcccagcctccggggcccaccagcccccccagaccacagaaggggagaagagcccagagcccttggggcttccccaaagccagagtgcccaggccctcacgcctcctccgatacccaatggctctgccccggaagggcctgcatccccaggctcccaatagctgcctggtgcggcagcggcggccaaatcttccgtcctcccgtggatctcccggggtgggggcagggcgggtcccacgatggcccccattgccctcatcaccctgacacccccacattctctcctctggacccccaggaggctggtgccagggagacaggcccaacccacccccatttgcactgagaagagaagttttggagcgttgcctcctagaataaagatacagagagtcaaatagagagaatggagagagagaaacatatattatatattatatagagagagggaggagagcgagagagagtgaggacaccgaactgggctggcggctccaaagcacagccttccctgttccgtcccagcgggagctggtgttaggggtcccaaggttgccacccacgtgcccagctgtcccacgctgcagcgcagacggccacgcccacacccggccttttagctcaggtccaccatgggggacggcccagcgtgggtgggggtgccagagggtcccgagtgggggccgtgcctttgcccagaccctgcactttcaaccaggccagtccggctctggggagcaggggcctccccggcaacagccccaggggccttgagggtctgaggtcccagccctgttgccaagtgaccttgtccccagctccctcctcccaggctggtgtgagtgtgcgtgcgtttgtgccgagcttctatttcatattgcaaatataaataaaggaaggcagtttacga

SEQ ID NO: 300618 - DNA, 3567 bp, Homo sapiens
gggtgctctgagtgagtattgtgtgagatggccgtggctgcacgaggtgaactgacgtgatactgtgaatgaacgctgacagcacaggtgcacttggcagtgacgacggggacatagacactcttgtcgcctcggtgagatgatgtgtggtgcgcacatggtttctttcgggacacgctatatggaagcactgcacacaagctcgcacctggacacgctgctggagcgggaggacctgagcctgcccgagctgctggacgaggaagacgtgctgcaggagtgcaaggtcgtcaaccgcaagctgctggacttcctgctgcagccaccccacctgcaagcaatggtggcctgggtcacccaggagccgccagatagcggtgaggagcggctgcgctacaagtaccccagtgtggcctgcgagattctgacctcagatgtgccccagatcaatgatgccctgggtgctgatgagtcccttctgaaccggctctacggcttcctgcagagcaccggcagcctcaacccactgctggccagcttcttcagcaaggtcatgggcatcctcatcaaccgcaagacagaccagctcgtgtcctttcttcggaagaaggatgacttcgtggacctgctgctgcagcacattggcacctcggccatcatggacctcctgctgcgcctgctcacctgtgtggagcggcctcagctgaggcaggatgttgtcaattggctcaacgaggagaagatcgtccagcggctgattgagcagatccacccgtcgaaggatgagaatcaacattccaacgcatcccagtccctgtgtgacatcatccgcctgagccgggagcagatgatccaagtccaggacagcccagagcctgaccaactgctggccaccctggagaagcaggagacgattgagcagctcttaagcaacatgttcgagggggagcagagccagtctgtcatcgtcagtgggatccaggtgctgctgaccctgctggagcccaggaggccgaggtccgagtccgtgaccgtgaacagcttcttcagcagtgtggatgggcagctggagctcctggcccagggggccctggaaagcactgtgtccagtgtgggcgccttgcacgccctacgcccgcggctcagctgcttccaccagctcctgctggagcctcccaagctggagccgctacagatgacatggggcatgctggctccgcctctgggcaacacgcggctgcacgtggtcaagctcctggccagtgccctgagcgccaatgatgcagccctgacgcacgagctcctggcactggacgtgcccaacaccatgctggacctcttcttccattatgtcttcaacaacttcttgcatgcccaagtagagggatgcgtgagcaccatgctgagcttggggccacctcctgacagcagccctgagacgcccatccaaaaccctgttgtgaaacatctgctgcagcagtgccgcctggtggagcggatcctgacgtcctgggaggagaacgaccgtgtacagtgtgcgggaggccctcggaaaggctacatgggtcacctgacaagagtggccggtgccctggtgcagaacacggagaaggggcccaatgcagagcagctgcggcagctgctgaaggagctgcccagcgagcagcaggagcagtgggaagccttcgtatcggggcccctggcggagaccaacaagaagaacatggtggacctggtgaacacccaccacctacactcctccagtgacgatgaggacgaccggctcaaggagttcaacttccctgaggaggctgtgctgcagcaggccttcatggacttccagatgcagcgcatgacctctgccttcattgaccacttcggcttcaatgatgaggagtttggggagcaggaggagagtgtgaacgcaccttttgacaagacagccaacatcaccttctccctcaatgctgacgatgagaaccccaacgccaacctacttgagatatgctacaaggaccgcatccagcagtttgatgatgatgaggaagaggaggacgaggaagaggcccagggctcaggggagtctgatggagaagatggcgcctggcagggcagccagctggccaggggggcccgtctgggccagccacctggtgtccggagtggaggcagcacagacagtgaggacgaagaagaggaggacgaggaggaggaggaagacgaggagggcattggctgtgcagcccgtggaggggccacccctctgtcctaccccagccctggccctcagcctccaggccccagctggacagccacctttgacccagtgcctacagatgccccgaccagcccccgagtctccggggaggaagagctgcacactgggcctccagccccacaggggcccctcagtgtgccccagggcctccccactcagagcctggccagccctcctgcccgtgacgccctgcagctcaggtctcaggaccccacacccccctcagcacctcaggaagccacagaaggcagcaaagtcacggagccctcagccccttgccaggccttggttagcatcggggaccttcaggccaccttccacgggatccgttctgcccccagctcctcggacagtgcaaccagagacccctctacctctgtcccagcctccggggcccaccagcccccccagaccacagaaggggagaagagcccagagcccttggggcttccccaaagccagagtgcccaggccctcacgcctcctccgatacccaatggctctgccccggaagggcctgcatccccaggctcccaatagctgcctggtgcggcagcggcggccaaatcttccgtcctcccgtggatctcccggggtgggggcagggcgggtcccacgatggcccccattgccctcatcaccctgacacccccacattctctcctctggacccccaggaggctggtgccagggagacaggcccaacccacccccatttgcactgagaagagaagttttggagcgttgcctcctagaataaagatacagagagtcaaatagagagaatggagagagagaaacatatattatatattatatagagagagggaggagagcgagagagagtgaggacaccgaactgggctggcggctccaaagcacagccttccctgttccgtcccagcgggagctggtgttaggggtcccaaggttgccacccacgtgcccagctgtcccacgctgcagcgcagacggccacgcccacacccggccttttagctcaggtccaccatgggggacggcccagcgtgggtgggggtgccagagggtcccgagtgggggccgtgcctttgcccagaccctgcactttcaaccaggccagtccggctctggggagcaggggcctccccggcaacagccccaggggccttgagggtctgaggtcccagccctgttgccaagtgaccttgtccccagctccctcctcccaggctggtgtgagtgtgcgtgcgtttgtgccgagcttctatttcatattgcaaatataaataaaggaaggcagtttacga

SEQ ID NO: 300619 - DNA, 3023 bp, Homo sapiens
ctgggccaggccctgtgcatgacgcagcccgtgtgcccccagctcgtgtcctttcttcggaagaaggatgacttcgtggacctgctgctgcagcacattggcacctcggccatcatggacctcctgctgcgcctgctcacctgtgtggagcggcctcagctgaggcaggatgttgtcaattggctcaacgaggagaagatcgtccagcggctgattgagcagatccacccgtcgaaggatgagaatcaacattccaacgcatcccagtccctgtgtgacatcatccgcctgagccgggagcagatgatccaagtccaggacagcccagagcctgaccaactgctggccaccctggagaagcaggagacgattgagcagctcttaagcaacatgttcgagggggagcagagccagtctgtcatcgtcagtgggatccaggtgctgctgaccctgctggagcccaggaggccgaggtccgagtccgtgaccgtgaacagcttcttcagcagtgtggatgggcagctggagctcctggcccagggggccctggaaagcactgtgtccagtgtgggcgccttgcacgccctacgcccgcggctcagctgcttccaccagctcctgctggagcctcccaagctggagccgctacagatgacatggggcatgctggctccgcctctgggcaacacgcggctgcacgtggtcaagctcctggccagtgccctgagcgccaatgatgcagccctgacgcacgagctcctggcactggacgtgcccaacaccatgctggacctcttcttccattatgtcttcaacaacttcttgcatgcccaagtagagggatgcgtgagcaccatgctgagcttggggccacctcctgacagcagccctgagacgcccatccaaaaccctgttgtgaaacatctgctgcagcagtgccgcctggtggagcggatcctgacgtcctgggaggagaacgaccgtgtacagtgtgcgggaggccctcggaaaggctacatgggtcacctgacaagagtggccggtgccctggtgcagaacacggagaaggggcccaatgcagagcagctgcggcagctgctgaaggagctgcccagcgagcagcaggagcagtgggaagccttcgtatcggggcccctggcggagaccaacaagaagaacatggtggacctggtgaacacccaccacctacactcctccagtgacgatgaggacgaccggctcaaggagttcaacttccctgaggaggctgtgctgcagcaggccttcatggacttccagatgcagcgcatgacctctgccttcattgaccacttcggcttcaatgatgaggagtttggggagcaggaggagagtgtgaacgcaccttttgacaagacagccaacatcaccttctccctcaatgctgacgatgagaaccccaacgccaacctacttgagatatgctacaaggaccgcatccagcagtttgatgatgatgaggaagaggaggacgaggaagaggcccagggctcaggggagtctgatggagaagatggcgcctggcagggcagccagctggccaggggggcccgtctgggccagccacctggtgtccggagtggaggcagcacagacagtgaggacgaagaagaggaggacgaggaggaggaggaagacgaggagggcattggctgtgcagcccgtggaggggccacccctctgtcctaccccagccctggccctcagcctccaggccccagctggacagccacctttgacccagtgcctacagatgccccgaccagcccccgagtctccggggaggaagagctgcacactgggcctccagccccacaggggcccctcagtgtgccccagggcctccccactcagagcctggccagccctcctgcccgtgacgccctgcagctcaggtctcaggaccccacacccccctcagcacctcaggaagccacagaaggcagcaaagtcacggagccctcagccccttgccaggccttggttagcatcggggaccttcaggccaccttccacgggatccgttctgcccccagctcctcggacagtgcaaccagagacccctctacctctgtcccagcctccggggcccaccagcccccccagaccacagaaggggagaagagcccagagcccttggggcttccccaaagccagagtgcccaggccctcacgcctcctccgatacccaatggctctgccccggaagggcctgcatccccaggctcccaatagctgcctggtgcggcagcggcggccaaatcttccgtcctcccgtggatctcccggggtgggggcagggcgggtcccacgatggcccccattgccctcatcaccctgacacccccacattctctcctctggacccccaggaggctggtgccagggagacaggcccaacccacccccatttgcactgagaagagaagttttggagcgttgcctcctagaataaagatacagagagtcaaatagagagaatggagagagagaaacatatattatatattatatagagagagggaggagagcgagagagagtgaggacaccgaactgggctggcggctccaaagcacagccttccctgttccgtcccagcgggagctggtgttaggggtcccaaggttgccacccacgtgcccagctgtcccacgctgcagcgcagacggccacgcccacacccggccttttagctcaggtccaccatgggggacggcccagcgtgggtgggggtgccagagggtcccgagtgggggccgtgcctttgcccagaccctgcactttcaaccaggccagtccggctctggggagcaggggcctccccggcaacagccccaggggccttgagggtctgaggtcccagccctgttgccaagtgaccttgtccccagctccctcctcccaggctggtgtgagtgtgcgtgcgtttgtgccgagcttctatttcatattgcaaatataaataaaggaaggcagtttacga

SEQ ID NO: 300620 - DNA, 2907 bp, Homo sapiens
taacacgtgtccctgtgtctgggtgaccatttttccctggatggtcagctcatgggaggggctcccagcaccaggctgcagagggcccggtggcccgaccaggatcctcacctgtctctccccgttccagcaacattccaacgcatcccagtccctgtgtgacatcatccgcctgagccgggagcagatgatccaagtccaggacagcccagagcctgaccaactgctggccaccctggagaagcaggagacgattgagcagctcttaagcaacatgttcgagggggagcagagccagtctgtcatcgtcagtgggatccaggtgctgctgaccctgctggagcccaggaggccgaggtccgagtccgtgaccgtgaacagcttcttcagcagtgtggatgggcagctggagctcctggcccagggggccctggaaagcactgtgtccagtgtgggcgccttgcacgccctacgcccgcggctcagctgcttccaccagctcctgctggagcctcccaagctggagccgctacagatgacatggggcatgctggctccgcctctgggcaacacgcggctgcacgtggtcaagctcctggccagtgccctgagcgccaatgatgcagccctgacgcacgagctcctggcactggacgtgcccaacaccatgctggacctcttcttccattatgtcttcaacaacttcttgcatgcccaagtagagggatgcgtgagcaccatgctgagcttggggccacctcctgacagcagccctgagacgcccatccaaaaccctgttgtgaaacatctgctgcagcagtgccgcctggtggagcggatcctgacgtcctgggaggagaacgaccgtgtacagtgtgcgggaggccctcggaaaggctacatgggtcacctgacaagagtggccggtgccctggtgcagaacacggagaaggggcccaatgcagagcagctgcggcagctgctgaaggagctgcccagcgagcagcaggagcagtgggaagccttcgtatcggggcccctggcggagaccaacaagaagaacatggtggacctggtgaacacccaccacctacactcctccagtgacgatgaggacgaccggctcaaggagttcaacttccctgaggaggctgtgctgcagcaggccttcatggacttccagatgcagcgcatgacctctgccttcattgaccacttcggcttcaatgatgaggagtttggggagcaggaggagagtgtgaacgcaccttttgacaagacagccaacatcaccttctccctcaatgctgacgatgagaaccccaacgccaacctacttgagatatgctacaaggaccgcatccagcagtttgatgatgatgaggaagaggaggacgaggaagaggcccagggctcaggggagtctgatggagaagatggcgcctggcagggcagccagctggccaggggggcccgtctgggccagccacctggtgtccggagtggaggcagcacagacagtgaggacgaagaagaggaggacgaggaggaggaggaagacgaggagggcattggctgtgcagcccgtggaggggccacccctctgtcctaccccagccctggccctcagcctccaggccccagctggacagccacctttgacccagtgcctacagatgccccgaccagcccccgagtctccggggaggaagagctgcacactgggcctccagccccacaggggcccctcagtgtgccccagggcctccccactcagagcctggccagccctcctgcccgtgacgccctgcagctcaggtctcaggaccccacacccccctcagcacctcaggaagccacagaaggcagcaaagtcacggagccctcagccccttgccaggccttggttagcatcggggaccttcaggccaccttccacgggatccgttctgcccccagctcctcggacagtgcaaccagagacccctctacctctgtcccagcctccggggcccaccagcccccccagaccacagaaggggagaagagcccagagcccttggggcttccccaaagccagagtgcccaggccctcacgcctcctccgatacccaatggctctgccccggaagggcctgcatccccaggctcccaatagctgcctggtgcggcagcggcggccaaatcttccgtcctcccgtggatctcccggggtgggggcagggcgggtcccacgatggcccccattgccctcatcaccctgacacccccacattctctcctctggacccccaggaggctggtgccagggagacaggcccaacccacccccatttgcactgagaagagaagttttggagcgttgcctcctagaataaagatacagagagtcaaatagagagaatggagagagagaaacatatattatatattatatagagagagggaggagagcgagagagagtgaggacaccgaactgggctggcggctccaaagcacagccttccctgttccgtcccagcgggagctggtgttaggggtcccaaggttgccacccacgtgcccagctgtcccacgctgcagcgcagacggccacgcccacacccggccttttagctcaggtccaccatgggggacggcccagcgtgggtgggggtgccagagggtcccgagtgggggccgtgcctttgcccagaccctgcactttcaaccaggccagtccggctctggggagcaggggcctccccggcaacagccccaggggccttgagggtctgaggtcccagccctgttgccaagtgaccttgtccccagctccctcctcccaggctggtgtgagtgtgcgtgcgtttgtgccgagcttctatttcatattgcaaatataaataaaggaaggcagtttacga

SEQ ID NO: 300621 - DNA, 6057 bp, Homo sapiens
  misc_feature (47)..(47): n is a, c, g, or t
gagcgggcgcgagtcccgacgccgccccgccctctactcaccgggcnccgcagcaggggccggagccgccggcggcggggcgggggggggcgccccgatgagccccgagtgcgaggagccgccgccccccctcgcagggcgccatgttttggaagtttgacctgcacacaagctcgcacctggacacgctgctggagcgggaggacctgagcctgcccgagctgctggacgaggaagacgtgctgcaggagtgcaaggtcgtcaaccgcaagctgctggacttcctgctgcagccaccccacctgcaagcaatggtggcctgggtcacccaggagccgccagatagcggtgaggagcggctgcgctacaagtaccccagtgtggcctgcgagattctgacctcagatgtgccccagatcaatgatgccctgggtgctgatgagtcccttctgaaccggctctacggcttcctgcagagcaccggcagcctcaacccactgctggccagcttcttcagcaaggtcatgggcatcctcatcaaccgcaagacagaccagctcgtgtcctttcttcggaagaaggatgacttcgtggacctgctgctgcagcacattggcacctcggccatcatggacctcctgctgcgcctgctcacctgtgtggagcggcctcagctgaggcaggatgttgtcaattggctcaacgaggagaagatcgtccagcggctgattgagcagatccacccgtcgaaggatgagaatcaacattccaacgcatcccagtccctgtgtgacatcatccgcctgagccgggagcagatgatccaagtccaggacagcccagagcctgaccaactgctggccaccctggagaagcaggagacgattgagcagctcttaagcaacatgttcgagggggagcagagccagtctgtcatcgtcagtgggatccaggtgctgctgaccctgctggagcccaggaggccgaggtccgagtccgtgaccgtgaacagcttcttcagcagtgtggatgggcagctggagctcctggcccagggggccctggaaagcactgtgtccagtgtgggcgccttgcacgccctacgcccgcggctcagctgcttccaccagctcctgctggagcctcccaagctggagccgctacagatgacatggggcatgctggctccgcctctgggcaacacgcggctgcacgtggtcaagctcctggccagtgccctgagcgccaatgatgcagccctgacgcacgagctcctggcactggacgtgcccaacaccatgctggacctcttcttccattatgtcttcaacaacttcttgcatgcccaagtagagggatgcgtgagcaccatgctgagcttggggccacctcctgacagcagccctgagacgcccatccaaaaccctgttgtgaaacatctgctgcagcagtgccgcctggtggagcggatcctgacgtcctgggaggagaacgaccgtgtacagtgtgcgggaggccctcggaaaggctacatgggtcacctgacaagagtggccggtgccctggtgcagaacacggagaaggggcccaatgcagagcagctgcggcagctgctgaaggagctgcccagcgagcagcaggagcagtgggaagccttcgtatcggggcccctggcggagaccaacaagaagaacatggtggacctggtgaacacccaccacctacactcctccagtgacgatgaggacgaccggctcaaggagttcaacttccctgaggaggctgtgctgcagcaggccttcatggacttccagatgcagcgcatgacctctgccttcattgaccacttcggcttcaatgatgaggagtttggggagcaggaggagagtgtgaacgcaccttttgacaagacagccaacatcaccttctccctcaatgctgacgatgagaaccccaacgccaacctacttgagatatgctacaaggaccgcatccagcagtttgatgatgatgaggaagaggaggacgaggaagaggcccagggctcaggggagtctgatggagaagatggcgcctggcagggcagccagctggccaggggggcccgtctgggccagccacctggtgtccggagtggaggcagcacagacagtgaggacgaagaagaggaggacgaggaggaggaggaagacgaggagggcattggctgtgcagcccgtggaggggccacccctctgtcctaccccagccctggccctcagcctccaggccccagctggacagccacctttgacccagtgcctacagatgccccgaccagcccccgagtctccggggaggaagagctgcacactgggcctccagccccacaggggcccctcagtgtgccccagggcctccccactcagagcctggccagccctcctgcccgtgacgccctgcagctcaggtctcaggaccccacacccccctcagcacctcaggaagccacagaaggcagcaaagtcacggagccctcagccccttgccaggccttggttagcatcggggaccttcaggccaccttccacgggatccgttctgcccccagctcctcggacagtgcaaccagagacccctctacctctgtcccagcctccggggcccaccagcccccccagaccacagaaggggagaagagcccagagcccttggggcttccccaaagccagagtgcccaggccctcacgcctcctccgatacccaatggctctgccccggaagggcctgcatccccaggctcccaatagctgcctggtgcggcagcggcggccaaatcttccgtcctcccgtggatctcccggggtgggggcagggcgggtcccacgatggcccccattgccctcatcaccctgacacccccacattctctcctctggacccccaggaggctggtgccagggagacaggcccaacccacccccatttgcactgagaagagaagttttggagcgttgcctcctagaataaagatacagagagtcaaatagagagaatggagagagagaaacatatattatatattatatagagagagggaggagagcgagagagagtgaggacaccgaactgggctggcggctccaaagcacagccttccctgttccgtcccagcgggagctggtgttaggggtcccaaggttgccacccacgtgcccagctgtcccacgctgcagcgcagacggccacgcccacacccggccttttagctcaggtccaccatgggggacggcccagcgtgggtgggggtgccagagggtcccgagtgggggccgtgcctttgcccagaccctgcactttcaaccaggccagtccggctctggggagcaggggcctccccggcaacagccccaggggccttgagggtctgaggtcccagccctgttgccaagtgaccttgtccccagctccctcctcccaggctggtgtgagtgtgcgtgcgtttgtgccgagcttctatttcatattgcaaatataaataaaggaaggcagtttacgattctgctggtcagaccttacgttctgggatgcggggtggggagcctgtattatccctgcaccccagaggctgggggtgctcctgacccagtctgcccccacactgtcctgccagagggagccctgtggctgcagaggccccaggctgggccaggcactggctgtgagggctcctgccaggtctaccccacctgtgggcagggccttgggcagaggatagaagccaccgacaggctcaaatccctgctcctgcccctgcttacccccagtaaccaagcccagcattgaggctgggtactggcgcccagtaggtctgagtctttcaggtagaaggtagaagtgtaggctgcgtgtgcagcgagtggcaccggtgagcggcgctgggaaaccggagcgtgtggaccgggccatgaggacagcgtcctcactggggtggcagttggcttggaggtcacctgggggctcgctcagctaacaggagagggtgcttgttccccgcattcgtggtggtccctcctggtcacccattgaagcagtgtttgtggtggagcccctgagggcttggtggggttgagcagaatgaggaaaggtttcatggagcagggagggagacggctagggcagcaagtgaaggacagactcgccttcccatccctccaggggcactcctgccagccagcccctctcccgcttcccatgatggggtggctgttggaattctgcaccccatctcttctgattgttggggcccaggacaaggggacaggcatttgtgggcctaacctccccaggcagataggaggaggaagccatgtcccagcaggctagggcagagggacccccagtgccaacagtgctttatcagcgggcgccaggcagggccatccccagggtgaggacaacatctccctgggccctgttatcagtcacagagtccacaggacgctccttgggttaacgtgtaaccatgagccctcccctccaccccctgaagccactcgctcccagattaggtcgctctggggctatcaggccagcatggacgctggcaaagcggggcagaccctgaagactcactgctcagcccaggtgagagccttctgagctgtgcctggggctggggggacagggccctggaaccccagcagccggcgggtctgggagctgctgtccttgagttggttgggccctgggaagctgggttctggcagcctggtccctgaatgggtccagcctgtacagctggggtcccaggtgggggtgggacaggagccatgagatctgagtcccaagaatgggggctgggctgggtttcggctcagtagctccccactccccaaagcgcccagatgtctgcaggtggctgagccccttcatcctctcctgctgcgtgtacttctgcctctggattcccgaggaccagctgtcctggttcgctgccctggtcaagtgcctgcctgtcctctgcctggctgggttcctgtgggtcatgtccccaagcgggggctacacccagctcctccagggagcccttgtgtgctcggctgtgggggacgcttgcctcatctggccggcagccttcgtccctggcatggccgcctttgccaccgccacctcctctacgtctgggccttcggcttctctcccctgcagcccggctgctgctgctcatcatcctggcccctggccctacctcagccttgtgctccagcacctcgagccggatatggtcctgccggtggcagcctatgggctgatcctgatggccatgctgtggcgcggcctggcccagggcgggagtgccggctggggcgcgctgctcttcacgctctctgatggcgtgctggcctgggacaccttcgcccagcccctgccccatgcccacctggtgatcatgaccacctactatgctgcccagctcctcatcacactgtcagccctcaggagcccggtgcccaagactgactgactagggagcttgaagggccggtgttcaggccctctcctcctgcaaggacctgggcctcccagcccagcccagcctgagaaataccctcagcagcgaagcttcctgacgcctgtctgcaggcgccgctgccgccgtcgcttctggctgaagacgtttgaggacgatttgcggaattccaagtccactactgggttccagctgccttcccccggttctgactccagatccctggctcctcagccaggcccacatggagccctcccagccaccagcctgcctccatgttcactgtcggccccacagcctgcccgccccctgctgctgctctgaatccgttttccctgtgggtgtggaaccgtagatgttgctgttaccgtaggagaggcctcggggagggtcatcattgtgataaaccatcgcggttaatgacagcagaaggttctttgtcgctccccatggaccaggcctggtgcccagtgggaccctccatggccctctggtggggggattcggggggataaagtgaggattgtgcagaactgaaaaaaagg

SEQ ID NO: 300622 - DNA, 5804 bp, Homo sapiens
  misc_feature (47)..(47): n is a, c, g, or t
gagcgggcgcgagtcccgacgccgccccgccctctactcaccgggcnccgcagcaggggccggagccgccggcggcggggcgggggggggcgccccgatgagccccgagtgcgaggagccgccgccccccctcgcagggcgccatgttttggaagtttgacctgcacacaagctcgcacctggacacgctgctggagcgggaggacctgagcctgcccgagctgctggacgaggaagacgtgctgcaggagtgcaaggtcgtcaaccgcaagctgctggacttcctgctgcagccaccccacctgcaagcaatggtggcctgggtcacccaggagccgccagatagcggtgaggagcggctgcgctacaagtaccccagtgtggcctgcgagattctgacctcagatgtgccccagatcaatgatgccctgggtgctgatgagtcccttctgaaccggctctacggcttcctgcagagcaccggcagcctcaacccactgctggccagcttcttcagcaaggtcatgggcatcctcatcaaccgcaagacagaccagctcgtgtcctttcttcggaagaaggatgacttcgtggacctgctgctgcagcacattggcacctcggccatcatggacctcctgctgcgcctgctcacctgtgtggagcggcctcagctgaggcaggatgttgtcaattggctcaacgaggagaagatcgtccagcggctgattgagcagatccacccgtcgaaggatgagaatcaacattccaacgcatcccagtccctgtgtgacatcatccgcctgagccgggagcagatgatccaagtccaggacagcccagagcctgaccaactgctggccaccctggagaagcaggagacgattgagcagctcttaagcaacatgttcgagggggagcagagccagtctgtcatcgtcagtgggatccaggtgctgctgaccctgctggagcccaggaggccgaggtccgagtccgtgaccgtgaacagcttcttcagcagtgtggatgggcagctggagctcctggcccagggggccctggaaagcactgtgtccagtgtgggcgccttgcacgccctacgcccgcggctcagctgcttccaccagctcctgctggagcctcccaagctggagccgctacagatgacatggggcatgctggctccgcctctgggcaacacgcggctgcacgtggtcaagctcctggccagtgccctgagcgccaatgatgcagccctgacgcacgagctcctggcactggacgtgcccaacaccatgctggacctcttcttccattatgtcttcaacaacttcttgcatgcccaagtagagggatgcgtgagcaccatgctgagcttggggccacctcctgacagcagccctgagacgcccatccaaaaccctgttgtgaaacatctgctgcagcagtgccgcctggtggagcggatcctgacgtcctgggaggagaacgaccgtgtacagtgtgcgggaggccctcggaaaggctacatgggtcacctgacaagagtggccggtgccctggtgcagaacacggagaaggggcccaatgcagagcagctgcggcagctgctgaaggagctgcccagcgagcagcaggagcagtgggaagccttcgtatcggggcccctggcggagaccaacaagaagaacatggtggacctggtgaacacccaccacctacactcctccagtgacgatgaggacgaccggctcaaggagttcaacttccctgaggaggctgtgctgcagcaggccttcatggacttccagatgcagcgcatgacctctgccttcattgaccacttcggcttcaatgatgaggagtttggggagcaggaggagagtgtgaacgcaccttttgacaagacagccaacatcaccttctccctcaatgctgacgatgagaaccccaacgccaacctacttgagatatgctacaaggaccgcatccagcagtttgatgatgatgaggaagaggaggacgaggaagaggcccagggctcaggggagtctgatggagaagatggcgcctggcagggcagccagctggccaggggggcccgtctgggccagccacctggtgtccggagtggaggcagcacagacagtgaggacgaagaagaggaggacgaggaggaggaggaagacgaggagggcattggctgtgcagcccgtggaggggccacccctctgtcctaccccagccctggccctcagcctccaggccccagctggacagccacctttgacccagtgcctacagatgccccgaccagcccccgagtctccggggaggaagagctgcacactgggcctccagccccacaggggcccctcagtgtgccccagggcctccccactcagagcctggccagccctcctgcccgtgacgccctgcagctcaggtctcaggaccccacacccccctcagcacctcaggaagccacagaaggcagcaaagtcacggagccctcagccccttgccaggccttggttagcatcggggaccttcaggccaccttccacgggatccgttctgcccccagctcctcggacagtgcaaccagagacccctctacctctgtcccagcctccggggcccaccagcccccccagaccacagaaggggagaagagcccagagcccttggggcttccccaaagccagagtgcccaggccctcacgcctcctccgatacccaatggctctgccccggaagggcctgcatccccaggctcccaatagctgcctggtgcggcagcggcggccaaatcttccgtcctcccgtggatctcccggggtgggggcagggcgggtcccacgatggcccccattgccctcatcaccctgacacccccacattctctcctctggacccccaggaggctggtgccagggagacaggcccaacccacccccatttgcactgagaagagaagttttggagcgttgcctcctagaataaagatacagagagtcaaatagagagaatggagagagagaaacatatattatatattatatagagagagggaggagagcgagagagagtgaggacaccgaactgggctggcggctccaaagcacagccttccctgttccgtcccagcgggagctggtgttaggggtcccaaggttgccacccacgtgcccagctgtcccacgctgcagcgcagacggccacgcccacacccggccttttagctcaggtccaccatgggggacggcccagcgtgggtgggggtgccagagggtcccgagtgggggccgtgcctttgcccagaccctgcactttcaaccaggccagtccggctctggggagcaggggcctccccggcaacagccccaggggccttgagggtctgaggtcccagccctgttgccaagtgaccttgtccccagctccctcctcccaggctggtgtgagtgtgcgtgcgtttgtgccgagcttctatttcatattgcaaatataaataaaggaaggcagtttacgattctgctggtcagaccttacgttctgggatgcggggtggggagcctgtattatccctgcaccccagaggctgggggtgctcctgacccagtctgcccccacactgtcctgccagagggagccctgtggctgcagaggccccaggctgggccaggcactggctgtgagggctcctgccaggtctaccccacctgtgggcagggccttgggcagaggatagaagccaccgacaggctcaaatccctgctcctgcccctgcttacccccagtaaccaagcccagcattgaggctgggtactggcgcccagtaggtctgagtctttcaggtagaaggtagaagtgtaggctgcgtgtgcagcgagtggcaccggtgagcggcgctgggaaaccggagcgtgtggaccgggccatgaggacagcgtcctcactggggtggcagttggcttggaggtcacctgggggctcgctcagctaacaggagagggtgcttgttccccgcattcgtggtggtccctcctggtcacccattgaagcagtgtttgtggtggagcccctgagggcttggtggggttgagcagaatgaggaaaggtttcatggagcagggagggagacggctagggcagcaagtgaaggacagactcgccttcccatccctccaggggcactcctgccagccagcccctctcccgcttcccatgatggggtggctgttggaattctgcaccccatctcttctgattgttggggcccaggacaaggggacaggcatttgtgggcctaacctccccaggcagataggaggaggaagccatgtcccagcaggctagggcagagggacccccagtgccaacagtgctttatcagcgggcgccaggcagggccatccccagggtgaggacaacatctccctgggccctgttatcagtcacagagtccacaggacgctccttgggttaacgtgtaaccatgagccctcccctccaccccctgaagccactcgctcccagattaggtcgctctggggctatcaggccagcatggacgctggcaaagcggggcagaccctgaagactcactgctcagcccagcgcccagatgtctgcaggtggctgagccccttcatcctctcctgctgcgtgtacttctgcctctggattcccgaggaccagctgtcctggttcgctgccctggtcaagtgcctgcctgtcctctgcctggctgggttcctgtgggtcatgtccccaagcgggggctacacccagctcctccagggagcccttgtgtgctcggctgtgggggacgcttgcctcatctggccggcagccttcgtccctggcatggccgcctttgccaccgccacctcctctacgtctgggccttcggcttctctcccctgcagcccggctgctgctgctcatcatcctggcccctggccctacctcagccttgtgctccagcacctcgagccggatatggtcctgccggtggcagcctatgggctgatcctgatggccatgctgtggcgcggcctggcccagggcgggagtgccggctggggcgcgctgctcttcacgctctctgatggcgtgctggcctgggacaccttcgcccagcccctgccccatgcccacctggtgatcatgaccacctactatgctgcccagctcctcatcacactgtcagccctcaggagcccggtgcccaagactgactgactagggagcttgaagggccggtgttcaggccctctcctcctgcaaggacctgggcctcccagcccagcccagcctgagaaataccctcagcagcgaagcttcctgacgcctgtctgcaggcgccgctgccgccgtcgcttctggctgaagacgtttgaggacgatttgcggaattccaagtccactactgggttccagctgccttcccccggttctgactccagatccctggctcctcagccaggcccacatggagccctcccagccaccagcctgcctccatgttcactgtcggccccacagcctgcccgccccctgctgctgctctgaatccgttttccctgtgggtgtggaaccgtagatgttgctgttaccgtaggagaggcctcggggagggtcatcattgtgataaaccatcgcggttaatgacagcagaaggttctttgtcgctccccatggaccaggcctggtgcccagtgggaccctccatggccctctggtggggggattcggggggataaagtgaggattgtgcagaactgaaaaaaagg

SEQ ID NO: 300623 - DNA, 3568 bp, Homo sapiens
  misc_feature (47)..(47): n is a, c, g, or t
gagcgggcgcgagtcccgacgccgccccgccctctactcaccgggcnccgcagcaggggccggagccgccggcggcggggcgggggggggcgccccgatgagccccgagtgcgaggagccgccgccccccctcgcagggcgccatgttttggaagtttgacctgcacacaagctcgcacctggacacgctgctggagcgggaggacctgagcctgcccgagctgctggacgaggaagacgtgctgcaggagtgcaaggtcgtcaaccgcaagctgctggacttcctgctgcagccaccccacctgcaagcaatggtggcctgggtcacccaggagccgccagatagcggtgaggagcggctgcgctacaagtaccccagtgtggcctgcgagattctgacctcagatgtgccccagatcaatgatgccctgggtgctgatgagtcccttctgaaccggctctacggcttcctgcagagcaccggcagcctcaacccactgctggccagcttcttcagcaaggtcatgggcatcctcatcaaccgcaagacagaccagctcgtgtcctttcttcggaagaaggatgacttcgtggacctgctgctgcagcacattggcacctcggccatcatggacctcctgctgcgcctgctcacctgtgtggagcggcctcagctgaggcaggatgttgtcaattggctcaacgaggagaagatcgtccagcggctgattgagcagatccacccgtcgaaggatgagaatcaacattccaacgcatcccagtccctgtgtgacatcatccgcctgagccgggagcagatgatccaagtccaggacagcccagagcctgaccaactgctggccaccctggagaagcaggagacgattgagcagctcttaagcaacatgttcgagggggagcagagccagtctgtcatcgtcagtgggatccaggtgctgctgaccctgctggagcccaggaggccgaggtccgagtccgtgaccgtgaacagcttcttcagcagtgtggatgggcagctggagctcctggcccagggggccctggaaagcactgtgtccagtgtgggcgccttgcacgccctacgcccgcggctcagctgcttccaccagctcctgctggagcctcccaagctggagccgctacagatgacatggggcatgctggctccgcctctgggcaacacgcggctgcacgtggtcaagctcctggccagtgccctgagcgccaatgatgcagccctgacgcacgagctcctggcactggacgtgcccaacaccatgctggacctcttcttccattatgtcttcaacaacttcttgcatgcccaagtagagggatgcgtgagcaccatgctgagcttggggccacctcctgacagcagccctgagacgcccatccaaaaccctgttgtgaaacatctgctgcagcagtgccgcctggtggagcggatcctgacgtcctgggaggagaacgaccgtgtacagtgtgcgggaggccctcggaaaggctacatgggtcacctgacaagagtggccggtgccctggtgcagaacacggagaaggggcccaatgcagagcagctgcggcagctgctgaaggagctgcccagcgagcagcaggagcagtgggaagccttcgtatcggggcccctggcggagaccaacaagaagaacatggtggacctggtgaacacccaccacctacactcctccagtgacgatgaggacgaccggctcaaggagttcaacttccctgaggaggctgtgctgcagcaggccttcatggacttccagatgcagcgcatgacctctgccttcattgaccacttcggcttcaatgatgaggagtttggggagcaggaggagagtgtgaacgcaccttttgacaagacagccaacatcaccttctccctcaatgctgacgatgagaaccccaacgccaacctacttgagatatgctacaaggaccgcatccagcagtttgatgatgatgaggaagaggaggacgaggaagaggcccagggctcaggggagtctgatggagaagatggcgcctggcagggcagccagctggccaggggggcccgtctgggccagccacctggtgtccggagtggaggcagcacagacagtgaggacgaagaagaggaggacgaggaggaggaggaagacgaggagggcattggctgtgcagcccgtggaggggccacccctctgtcctaccccagccctggccctcagcctccaggccccagctggacagccacctttgacccagtgcctacagatgccccgaccagcccccgagtctccggggaggaagagctgcacactgggcctccagccccacaggggcccctcagtgtgccccagggcctccccactcagagcctggccagccctcctgcccgtgacgccctgcagctcaggtctcaggaccccacacccccctcagcacctcaggaagccacagaaggcagcaaagtcacggagccctcagccccttgccaggccttggttagcatcggggaccttcaggccaccttccacgggatccgttctgcccccagctcctcggacagtgcaaccagagacccctctacctctgtcccagcctccggggcccaccagcccccccagaccacagaaggggagaagagcccagagcccttggggcttccccaaagccagagtgcccaggccctcacgcctcctccgatacccaatggctctgccccggaagggcctgcatccccaggctcccaatagctgcctggtgcggcagcggcggccaaatcttccgtcctcccgtggatctcccggggtgggggcagggcgggtcccacgatggcccccattgccctcatcaccctgacacccccacattctctcctctggacccccaggaggctggtgccagggagacaggcccaacccacccccatttgcactgagaagagaagttttggagcgttgcctcctagaataaagatacagagagtcaaatagagagaatggagagagagaaacatatattatatattatatagagagagggaggagagcgagagagagtgaggacaccgaactgggctggcggctccaaagcacagccttccctgttccgtcccagcgggagctggtgttaggggtcccaaggttgccacccacgtgcccagctgtcccacgctgcagcgcagacggccacgcccacacccggccttttagctcaggtccaccatgggggacggcccagcgtgggtgggggtgccagagggtcccgagtgggggccgtgcctttgcccagaccctgcactttcaaccaggccagtccggctctggggagcaggggcctccccggcaacagccccaggggccttgagggtctgaggtcccagccctgttgccaagtgaccttgtccccagctccctcctcccaggctggtgtgagtgtgcgtgcgtttgtgccgagcttctatttcatattgcaaatataaataaaggaaggcagtttacgaaaaaaaaaaacaacgaagtgcatccgaccg

SEQ ID NO: 300624 - DNA, 3558 bp, Homo sapiens
  misc_feature (47)..(47): n is a, c, g, or t
gagcgggcgcgagtcccgacgccgccccgccctctactcaccgggcnccgcagcaggggccggagccgccggcggcggggcgggggggggcgccccgatgagccccgagtgcgaggagccgccgccccccctcgcagggcgccatgttttggaagtttgacctgcacacaagctcgcacctggacacgctgctggagcgggaggacctgagcctgcccgagctgctggacgaggaagacgtgctgcaggagtgcaaggtcgtcaaccgcaagctgctggacttcctgctgcagccaccccacctgcaagcaatggtggcctgggtcacccaggagccgccagatagcggtgaggagcggctgcgctacaagtaccccagtgtggcctgcgagattctgacctcagatgtgccccagatcaatgatgccctgggtgctgatgagtcccttctgaaccggctctacggcttcctgcagagcaccggcagcctcaacccactgctggccagcttcttcagcaaggtcatgggcatcctcatcaaccgcaagacagaccagctcgtgtcctttcttcggaagaaggatgacttcgtggacctgctgctgcagcacattggcacctcggccatcatggacctcctgctgcgcctgctcacctgtgtggagcggcctcagctgaggcaggatgttgtcaattggctcaacgaggagaagatcgtccagcggctgattgagcagatccacccgtcgaaggatgagaatcaacattccaacgcatcccagtccctgtgtgacatcatccgcctgagccgggagcagatgatccaagtccaggacagcccagagcctgaccaactgctggccaccctggagaagcaggagacgattgagcagctcttaagcaacatgttcgagggggagcagagccagtctgtcatcgtcagtgggatccaggtgctgctgaccctgctggagcccaggaggccgaggtccgagtccgtgaccgtgaacagcttcttcagcagtgtggatgggcagctggagctcctggcccagggggccctggaaagcactgtgtccagtgtgggcgccttgcacgccctacgcccgcggctcagctgcttccaccagctcctgctggagcctcccaagctggagccgctacagatgacatggggcatgctggctccgcctctgggcaacacgcggctgcacgtggtcaagctcctggccagtgccctgagcgccaatgatgcagccctgacgcacgagctcctggcactggacgtgcccaacaccatgctggacctcttcttccattatgtcttcaacaacttcttgcatgcccaagtagagggatgcgtgagcaccatgctgagcttggggccacctcctgacagcagccctgagacgcccatccaaaaccctgttgtgaaacatctgctgcagcagtgccgcctggtggagcggatcctgacgtcctgggaggagaacgaccgtgtacagtgtgcgggaggccctcggaaaggctacatgggtcacctgacaagagtggccggtgccctggtgcagaacacggagaaggggcccaatgcagagcagctgcggcagctgctgaaggagctgcccagcgagcagcaggagcagtgggaagccttcgtatcggggcccctggcggagaccaacaagaagaacatggtggacctggtgaacacccaccacctacactcctccagtgacgatgaggacgaccggctcaaggagttcaacttccctgaggaggctgtgctgcagcaggccttcatggacttccagatgcagcgcatgacctctgccttcattgaccacttcggcttcaatgatgaggagtttggggagcaggaggagagtgtgaacgcaccttttgacaagacagccaacatcaccttctccctcaatgctgacgatgagaaccccaacgccaacctacttgagatatgctacaaggaccgcatccagcagtttgatgatgatgaggaagaggaggacgaggaagaggcccagggctcaggggagtctgatggagaagatggcgcctggcagggcagccagctggccaggggggcccgtctgggccagccacctggtgtccggagtggaggcagcacagacagtgaggacgaagaagaggaggacgaggaggaggaggaagacgaggagggcattggctgtgcagcccgtggaggggccacccctctgtcctaccccagccctggccctcagcctccaggccccagctggacagccacctttgacccagtgcctacagatgccccgaccagcccccgagtctccggggaggaagagctgcacactgggcctccagccccacaggggcccctcagtgtgccccagggcctccccactcagagcctggccagccctcctgcccgtgacgccctgcagctcaggtctcaggaccccacacccccctcagcacctcaggaagccacagaaggcagcaaagtcacggagccctcagccccttgccaggccttggttagcatcggggaccttcaggccaccttccacgggatccgttctgcccccagctcctcggacagtgcaaccagagacccctctacctctgtcccagcctccggggcccaccagcccccccagaccacagaaggggagaagagcccagagcccttggggcttccccaaagccagagtgcccaggccctcacgcctcctccgatacccaatggctctgccccggaagggcctgcatccccaggctcccaatagctgcctggtgcggcagcggcggccaaatcttccgtcctcccgtggatctcccggggtgggggcagggcgggtcccacgatggcccccattgccctcatcaccctgacacccccacattctctcctctggacccccaggaggctggtgccagggagacaggcccaacccacccccatttgcactgagaagagaagttttggagcgttgcctcctagaataaagatacagagagtcaaatagagagaatggagagagagaaacatatattatatattatatagagagagggaggagagcgagagagagtgaggacaccgaactgggctggcggctccaaagcacagccttccctgttccgtcccagcgggagctggtgttaggggtcccaaggttgccacccacgtgcccagctgtcccacgctgcagcgcagacggccacgcccacacccggccttttagctcaggtccaccatgggggacggcccagcgtgggtgggggtgccagagggtcccgagtgggggccgtgcctttgcccagaccctgcactttcaaccaggccagtccggctctggggagcaggggcctccccggcaacagccccaggggccttgagggtctgaggtcccagccctgttgccaagtgaccttgtccccagctccctcctcccaggctggtgtgagtgtgcgtgcgtttgtgccgagcttctatttcatattgcaaatataaataaaggaaggcagtttacgaaaaaaaaaaaaccacacaac

SEQ ID NO: 300625 - DNA, 3489 bp, Homo sapiens
  misc_feature (47)..(47): n is a, c, g, or t
gagcgggcgcgagtcccgacgccgccccgccctctactcaccgggcnccgcagcaggggccggagccgccggcggcggggcgggggggggcgccccgatgagccccgagtgcgaggagccgccgccccccctcgcagggcgccatgttttggaagtttgacctgcacacaagctcgcacctggacacgctgctggagcgggaggacctgagcctgcccgagctgctggacgaggaagacgtgctgcaggagtgcaaggtcgtcaaccgcaagctgctggacttcctgctgcagccaccccacctgcaagcaatggtggcctgggtcacccaggagccgccagatagcggtgaggagcggctgcgctacaagtaccccagtgtggcctgcgagattctgacctcagatgtgccccagatcaatgatgccctgggtgctgatgagtcccttctgaaccggctctacggcttcctgcagagcaccggcagcctcaacccactgctggccagcttcttcagcaaggtcatgggcatcctcatcaaccgcaagacagaccagctcgtgtcctttcttcggaagaaggatgacttcgtggacctgctgctgcagcacattggcacctcggccatcatggacctcctgctgcgcctgctcacctgtgtggagcggcctcagctgaggcaggatgttgtcaattggctcaacgaggagaagatcgtccagcggctgattgagcagatccacccgtcgaaggatgagaatcaacattccaacgcatcccagtccctgtgtgacatcatccgcctgagccgggagcagatgatccaagtccaggacagcccagagcctgaccaactgctggccaccctggagaagcaggagacgattgagcagctcttaagcaacatgttcgagggggagcagagccagtctgtcatcgtcagtgggatccaggtgctgctgaccctgctggagcccaggaggccgaggtccgagtccgtgaccgtgaacagcttcttcagcagtgtggatgggcagctggagctcctggcccagggggccctggaaagcactgtgtccagtgtgggcgccttgcacgccctacgcccgcggctcagctgcttccaccagctcctgctggagcctcccaagctggagccgctacagatgacatggggcatgctggctccgcctctgggcaacacgcggctgcacgtggtcaagctcctggccagtgccctgagcgccaatgatgcagccctgacgcacgagctcctggcactggacgtgcccaacaccatgctggacctcttcttccattatgtcttcaacaacttcttgcatgcccaagtagagggatgcgtgagcaccatgctgagcttggggccacctcctgacagcagccctgagacgcccatccaaaaccctgttgtgaaacatctgctgcagcagtgccgcctggtggagcggatcctgacgtcctgggaggagaacgaccgtgtacagtgtgcgggaggccctcggaaaggctacatgggtcacctgacaagagtggccggtgccctggtgcagaacacggagaaggggcccaatgcagagcagctgcggcagctgctgaaggagctgcccagcgagcagcaggagcagtgggaagccttcgtatcggggcccctggcggagaccaacaagaagaacatggtggacctggtgaacacccaccacctacactcctccagtgacgatgaggacgaccggctcaaggagttcaacttccctgaggaggctgtgctgcagcaggccttcatggacttccagatgcagcgcatgacctctgccttcattgaccacttcggcttcaatgatgaggagtttggggagcaggaggagagtgtgaacgcaccttttgacaagacagccaacatcaccttctccctcaatgctgacgatgagaaccccaacgccaacctacttgagatatgctacaaggaccgcatccagcagtttgatgatgatgaggaagaggaggacgaggaagaggcccagggctcaggggagtctgatggagaagatggcgcctggcagggcagccagctggccaggggggcccgtctgggccagccacctggtgtccggagtggaggcagcacagacagtgaggacgaagaagaggaggacgaggaggaggaggaagacgaggagggcattggctgtgcagcccgtggaggggccacccctctgtcctaccccagccctggccctcagcctccaggccccagctggacagccacctttgacccagtgcctacagatgccccgaccagcccccgagtctccggggaggaagagctgcacactgggcctccagccccacaggggcccctcagtgtgccccagggcctccccactcagagcctggccagccctcctgcccgtgacgccctgcagctcaggtctcaggaccccacacccccctcagcacctcaggaagccacagaaggcagcaaagtcacggagccctcagccccttgccaggccttggttagcatcggggaccttcaggccaccttccacgggatccgttctgcccccagctcctcggacagtgcaaccagagacccctctacctctgtcccagcctccggggcccaccagcccccccagaccacagaaggggagaagagcccagagcccttggggcttccccaaagccagagtgcccaggccctcacgcctcctccgatacccaatggctctgccccggaagggcctgcatccccaggctcccaatagctgcctggtgcggcagcggcggccaaatcttccgtcctcccgtggatctcccggggtgggggcagggcgggtcccacgatggcccccattgccctcatcaccctgacacccccacattctctcctctggacccccaggaggctggtgccagggagacaggcccaacccacccccatttgcactgagaagagaagttttggagcgttgcctcctagaataaagatacagagagtcaaatagagagaatggagagagagaaacatatattatatattatatagagagagggaggagagcgagagagagtgaggacaccgaactgggctggcggctccaaagcacagccttccctgttccgtcccagcgggagctggtgttaggggtcccaaggttgccacccacgtgcccagctgtcccacgctgcagcgcagacggccacgcccacacccggccttttagctcaggtccaccatgggggacggcccagcgtgggtgggggtgccagagggtcccgagtgggggccgtgcctttgcccagaccctgcactttcaaccaggccttgagggtctgaggtcccagccctgttgccaagtgaccttgtccccagctccctcctcccaggctggtgtgagtgtgcgtgcgtttgtgccgagcttctatttcatattgcaaatataaataaaggaaggcagtttacga

SEQ ID NO: 300626 - DNA, 3460 bp, Homo sapiens
  misc_feature (47)..(47): n is a, c, g, or t
gagcgggcgcgagtcccgacgccgccccgccctctactcaccgggcnccgcagcaggggccggagccgccggcggcggggcgggggggggcgccccgatgagccccgagtgcgaggagccgccgccccccctcgcagggcgccatgttttggaagtttgacctgcacacaagctcgcacctggacacgctgctggagcgggaggacctgagcctgcccgagctgctggacgaggaagacgtgctgcaggagtgcaaggtcgtcaaccgcaagctgctggacttcctgctgcagccaccccacctgcaagcaatggtggcctgggtcacccaggagccgccagatagcggtgaggagcggctgcgctacaagtaccccagtgtggcctgcgagattctgacctcagatgtgccccagatcaatgatgccctgggtgctgatgagtcccttctgaaccggctctacggcttcctgcagagcaccggcagcctcaacccactgctggccagcttcttcagcaaggtcatgggcatcctcatcaaccgcaagacagaccagctcgtgtcctttcttcggaagaaggatgacttcgtggacctgctgctgcagcacattggcacctcggccatcatggacctcctgctgcgcctgctcacctgtgtggagcggcctcagctgaggcaggatgttgtcaattggctcaacgaggagaagatcgtccagcggctgattgagcagatccacccgtcgaaggatgagaatcaacattccaacgcatcccagtccctgtgtgacatcatccgcctgagccgggagcagatgatccaagtccaggacagcccagagcctgaccaactgctggccaccctggagaagcaggagacgattgagcagctcttaagcaacatgttcgagggggagcagagccagtctgtcatcgtcagtgggatccaggtgctgctgaccctgctggagcccaggaggccgaggtccgagtccgtgaccgtgaacagcttcttcagcagtgtggatgggcagctggagctcctggcccagggggccctggaaagcactgtgtccagtgtgggcgccttgcacgccctacgcccgcggctcagctgcttccaccagctcctgctggagcctcccaagctggagccgctacagatgacatggggcatgctggctccgcctctgggcaacacgcggctgcacgtggtcaagctcctggccagtgccctgagcgccaatgatgcagccctgacgcacgagctcctggcactggacgtgcccaacaccatgctggacctcttcttccattatgtcttcaacaacttcttgcatgcccaagtagagggatgcgtgagcaccatgctgagcttggggccacctcctgacagcagccctgagacgcccatccaaaaccctgttgtgaaacatctgctgcagcagtgccgcctggtggagcggatcctgacgtcctgggaggagaacgaccgtgtacagtgtgcgggaggccctcggaaaggctacatgggtcacctgacaagagtggccggtgccctggtgcagaacacggagaaggggcccaatgcagagcagctgcggcagctgctgaaggagctgcccagcgagcagcaggagcagtgggaagccttcgtatcggggcccctggcggagaccaacaagaagaacatggtggacctggtgaacacccaccacctacactcctccagtgacgatgaggacgaccggctcaaggagttcaacttccctgaggaggctgtgctgcagcaggccttcatggacttccagatgcagcgcatgacctctgccttcattgaccacttcggcttcaatgatgaggagtttggggagcaggaggagagtgtgaacgcaccttttgacaagacagccaacatcaccttctccctcaatgctgacgatgagaaccccaacgccaacctacttgagatatgctacaaggaccgcatccagcagtttgatgatgatgaggaagaggaggacgaggaagaggcccagggctcaggggagtctgatggagaagatggcgcctggcagggcagccagctggccaggggggcccgtctgggccagccacctggtgtccggagtggaggcagcacagacagtgaggacgaagaagaggaggacgaggaggaggaggaagacgaggagggcattggctgtgcagcccgtggaggggccacccctctgtcctaccccagccctggccctcagcctccaggccccagctggacagccacctttgacccagtgcctacagatgccccgaccagcccccgagtctccggggaggaagagctgcacactgggcctccagccccacaggggcccctcagtgtgccccagggcctccccactcagagcctggccagccctcctgcccgtgacgccctgcagctcaggtctcaggaccccacacccccctcagcacctcaggaagccacagaaggcagcaaagtcacggagccctcagccccttgccaggccttggttagcatcggggaccttcaggccaccttccacgggatccgttctgcccccagctcctcggacagtgcaaccagagacccctctacctctgtcccagcctccggggcccaccagcccccccagaccacagaaggggagaagagcccagagcccttggggcttccccaaagccagagtgcccaggccctcacgcctcctccgatacccaatggctctgccccggaagggcctgcatccccaggctcccaatagctgcctggtgcggcagcggcggccaaatcttccgtcctcccgtggatctcccggggtgggggcagggcgggtcccacgatggcccccattgccctcatcaccctgacacccccacattctctcctctggacccccaggaggctggtgccagggagacaggcccaacccacccccatttgcactgagaagagaagttttggagcgttgcctcctagaataaagatacagagagtcaaatagagagaatggagagagagaaacatatattatatattatatagagagagggaggagagcgagagagagtgaggacaccgaactgggctggcggctccaaagcacagccttccctgttccgtcccagcgggagctggtgttaggggtcccaaggttgccacccacgtgcccacgtgggtgggggtgccagagggtcccgagtgggggccgtgcctttgcccagaccctgcactttcaaccaggccagtccggctctggggagcaggggcctccccggcaacagccccaggggccttgagggtctgaggtcccagccctgttgccaagtgaccttgtccccagctccctcctcccaggctggtgtgagtgtgcgtgcgtttgtgccgagcttctatttcatattgcaaatataaataaaggaaggcagtttacga

SEQ ID NO: 300627 - DNA, 3355 bp, Homo sapiens
  misc_feature (47)..(47): n is a, c, g, or t
gagcgggcgcgagtcccgacgccgccccgccctctactcaccgggcnccgcagcaggggccggagccgccggcggcggggcgggggggggcgccccgatgagccccgagtgcgaggagccgccgccccccctcgcagggcgccatgttttggaagtttgacctgcacacaagctcgcacctggacacgctgctggagcgggaggacctgagcctgcccgagctgctggacgaggaagacgtgctgcaggagtgcaaggtcgtcaaccgcaagctgctggacttcctgctgcagccaccccacctgcaagcaatggtggcctgggtcacccaggagccgccagatagcggtgaggagcggctgcgctacaagtaccccagtgtggcctgcgagattctgacctcagatgtgccccagatcaatgatgccctgggtgctgatgagtcccttctgaaccggctctacggcttcctgcagagcaccggcagcctcaacccactgctggccagcttcttcagcaaggtcatgggcatcctcatcaaccgcaagacagaccagctcgtgtcctttcttcggaagaaggatgacttcgtggacctgctgctgcagcacattggcacctcggccatcatggacctcctgctgcgcctgctcacctgtgtggagcggcctcagctgaggcaggatgttgtcaattggctcaacgaggagaagatcgtccagcggctgattgagcagatccacccgtcgaaggatgagaatcaacattccaacgcatcccagtccctgtgtgacatcatccgcctgagccgggagcagatgatccaagtccaggacagcccagagcctgaccaactgctggccaccctggagaagcaggagacgattgagcagctcttaagcaacatgttcgagggggagcagagccagtctgtcatcgtcagtgggatccaggtgctgctgaccctgctggagcccaggaggccgaggtccgagtccgtgaccgtgaacagcttcttcagcagtgtggatgggcagctggagctcctggcccagggggccctggaaagcactgtgtccagtgtgggcgccttgcacgccctacgcccgcggctcagctgcttccaccagctcctgctggagcctcccaagctggagccgctacagatgacatggggcatgctggctccgcctctgggcaacacgcggctgcacgtggtcaagctcctggccagtgccctgagcgccaatgatgcagccctgacgcacgagctcctggcactggacgtgcccaacaccatgctggacctcttcttccattatgtcttcaacaacttcttgcatgcccaagtagagggatgcgtgagcaccatgctgagcttggggccacctcctgacagcagccctgagacgcccatccaaaaccctgttgtgaaacatctgctgcagcagtgccgcctggtggagcggatcctgacgtcctgggaggagaacgaccgtgtacagtgtgcgggaggccctcggaaaggctacatgggtcacctgacaagagtggccggtgccctggtgcagaacacggagaaggggcccaatgcagagcagctgcggcagctgctgaaggagctgcccagcgagcagcaggagcagtgggaagccttcgtatcggggcccctggcggagaccaacaagaagaacatggtggacctggtgaacacccaccacctacactcctccagtgacgatgaggacgaccggctcaaggagttcaacttccctgaggaggctgtgctgcagcaggccttcatggacttccagatgcagcgcatgacctctgccttcattgaccacttcggcttcaatgatgaggagtttggggagcaggaggagagtgtgaacgcaccttttgacaagacagccaacatcaccttctccctcaatgctgacgatgagaaccccaacgccaacctacttgagatatgctacaaggaccgcatccagcagtttgatgatgatgaggaagaggaggacgaggaagaggcccagggctcaggggagtctgatggagaagatggcgcctggcagggcagccagctggccaggggggcccgtctgggccagccacctggtgtccggagtggaggcagcacagacagtgaggacgaagaagaggaggacgaggaggaggaggaagacgaggagggcattggctgtgcagcccgtggaggggccacccctctgtcctaccccagccctggccctcagcctccaggccccagctggacagccacctttgacccagtgcctacagatgccccgaccagcccccgagtctccggggaggaagagctgcacactgggcctccagccccacaggggcccctcagtgtgccccagggcctccccactcagagcctggccagccctcctgcccgtgacgccctgcagctcaggtctcaggaccccacacccccctcagcacctcaggaagccacagaaggcagcaaagtcacggagccctcagccccttgccaggccttggttagcatcggggaccttcaggccaccttccacgggatccgttctgcccccagctcctcggacagtgcaaccagagacccctctacctctgtcccagcctccggggcccaccagcccccccagaccacagaaggggagaagagcccagagcccttggggcttccccaaagccagagtgcccaggccctcacgcctcctccgatacccaatggctctgccccggaagggcctgcatccccaggctcccaatagctgcctggtgcggcagcggcggccaaatcttccgtcctcccgtggatctcccggggtgggggcagggcgggtcccacgatggcccccattgccctcatcaccctgacacccccacattctctcctctggacccccaggaggctggtgccagggagacaggcccaacccacccccatttgcactgagaagagaagttttggagcgttgcctcctagaataaagatacagagagtcaaatagagagaatggagagagagaaacatatattatatattatatagagagagggaggagagcgagagagagtgaggacaccgaactgggctggcggctccaaagcacagccttccctgttccgtcccagcgggagctggtgttaggggtcccaaggttgccacccacgtgcccagctgtcccacgctgcagcgcagacggccacgcccacaccctgttgccaagtgaccttgtccccagctccctcctcccaggctggtgtgagtgtgcgtgcgtttgtgccgagcttctatttcatattgcaaatataaataaaggaaggcagtttacga

SEQ ID NO: 300628 - DNA, 2259 bp, Homo sapiens
ggttgctgtcataccagtgctggacctgttcttccacatatgtcttggacttgggaaaatcgctgcgcgagtagagggatgcgtgagcaccatgctgagcttggggccacctcctgacagcagccctgagacgcccatccaaaaccctgttgtgaaacatctgctgcagcagtgccgcctggtggagcggatcctgacgtcctgggaggagaacgaccgtgtacagtgtgcgggaggccctcggaaaggctacatgggtcacctgacaagagtggccggtgccctggtgcagaacacggagaaggggcccaatgcagagcagctgcggcagctgctgaaggagctgcccagcgagcagcaggagcagtgggaagccttcgtatcggggcccctggcggagaccaacaagaagaacatggtggacctggtgaacacccaccacctacactcctccagtgacgatgaggacgaccggctcaaggagttcaacttccctgaggaggctgtgctgcagcaggccttcatggacttccagatgcagcgcatgacctctgccttcattgaccacttcggcttcaatgatgaggagtttggggagcaggaggagagtgtgaacgcaccttttgacaagacagccaacatcaccttctccctcaatgctgacgatgagaaccccaacgccaacctacttgagatatgctacaaggaccgcatccagcagtttgatgatgatgaggaagaggaggacgaggaagaggcccagggctcaggggagtctgatggagaagatggcgcctggcagggcagccagctggccaggggggcccgtctgggccagccacctggtgtccggagtggaggcagcacagacagtgaggacgaagaagaggaggacgaggaggaggaggaagacgaggagggcattggctgtgcagcccgtggaggggccacccctctgtcctaccccagccctggccctcagcctccaggccccagctggacagccacctttgacccagtgcctacagatgccccgaccagcccccgagtctccggggaggaagagctgcacactgggcctccagccccacaggggcccctcagtgtgccccagggcctccccactcagagcctggccagccctcctgcccgtgacgccctgcagctcaggtctcaggaccccacacccccctcagcacctcaggaagccacagaaggcagcaaagtcacggagccctcagccccttgccaggccttggttagcatcggggaccttcaggccaccttccacgggatccgttctgcccccagctcctcggacagtgcaaccagagacccctctacctctgtcccagcctccggggcccaccagcccccccagaccacagaaggggagaagagcccagagcccttggggcttccccaaagccagagtgcccaggccctcacgcctcctccgatacccaatggctctgccccggaagggcctgcatccccaggctcccaatagctgcctggtgcggcagcggcggccaaatcttccgtcctcccgtggatctcccggggtgggggcagggcgggtcccacgatggcccccattgccctcatcaccctgacacccccacattctctcctctggacccccaggaggctggtgccagggagacaggcccaacccacccccatttgcactgagaagagaagttttggagcgttgcctcctagaataaagatacagagagtcaaatagagagaatggagagagagaaacatatattatatattatatagagagagggaggagagcgagagagagtgaggacaccgaactgggctggcggctccaaagcacagccttccctgttccgtcccagcgggagctggtgttaggggtcccaaggttgccacccacgtgcccagctgtcccacgctgcagcgcagacggccacgcccacacccggccttttagctcaggtccaccatgggggacggcccagcgtgggtgggggtgccagagggtcccgagtgggggccgtgcctttgcccagaccctgcactttcaaccaggccagtccggctctggggagcaggggcctccccggcaacagccccaggggccttgagggtctgaggtcccagccctgttgccaagtgaccttgtccccagctccctcctcccaggctggtgtgagtgtgcgtgcgtttgtgccgagcttctatttcatattgcaaatataaataaaggaaggcagtttacga

SEQ ID NO: 300629 - DNA, 3441 bp, Homo sapiens
  misc_feature (47)..(47): n is a, c, g, or t
gagcgggcgcgagtcccgacgccgccccgccctctactcaccgggcnccgcagcaggggccggagccgccggcggcggggcgggggggggcgccccgatgagccccgagtgcgaggagccgccgccccccctcgcagggcgccatgttttggaagtttgacctgcacacaagctcgcacctggacacgctgctggagcgggaggacctgagcctgcccgagctgctggacgaggaagacgtgctgcaggagtgcaaggtcgtcaaccgcaagctgctggacttcctgctgcagccaccccacctgcaagcaatggtggcctgggtcacccaggagccgccagatagcggtgaggagcggctgcgctacaagtaccccagtgtggcctgcgagattctgacctcagatgtgccccagatcaatgatgccctgggtgctgatgagtcccttctgaaccggctctacggcttcctgcagagcaccggcagcctcaacccactgctggccagcttcttcagcaaggtcatgggcatcctcatcaaccgcaagacagaccagctcgtgtcctttcttcggaagaaggatgacttcgtggacctgctgctgcagcacattggcacctcggccatcatggacctcctgctgcgcctgctcacctgtgtggagcggcctcagctgaggcaggatgttgtcaattggctcaacgaggagaagatcgtccagcggctgattgagcagatccacccgtcgaaggatgagaatcaacattccaacgcatcccagtccctgtgtgacatcatccgcctgagccgggagcagatgatccaagtccaggacagcccagagcctgaccaactgctggccaccctggagaagcaggagacgattgagcagctcttaagcaacatgttcgagggggagcagagccagtctgtcatcgtcagtgggatccaggtgctgctgaccctgctggagcccaggaggccgaggtccgagtccgtgaccgtgaacagcttcttcagcagtgtggatgggcagctggagctcctggcccagggggccctggaaagcactgtgtccagtgtgggcgccttgcacgccctacgcccgcggctcagctgcttccaccagctcctgctggagcctcccaagctggagccgctacagatgacatggggcatgctggctccgcctctgggcaacacgcggctgcacgtggtcaagctcctggccagtgccctgagcgccaatgatgcagccctgacgcacgagctcctggcactggacgtgcccaacaccatgctggacctcttcttccattatgtcttcaacaacttcttgcatgcccaagtagagggatgcgtgagcaccatgctgagcttggggccacctcctgacagcagccctgagacgcccatccaaaaccctgttgtgaaacatctgctgcagcagtgccgcctggtggagcggatcctgacgtcctgggaggagaacgaccgtgtacagtgtgcgggaggccctcggaaaggctacatgggtcacctgacaagagtggccggtgccctggtgcagaacacggagaaggggcccaatgcagagcagctgcggcagctgctgaaggagctgcccagcgagcagcaggagcagtgggaagccttcgtatcggggcccctggcggagaccaacaagaagaacatggtggacctggtgaacacccaccacctacactcctccagtgacgatgaggacgaccggctcaaggagttcaacttccctgaggaggctgtgctgcagcaggccttcatggacttccagatgcagcgcatgacctctgccttcattgaccacttcggcttcaatgatgaggagtttggggagcaggaggagagtgtgaacgcaccttttgacaagacagccaacatcaccttctccctcaatgctgacgatgagaaccccaacgccaacctacttgagatatgctacaaggaccgcatccagcagtttgatgatgatgaggaagaggaggacgaggaagaggcccagggctcaggggagtctgatggagaagatggcgcctggcagggcagccagctggccaggggggcccgtctgggccagccacctggtgtccgagtggaggcagcacagacagccctggccctcagcctccaggccccagctggacagccacctttgacccagtgcctacagatgccccgaccagcccccgagtctccggggaggaagagctgcacactgggcctccagccccacaggggcccctcagtgtgccccagggcctccccactcagagcctggccagccctcctgcccgtgacgccctgcagctcaggtctcaggaccccacacccccctcagcacctcaggaagccacagaaggcagcaaagtcacggagccctcagccccttgccaggccttggttagcatcggggaccttcaggccaccttccacgggatccgttctgcccccagctcctcggacagtgcaaccagagacccctctacctctgtcccagcctccggggcccaccagcccccccagaccacagaaggggagaagagcccagagcccttggggcttccccaaagccagagtgcccaggccctcacgcctcctccgatacccaatggctctgccccggaagggcctgcatccccaggctcccaatagctgcctggtgcggcagcggcggccaaatcttccgtcctcccgtggatctcccggggtgggggcagggcgggtcccacgatggcccccattgccctcatcaccctgacacccccacattctctcctctggacccccaggaggctggtgccagggagacaggcccaacccacccccatttgcactgagaagagaagttttggagcgttgcctcctagaataaagatacagagagtcaaatagagagaatggagagagagaaacatatattatatattatatagagagagggaggagagcgagagagagtgaggacaccgaactgggctggcggctccaaagcacagccttccctgttccgtcccagcgggagctggtgttaggggtcccaaggttgccacccacgtgcccagctgtcccacgctgcagcgcagacggccacgcccacacccggccttttagctcaggtccaccatgggggacggcccagcgtgggtgggggtgccagagggtcccgagtgggggccgtgcctttgcccagaccctgcactttcaaccaggccagtccggctctggggagcaggggcctccccggcaacagccccaggggccttgagggtctgaggtcccagccctgttgccaagtgaccttgtccccagctccctcctcccaggctggtgtgagtgtgcgtgcgtttgtgccgagcttctatttcatattgcaaatataaataaaggaaggcagtttacga

SEQ ID NO: 300630 - DNA, 3105 bp, Homo sapiens
  misc_feature (47)..(47): n is a, c, g, or t
gagcgggcgcgagtcccgacgccgccccgccctctactcaccgggcnccgcagcaggggccggagccgccggcggcggggcgggggggggcgccccgatgagccccgagtgcgaggagccgccgccccccctcgcagggcgccatgttttggaagtttgacctgcacacaagctcgcacctggacacgctgctggagcgggaggacctgagcctgcccgagctgctggacgaggaagacgtgctgcaggagtgcaaggtcgtcaaccgcaagctgctggacttcctgctgcagccaccccacctgcaagcaatggtggcctgggtcacccaggagccgccagatagcggtgaggagcggctgcgctacaagtaccccagtgtggcctgcgagattctgacctcagatgtgccccagatcaatgatgccctgggtgctgatgagtcccttctgaaccggctctacggcttcctgcagagcaccggcagcctcaacccactgctggccagcttcttcagcaaggtcatgggcatcctcatcaaccgcaagacagaccagctcgtgtcctttcttcggaagaaggatgacttcgtggacctgctgctgcagcacattggcacctcggccatcatggacctcctgctgcgcctgctcacctgtgtggagcggcctcagctgaggcaggatgttgtcaattggctcaacgaggagaagatcgtccagcggctgattgagcagatccacccgtcgaaggatgagaatcaacattccaacgcatcccagtccctgtgtgacatcatccgcctgagccgggagcagatgatccaagtccaggacagcccagagcctgaccaactgctggccaccctggagaagcaggagacgattgagcagctcttaagcaacatgttcgagggggagcagagccagtctgtcatcgtcagtgggatccaggtgctgctgaccctgctggagcccaggaggccgaggtccgagtccgtgaccgtgaacagcttcttcagcagtgtggatgggcagctggagctcctggcccagggggccctggaaagcactgtgtccagtgtgggcgccttgcacgccctacgcccgcggctcagctgcttccaccagctcctgctggagcctcccaagctggagccgctacagatgacatggggcatgctggctccgcctctgggcaacacgcggctgcacgtggtcaagctcctggccagtgccctgagcgccaatgatgcagccctgacgcacgagctcctggcactggacgtgcccaacaccatgctggacctcttcttccattatgtcttcaacaacttcttgcatgcccaagtagagggatgcgtgagcaccatgctgagcttggggccacctcctgacagcagccctgagacgcccatccaaaaccctgttgtgaaacatctgctgcagcagtgccgcctggtggagcggatcctgacgtcctgggaggagaacgaccgtgtacagtgtgcgggaggccctcggaaaggctacatgggtcacctgacaagagtggccggtgccctggtgcagaacacggagaaggggcccaatgcagagcagctgcggcagctgctgaaggagctgcccagcgagcagcaggagcagtgggaagccttcgtatcggggcccctggcggagaccaacaagaagaacatggtggacctggtgaacacccaccacctacactcctccagtgacgatgaggacgaccggctcaaggagttcaacttccctgaggaggctgtgctgcagcaggccttcatggacttccagatgcagcgcatgacctctgccttcattgaccacttcggcttcaatgatgaggagtttggggagcaggaggagagtgtgaacgcaccttttgacaagacagccaacatcaccttctccctcaatgctgacgatgagaaccccaacgccaacctacttgagatatgctacaaggaccgcatccagcagtttgatgatgatgaggaagaggaggacgaggaagaggcccagggctcaggggagtctgatggagaagatggcgcctggcagggcagccagctggccaggggggcccgtctgggccagccacctggtgtccggagtggaggcagcacagacagtgaggacgaagaagaggaggacgaggaggaggaggaagacgaggagggcattggctgtgcagcccgtggaggggccacccctctgtcctaccccagccctggccctcagcctccaggccccagctggacagccacctttgacccagtgcctacagatgccccgaccagcccccgagtctccggggaggaagagctgcacactgggcctccagccccacaggggcccctcagtgtgccccagggcctccccactcagagcctggccagccctcctgcccgtgacgccctgcagctcaggtctcaggaccccacacccccctcagcacctcaggaagccacagaaggctggtgccagggagacaggcccaacccacccccatttgcactgagaagagaagttttggagcgttgcctcctagaataaagatacagagagtcaaatagagagaatggagagagagaaacatatattatatattatatagagagagggaggagagcgagagagagtgaggacaccgaactgggctggcggctccaaagcacagccttccctgttccgtcccagcgggagctggtgttaggggtcccaaggttgccacccacgtgcccagctgtcccacgctgcagcgcagacggccacgcccacacccggccttttagctcaggtccaccatgggggacggcccagcgtgggtgggggtgccagagggtcccgagtgggggccgtgcctttgcccagaccctgcactttcaaccaggccagtccggctctggggagcaggggcctccccggcaacagccccaggggccttgagggtctgaggtcccagccctgttgccaagtgaccttgtccccagctccctcctcccaggctggtgtgagtgtgcgtgcgtttgtgccgagcttctatttcatattgcaaatataaataaaggaaggcagtttacga

SEQ ID NO: 300631 - DNA, 1671 bp, Homo sapiens
ctcaccatgccttgccttctctcctagcgcaccttttgacaagacagccaacatcaccttctccctcaatgctgacgatgagaaccccaacgccaacctacttgagatatgctacaaggaccgcatccagcagtttgatgatgatgaggaagaggaggacgaggaagaggcccagggctcaggggagtctgatggagaagatggcgcctggcagggcagccagctggccaggggggcccgtctgggccagccacctggtgtccggagtggaggcagcacagacagtgaggacgaagaagaggaggacgaggaggaggaggaagacgaggagggcattggctgtgcagcccgtggaggggccacccctctgtcctaccccagccctggccctcagcctccaggccccagctggacagccacctttgacccagtgcctacagatgccccgaccagcccccgagtctccggggaggaagagctgcacactgggcctccagccccacaggggcccctcagtgtgccccagggcctccccactcagagcctggccagccctcctgcccgtgacgccctgcagctcaggtctcaggaccccacacccccctcagcacctcaggaagccacagaaggcagcaaagtcacggagccctcagccccttgccaggccttggttagcatcggggaccttcaggccaccttccacgggatccgttctgcccccagctcctcggacagtgcaaccagagacccctctacctctgtcccagcctccggggcccaccagcccccccagaccacagaaggggagaagagcccagagcccttggggcttccccaaagccagagtgcccaggccctcacgcctcctccgatacccaatggctctgccccggaagggcctgcatccccaggctcccaatagctgcctggtgcggcagcggcggccaaatcttccgtcctcccgtggatctcccggggtgggggcagggcgggtcccacgatggcccccattgccctcatcaccctgacacccccacattctctcctctggacccccaggaggctggtgccagggagacaggcccaacccacccccatttgcactgagaagagaagttttggagcgttgcctcctagaataaagatacagagagtcaaatagagagaatggagagagagaaacatatattatatattatatagagagagggaggagagcgagagagagtgaggacaccgaactgggctggcggctccaaagcacagccttccctgttccgtcccagcgggagctggtgttaggggtcccaaggttgccacccacgtgcccagctgtcccacgctgcagcgcagacggccacgcccacacccggccttttagctcaggtccaccatgggggacggcccagcgtgggtgggggtgccagagggtcccgagtgggggccgtgcctttgcccagaccctgcactttcaaccaggccagtccggctctggggagcaggggcctccccggcaacagccccaggggccttgagggtctgaggtcccagccctgttgccaagtgaccttgtccccagctccctcctcccaggctggtgtgagtgtgcgtgcgtttgtgccgagcttctatttcatattgcaaatataaataaaggaaggcagtttacga

SEQ ID NO: 300632 - DNA, 2461 bp, Homo sapiens
  misc_feature (47)..(47): n is a, c, g, or t
gagcgggcgcgagtcccgacgccgccccgccctctactcaccgggcnccgcagcaggggccggagccgccggcggcggggcgggggggggcgccccgatgagccccgagtgcgaggagccgccgccccccctcgcagggcgccatgttttggaagtttgacctgcacacaagctcgcacctggacacgctgctggagcgggaggacctgagcctgcccgagctgctggacgaggaagacgtgctgcaggagtgcaaggtcgtcaaccgcaagctgctggacttcctgctgcagccaccccacctgcaagcaatggtggcctgggtcacccaggagccgccagatagcggtgaggagcggctgcgctacaagtaccccagtgtggcctgcgagattctgacctcagatgtgccccagatcaatgatgccctgggtgctgatgagtcccttctgaaccggctctacggcttcctgcagagcaccggcagcctcaacccactgctggccagcttcttcagcaaggtcatgggcatcctcatcaaccgcaagacagaccagctcgtgtcctttcttcggaagaaggatgacttcgtggacctgctgctgcagcacattggcacctcggccatcatggacctcctgctgcgcctgctcacctgtgtggagcggcctcagctgaggcaggatgttgtcaattggctcaacgaggagaagatcgtccagcggctgattgagcagatccacccgtcgaaggatgagaatcaacattccaacgcatcccagtccctgtgtgacatcatccgcctgagccgggagcagatgatccaagtccaggacagcccagagcctgaccaactgctggccaccctggagaagcaggagacgattgagcagctcttaagcaacatgttcgagggggagcagagccagtctgtcatcgtcagtgggatccaggtgctgctgaccctgctggagcccaggaggccgaggtccgagtccgtgaccgtgaacagcttcttcagcagtgtggatgggcagctggagctcctggcccagggggccctggaaagcactgtgtccagtgtgggcgccttgcacgccctacgcccgcggctcagctgcttccaccagctcctgctggagcctcccaagctggagccgctacagatgacatggggcatgctggctccgcctctgggcaacacgcggctgcacgtggtcaagctcctggccagtgccctgagcgccaatgatgcagccctgacgcacgagctcctggcactggacgtgcccaacaccatgctggacctcttcttccattatgtcttcaacaacttcttgcatgcccaagtagagggatgcgtgagcaccatgctgagcttggggccacctcctgacagcagccctgagacgcccatccaaaaccctgttgtgaaacatctgctgcagcagtgccgcctggtggagcggatcctgacgtcctgggaggagaacgaccgtgtacagtgtgcgggaggccctcggaaaggctacatgggtcacctgacaagagtggccggtgccctggtgcagaacacggagaaggggcccaatgcagagcagctgcggcagctgctgaaggagctgcccagcgagcagcaggagcagtgggaagccttcgtatcggggcccctggcggagaccaacaagaagaacatggtggacctggtgaacacccaccacctacactcctccagtgacgatgaggacgaccggctcaaggagttcaacttccctgaggaggctgtgctgcagcaggccttcatggacttccagatgcagcgcatgacctctgccttcattgaccacttcggcttcaatgatgaggagtttggggagcaggaggagagtgtgaacgcaccttttgacaagacagccaacatcaccttctccctcaatgctgacgatgagaaccccaacgccaacctacttgagatatgctacaaggaccgcatccagcagtttgatgatgatgaggaagaggaggacgaggaagaggcccagggctcaggggagtctgatggagaagatggcgcctggcagggcagccagctggccaggggggcccgtctgggccagccacctggtgtccggtgagtccccctccagtttcccttctccaagcttccaccacacggcagggccaaggggtccccccaacacatttggactgaggctgaagtgaatgaagaaaataaggaacctgcattggtgtgtgtattagttgggggcactttcacttttgagtgatagaaatctaattcaaggccaagcatggtgggctcatgtaatccctgagtgcctgtaatcccagtactttgggaggccagggcagatggattgcttgagctcaggagtttgagaccagccctgggcaacatagggagatcctgtctctacaaaaaatacaaaagttagatggg

SEQ ID NO: 300633 - DNA, 2209 bp, Homo sapiens
  misc_feature (47)..(47): n is a, c, g, or t
gagcgggcgcgagtcccgacgccgccccgccctctactcaccgggcnccgcagcaggggccggagccgccggcggcggggcgggggggggcgccccgatgagccccgagtgcgaggagccgccgccccccctcgcagggcgccatgttttggaagtttgacctgcacacaagctcgcacctggacacgctgctggagcgggaggacctgagcctgcccgagctgctggacgaggaagacgtgctgcaggagtgcaaggtcgtcaaccgcaagctgctggacttcctgctgcagccaccccacctgcaagcaatggtggcctgggtcacccaggagccgccagatagcggtgaggagcggctgcgctacaagtaccccagtgtggcctgcgagattctgacctcagatgtgccccagatcaatgatgccctgggtgctgatgagtcccttctgaaccggctctacggcttcctgcagagcaccggcagcctcaacccactgctggccagcttcttcagcaaggtcatgggcatcctcatcaaccgcaagacagaccagctcgtgtcctttcttcggaagaaggatgacttcgtggacctgctgctgcagcacattggcacctcggccatcatggacctcctgctgcgcctgctcacctgtgtggagcggcctcagctgaggcaggatgttgtcaattggctcaacgaggagaagatcgtccagcggctgattgagcagatccacccgtcgaaggatgagaatcaacattccaacgcatcccagtccctgtgtgacatcatccgcctgagccgggagcagatgatccaagtccaggacagcccagagcctgaccaactgctggccaccctggagaagcaggagacgattgagcagctcttaagcaacatgttcgagggggagcagagccagtctgtcatcgtcagtgggatccaggtgctgctgaccctgctggagcccaggaggccgaggtccgagtccgtgaccgtgaacagcttcttcagcagtgtggatgggcagctggagctcctggcccagggggccctggaaagcactgtgtccagtgtgggcgccttgcacgccctacgcccgcggctcagctgcttccaccagctcctgctggagcctcccaagctggagccgctacagatgacatggggcatgctggctccgcctctgggcaacacgcggctgcacgtggtcaagctcctggccagtgccctgagcgccaatgatgcagccctgacgcacgagctcctggcactggacgtgcccaacaccatgctggacctcttcttccattatgtcttcaacaacttcttgcatgcccaagtagagggatgcgtgagcaccatgctgagcttggggccacctcctgacagcagccctgagacgcccatccaaaaccctgttgtgaaacatctgctgcagcagtgccgcctggtggagcggatcctgacgtcctgggaggagaacgaccgtgtacagtgtgcgggaggccctcggaaaggctacatgggtcacctgacaagagtggccggtgccctggtgcagaacacggagaaggggcccaatgcagagcagctgcggcagctgctgaaggagctgcccagcgagcagcaggagcagtgggaagccttcgtatcggggcccctggcggagaccaacaagaagaacatggtggacctggtgaacacccaccacctacactcctccagtgacgatgaggacgaccggctcaaggagttcaacttccctgaggaggctgtgctgcagcaggccttcatggacttccagatgcagcgcatgacctctgccttcattgaccacttcggcttcaatgatgaggagtttggggagcaggaggagagtgtgaacgcaccttttgacaagacagccaacatcaccttctccctcaatgctgacgatgagaaccccaacgccaacctacttgagatatgctacaaggaccgcatccagcagtttgatgatgatgaggaagaggaggacgaggaagaggcccagggctcaggggagtctgatggagaagatggcgcctggcagggcagccagctggccaggggggcccgtctgggccagccacctggtgtccgagtggaggcaccacacaccgtgaggaccaagaagaggggggacgacttcaagcccaaaggtagtaaataggggaaggc

SEQ ID NO: 300634 - DNA, 1790 bp, Homo sapiens
tgggaaggcctgtcactgtggtgaccgtgtgaggtgacggctgggaggtggcttgagagctggtgagtgggtctgtctgctctggttgccatggctgaggctcagcccacttccccagggcctgccctccacggatgactggcgacggacggtctccttacggccgcattctgtccctgcccgcctgtgttcttgccgttggctcagaactccctctcccagcctctcctggtgtcgtcacaccccaggctccctggacccttctgtgacctgcctgtcatcccagcccgctctccttgggctgaccctgggctgcagggaacaggatgggtgtcggccggtctgtcccacacagctagctgacgaggtggtttctggggcaggagtggaggcagcacagacagtgaggacgaagaagaggaggacgaggaggaggaggaagacgaggagggcattggctgtgcagcccgtggaggggccacccctctgtcctaccccagccctggccctcagcctccaggccccagctggacagccacctttgacccagtgcctacagatgccccgaccagcccccgagtctccggggaggaagagctgcacactgggcctccagccccacaggggcccctcagtgtgccccagggcctccccactcagagcctggccagccctcctgcccgtgacgccctgcagctcaggtctcaggaccccacacccccctcagcacctcaggaagccacagaaggcagcaaagtcacggagccctcagccccttgccaggccttggttagcatcggggaccttcaggccaccttccacgggatccgttctgcccccagctcctcggacagtgcaaccagagacccctctacctctgtcccagcctccggggcccaccagcccccccagaccacagaaggggagaagagcccagagcccttggggcttccccaaagccagagtgcccaggccctcacgcctcctccgatacccaatggctctgccccggaagggcctgcatccccaggctcccaatagctgcctggtgcggcagcggcggccaaatcttccgtcctcccgtggatctcccggggtgggggcagggcgggtcccacgatggcccccattgccctcatcaccctgacacccccacattctctcctctggacccccaggaggctggtgccagggagacaggcccaacccacccccatttgcactgagaagagaagttttggagcgttgcctcctagaataaagatacagagagtcaaatagagagaatggagagagagaaacatatattatatattatatagagagagggaggagagcgagagagagtgaggacaccgaactgggctggcggctccaaagcacagccttccctgttccgtcccagcgggagctggtgttaggggtcccaaggttgccacccacgtgcccagctgtcccacgctgcagcgcagacggccacgcccacacccggccttttagctcaggtccaccatgggggacggcccagcgtgggtgggggtgccagagggtcccgagtgggggccgtgcctttgcccagaccctgcactttcaaccaggccagtccggctctggggagcaggggcctccccggcaacagccccaggggccttgagggtctgaggtcccagccctgttgccaagtgaccttgtccccagctccctcctcccaggctggtgtgagtgtgcgtgcgtttgtgccgagcttctatttcatattgcaaatataaataaaggaaggcagtttacga

SEQ ID NO: 300635 - DNA, 2031 bp, Homo sapiens
  misc_feature (47)..(47): n is a, c, g, or t
gagcgggcgcgagtcccgacgccgccccgccctctactcaccgggcnccgcagcaggggccggagccgccggcggcggggcgggggggggcgccccgatgagccccgagtgcgaggagccgccgccccccctcgcagggcgccatgttttggaagtttgacctgcacacaagctcgcacctggacacgctgctggagcgggaggacctgagcctgcccgagctgctggacgaggaagacgtgctgcaggagtgcaaggtcgtcaaccgcaagctgctggacttcctgctgcagccaccccacctgcaagcaatggtggcctgggtcacccaggagccgccagatagcggtgaggagcggctgcgctacaagtaccccagtgtggcctgcgagattctgacctcagatgtgccccagatcaatgatgccctgggtgctgatgagtcccttctgaaccggctctacggcttcctgcagagcaccggcagcctcaacccactgctggccagcttcttcagcaaggtcatgggcatcctcatcaaccgcaagacagaccagctcgtgtcctttcttcggaagaaggatgacttcgtggacctgctgctgcagcacattggcacctcggccatcatggacctcctgctgcgcctgctcacctgtgtggagcggcctcagctgaggcaggatgttgtcaattggctcaacgaggagaagatcgtccagcggctgattgagcagatccacccgtcgaaggatgagaatcaacattccaacgcatcccagtccctgtgtgacatcatccgcctgagccgggagcagatgatccaagtccaggacagcccagagcctgaccaactgctggccaccctggagaagcaggagacgattgagcagctcttaagcaacatgttcgagggggagcagagccagtctgtcatcgtcagtgggatccaggtgctgctgaccctgctggagcccaggaggccgaggtccgagtccgtgaccgtgaacagcttcttcagcagtgtggatgggcagctggagctcctggcccagggggccctggaaagcactgtgtccagtgtgggcgccttgcacgccctacgcccgcggctcagctgcttccaccagctcctgctggagcctcccaagctggagccgctacagatgacatggggcatgctggctccgcctctgggcaacacgcggctgcacgtggtcaagctcctggccagtgccctgagcgccaatgatgcagccctgacgcacgagctcctggcactggacgtgcccaacaccatgctggacctcttcttccattatgtcttcaacaacttcttgcatgcccaagtagagggatgcgtgagcaccatgctgagcttggggccacctcctgacagcagccctgagacgcccatccaaaaccctgttgtgaaacatctgctgcagcagtgccgcctggtggagcggatcctgacgtcctgggaggagaacgaccgtgtacagtgtgcgggaggccctcggaaaggctacatgggtcacctgacaagagtggccggtgccctggtgcagaacacggagaaggggcccaatgcagagcagctgcggcagctgctgaaggagctgcccagcgagcagcaggagcagtgggaagccttcgtatcggggcccctggcggagaccaacaagaagaacatggtggacctggtgaacacccaccacctacactcctccagtgacgatgaggacgaccggctcaaggagttcaacttccctgaggaggctgtgctgcagcaggccttcatggacttccagatgcagcgcatgacctctgccttcattgaccacttcggcttcaatgatgaggagtttggggagcaggaggagagtgtgaacgcaccttttgacaagacagccaacatcaccttctccctcaatgctgacgatgagaaccccaacgccaaccgacctggattcgcgaccgacctggattcgcgaccgacctggattcgcgaccgacctggattcgcga

SEQ ID NO: 300636 - DNA, 2172 bp, Homo sapiens
  misc_feature (47)..(47): n is a, c, g, or t
gagcgggcgcgagtcccgacgccgccccgccctctactcaccgggcnccgcagcaggggccggagccgccggcggcggggcgggggggggcgccccgatgagccccgagtgcgaggagccgccgccccccctcgcagggcgccatgttttggaagtttgacctgcacacaagctcgcacctggacacgctgctggagcgggaggacctgagcctgcccgagctgctggacgaggaagacgtgctgcaggagtgcaaggtcgtcaaccgcaagctgctggacttcctgctgcagccaccccacctgcaagcaatggtggcctgggtcacccaggagccgccagatagcggtgaggagcggctgcgctacaagtaccccagtgtggcctgcgagattctgacctcagatgtgccccagatcaatgatgccctgggtgctgatgagtcccttctgaaccggctctacggcttcctgcagagcaccggcagcctcaacccactgctggccagcttcttcagcaaggtcatgggcatcctcatcaaccgcaagacagaccagctcgtgtcctttcttcggaagaaggatgacttcgtggacctgctgctgcagcacattggcacctcggccatcatggacctcctgctgcgcctgctcacctgtgtggagcggcctcagctgaggcaggatgttgtcaattggctcaacgaggagaagatcgtccagcggctgattgagcagatccacccgtcgaaggatgagaatcaacattccaacgcatcccagtccctgtgtgacatcatccgcctgagccgggagcagatgatccaagtccaggacagcccagagcctgaccaactgctggccaccctggagaagcaggagacgattgagcagctcttaagcaacatgttcgagggggagcagagccagtctgtcatcgtcagtgggatccaggtgctgctgaccctgctggagcccaggaggccgaggtccgagtccgtgaccgtgaacagcttcttcagcagtgtggatgggcagctggagctcctggcccagggggccctggaaagcactgtgtccagtgtgggcgccttgcacgccctacgcccgcggctcagctgcttccaccagctcctgctggagcctcccaagctggagccgctacagatgacatggggcatgctggctccgcctctgggcaacacgcggctgcacgtggtcaagctcctggccagtgccctgagcgccaatgatgcagccctgacgcacgagctcctggcactggacgtgcccaacaccatgctggacctcttcttccattatgtcttcaacaacttcttgcatgcccaagtagagggatgcgtgagcaccatgctgagcttggggccacctcctgacagcagccctgagacgcccatccaaaaccctgttgtgaaacatctgctgcagcagtgccgcctggtggagcggatcctgacgtcctgggaggagaacgaccgtgtacagtgtgcgggaggccctcggaaaggctacatgggtcacctgacaagagtggccggtgccctggtgcagaacacggagaaggggcccaatgcagagcagctgcggcagctgctgaaggagctgcccagcgagcagcaggagcagtgggaagccttcgtatcggggcccctggcggagaccaacaagaagaacatggtggacctggtgaacacccaccacctacactcctccagtgacgatgaggacgaccggctcaaggagttcaacttccctgttccgtcccagcgggagctggtgttaggggtcccaaggttgccacccacgtgcccagctgtcccacgctgcagcgcagacggccacgcccacacccggccttttagctcaggtccaccatgggggacggcccagcgtgggtgggggtgccagagggtcccgagtgggggccgtgcctttgcccagaccctgcactttcaaccaggccagtccggctctggggagcaggggcctccccggcaacagccccaggggccttgagggtctgaggtcccagccctgttgccaagtgaccttgtccccagctccctcctcccaggctggtgtgagtgtgcgtgcgtttgtgccgagcttctatttcatattgcaaatataaataaaggaaggcagtttacga

SEQ ID NO: 300637 - DNA, 1161 bp, Homo sapiens
ttcggctagtacgaggctgggtgttacactcagagctggcagccctcctgcccgtgacgccctgcagctcaggtctcaggaccccacacccccctcagcacctcaggaagccacagaaggcagcaaagtcacggagccctcagccccttgccaggccttggttagcatcggggaccttcaggccaccttccacgggatccgttctgcccccagctcctcggacagtgcaaccagagacccctctacctctgtcccagcctccggggcccaccagcccccccagaccacagaaggggagaagagcccagagcccttggggcttccccaaagccagagtgcccaggccctcacgcctcctccgatacccaatggctctgccccggaagggcctgcatccccaggctcccaatagctgcctggtgcggcagcggcggccaaatcttccgtcctcccgtggatctcccggggtgggggcagggcgggtcccacgatggcccccattgccctcatcaccctgacacccccacattctctcctctggacccccaggaggctggtgccagggagacaggcccaacccacccccatttgcactgagaagagaagttttggagcgttgcctcctagaataaagatacagagagtcaaatagagagaatggagagagagaaacatatattatatattatatagagagagggaggagagcgagagagagtgaggacaccgaactgggctggcggctccaaagcacagccttccctgttccgtcccagcgggagctggtgttaggggtcccaaggttgccacccacgtgcccagctgtcccacgctgcagcgcagacggccacgcccacacccggccttttagctcaggtccaccatgggggacggcccagcgtgggtgggggtgccagagggtcccgagtgggggccgtgcctttgcccagaccctgcactttcaaccaggccagtccggctctggggagcaggggcctccccggcaacagccccaggggccttgagggtctgaggtcccagccctgttgccaagtgaccttgtccccagctccctcctcccaggctggtgtgagtgtgcgtgcgtttgtgccgagcttctatttcatattgcaaatataaataaaggaaggcagtttacga

SEQ ID NO: 300638 - DNA, 1154 bp, Homo sapiens
gaggccggccgcagagcccggagattgagcggctttggggaaggggtggttaaggaagtaggcctcggcttccgtcggtcgctgctcggctctgcggcccgtttggaccgcggaggaggtctgccttcccctcccgtggggcgctcggtctgtgactgtggaaacctggtggcaacttcccccgtcttccctggctgagtgctgcctgcgtgggcctcgcgaccctggctctgccaaccctgcctcgtgccctccggggcccaccagcccccccagaccacagaaggggagaagagcccagagcccttggggcttccccaaagccagagtgcccaggccctcacgcctcctccgatacccaatggctctgccccggaagggcctgcatccccaggctcccaatagctgcctggtgcggcagcggcggccaaatcttccgtcctcccgtggatctcccggggtgggggcagggcgggtcccacgatggcccccattgccctcatcaccctgacacccccacattctctcctctggacccccaggaggctggtgccagggagacaggcccaacccacccccatttgcactgagaagagaagttttggagcgttgcctcctagaataaagatacagagagtcaaatagagagaatggagagagagaaacatatattatatattatatagagagagggaggagagcgagagagagtgaggacaccgaactgggctggcggctccaaagcacagccttccctgttccgtcccagcgggagctggtgttaggggtcccaaggttgccacccacgtgcccagctgtcccacgctgcagcgcagacggccacgcccacacccggccttttagctcaggtccaccatgggggacggcccagcgtgggtgggggtgccagagggtcccgagtgggggccgtgcctttgcccagaccctgcactttcaaccaggccagtccggctctggggagcaggggcctccccggcaacagccccaggggccttgagggtctgaggtcccagccctgttgccaagtgaccttgtccccagctccctcctcccaggctggtgtgagtgtgcgtgcgtttgtgccgagcttctatttcatattgcaaatataaataaaggaaggcagtttacga

SEQ ID NO: 300639 - DNA, 905 bp, Homo sapiens
taggctagtcagcctgtgtgatcggccgaggcacagaacgggagaatagccagagccctggggcttccccaaagccagagtgcccaggccctcacgcctcctccgatacccaatggctctgccccggaagggcctgcatccccaggctcccaatagctgcctggtgcggcagcggcggccaaatcttccgtcctcccgtggatctcccggggtgggggcagggcgggtcccacgatggcccccattgccctcatcaccctgacacccccacattctctcctctggacccccaggaggctggtgccagggagacaggcccaacccacccccatttgcactgagaagagaagttttggagcgttgcctcctagaataaagatacagagagtcaaatagagagaatggagagagagaaacatatattatatattatatagagagagggaggagagcgagagagagtgaggacaccgaactgggctggcggctccaaagcacagccttccctgttccgtcccagcgggagctggtgttaggggtcccaaggttgccacccacgtgcccagctgtcccacgctgcagcgcagacggccacgcccacacccggccttttagctcaggtccaccatgggggacggcccagcgtgggtgggggtgccagagggtcccgagtgggggccgtgcctttgcccagaccctgcactttcaaccaggccagtccggctctggggagcaggggcctccccggcaacagccccaggggccttgagggtctgaggtcccagccctgttgccaagtgaccttgtccccagctccctcctcccaggctggtgtgagtgtgcgtgcgtttgtgccgagcttctatttcatattgcaaatataaataaaggaaggcagtttacga

SEQ ID NO: 300640 - DNA, 883 bp, Homo sapiens
  misc_feature (9)..(9): n is a, c, g, or t
acccacgcngtcgagagtgcccaggccctctggctttggggaagccccaaggccagagtgcccaggccctcacgcctcctccgatacccaatggctctgccccggaagggcctgcatccccaggctcccaatagctgcctggtgcggcagcggcggccaaatcttccgtcctcccgtggatctcccggggtgggggcagggcgggtcccacgatggcccccattgccctcatcaccctgacacccccacattctctcctctggacccccaggaggctggtgccagggagacaggcccaacccacccccatttgcactgagaagagaagttttggagcgttgcctcctagaataaagatacagagagtcaaatagagagaatggagagagagaaacatatattatatattatatagagagagggaggagagcgagagagagtgaggacaccgaactgggctggcggctccaaagcacagccttccctgttccgtcccagcgggagctggtgttaggggtcccaaggttgccacccacgtgcccagctgtcccacgctgcagcgcagacggccacgcccacacccggccttttagctcaggtccaccatgggggacggcccagcgtgggtgggggtgccagagggtcccgagtgggggccgtgcctttgcccagaccctgcactttcaaccaggccagtccggctctggggagcaggggcctccccggcaacagccccaggggccttgagggtctgaggtcccagccctgttgccaagtgaccttgtccccagctccctcctcccaggctggtgtgagtgtgcgtgcgtttgtgccgagcttctatttcatattgcaaatataaataaaggaaggcagtttacga

SEQ ID NO: 300641 - DNA, 1551 bp, Homo sapiens
  misc_feature (47)..(47): n is a, c, g, or t
gagcgggcgcgagtcccgacgccgccccgccctctactcaccgggcnccgcagcaggggccggagccgccggcggcggggcgggggggggcgccccgatgagccccgagtgcgaggagccgccgccccccctcgcagggcgccatgttttggaagtttgacctgcacacaagctcgcacctggacacgctgctggagcgggaggacctgagcctgcccgagctgctggacgaggaagacgtgctgcaggagtgcaaggtcgtcaaccgcaagctgctggacttcctgctgcagccaccccacctgcaagcaatggtggcctgggtcacccaggagccgccagatagcggtgaggagcggctgcgctacaagtaccccagtgtggcctgcgagattctgacctcagatgtgccccagatcaatgatgccctgggtgctgatgagtcccttctgaaccggctctacggcttcctgcagagcaccggcagcctcaacccactgctggccagcttcttcagcaaggtcatgggcatcctcatcaaccgcaagacagaccagctcgtgtcctttcttcggaagaaggatgacttcgtggacctgctgctgcagcacattggcacctcggccatcatggacctcctgctgcgcctgctcacctgtgtggagcggcctcagctgaggcaggatgttgtcaattggctcaacgaggagaagatcgtccagcggctgattgagcagatccacccgtcgaaggatgagaatcaacattccaacgcatcccagtccctgtgtgacatcatccgcctgagccgggagcagatgatccaagtccaggacagcccagagcctgaccaactgctggccaccctggagaagcaggagacgattgagcagctcttaagcaacatgttcgagggggagcagagccagtctgtcatcgtcagtgggatccaggtgctgctgaccctgctggagcccaggaggccgaggtccgagtccgtgaccgtgaacagcttcttcagcagtgtggatgggcagctggagctcctggcccagggggccctggaaagcactgtgtccagtgtgggcgccttgcacgccctacgcccgcggctcagctgcttccaccagctcctgctggagcctcccaagctggagccgctacagatgacatggggcatgctggctccgcctctgggcaacacgcggctgcacgtggtcaagctcctggccagtgccctgagcgccaatgatgcagccctgacgcacgagctcctggcactggacgtgcccaacaccatgctggactcttctcattatgtcttccacacttcttggctgccagttggggtgcgtgagccctggtggctgggggccctctgaggaggctggaggcatcaaacctgtgtgaaccttgtgcgggtgcgccgggagggcctagcctgggggaccggcgggcggggccgaggactgggccgaagggccctgtaagacaggccccagggcttgtccccagggattcacggaaaggggcccctggggcgtcctcggg

SEQ ID NO: 300642 - DNA, 756 bp, Homo sapiens
  misc_feature (47)..(47): n is a, c, g, or t
gagcgggcgcgagtcccgacgccgccccgccctctactcaccgggcnccgcagcaggggccggagccgccggcggcggggcgggggggggcgccccgatgagccccgagtgcgaggagccgccgccccccctcgcagggcgccatgttttggaagtttgacctgcacacaagctcgcacctggacacgctgctggagcgggaggacctgagcctgcccgagctgctggacgaggaagacgtgctgcaggagtgcaaggtcgtcaaccgcaagctgctggacttcctgctgcagccaccccacctgcaagcaatggtggcctgggtcacccaggagccgccagatagcggtgaggagcggctgcgctacaagtgagttccccagctcctggccagcccgtccctatcagcatcacacataccttcactacgcaagcctcacagctaccctgaaatgcgtcagtgtcagtaaactccagtttggggatgaggaagacgaggctgggagcagccaggctcctgcacaaggcctcacagctcaccgggtgcagaccaagcctgtgctctggagggcagtggcacagtcacgggtcacggcagccacaaattcacgggcccaggtgatcctcccgcctcagttgcccgagtagctgggaccacaggcatgtgacgacatgcccggctggtttttctctttattcgccgccttttattttatttactttttattaaactttttttgtatgtttgtgaaacac

SEQ ID NO: 300643 - DNA, 903 bp, Homo sapiens
gagctgattcctgcaaacaccattagagcacctggtatgtagtaaacctctgatcactgctcttgtcagaggcacgggacatgtttccatgtgcacccagcctgttctcttgtggattctgtgagggcagaatagatcctcttcatcacccaaggcaggctgggctctttctcctggcccctcattggttcattcggcagctgtttatttagaacctgccgtgtgctagggcagatctgggatacagctgtggacaagggaggatgaggtgtctgttttcatagagcttttggggagaccagaattaaacaatagtcatacaagaaatcacaacacagatcataatgagggtaaaggggacagtttgccaggagcacacgaaggtgggggctggggtgcacagggaggctgagggctgcaggatgccgtggagccaactgagtgagggtctggagtaagaagatttcaggctaagggaaattggaatgctcgttgagttcaagaacagcgctaaggccagaagctgcccttcctcctcatcctggcccctccccagcccccgccaatactgtgaacccccttcccactcagcctggtttcctggtgagggtcctgcagtcatgggccctgggggacccccagggcaaggcccatgggagggaagggaccaagggcatccttgggccaactgtccacctctcttgtccactattctctcctttccacttctgtcttcaaaaggctccttcctaggatggatcgggtgctaggacaactgcagtccaatccaccagctctccctgcccctgtgtcttatttcagacatgagaataactgtacagtgtaaacttataaagcgtttttaatggttgtagattggaaataaagtatgtcatatgaaca

SEQ ID NO: 300644 - DNA, 4756 bp, Homo sapiens
ggctctttgtcgctctcccctcctatctacgaatgtcccctgctctctgagcctcaccatgaccccaccgaaggtcccactacttcttccatgataatagtaataacaatggttatcatcatcccctgcacatcccgcctaaagcactttactatatagaaaacgtttcccctggccgggcatggtggctcacgcctgaaatcccagctctttgggaggctgaggcgagcggatcagttgaggtcaggagttcaacgccagcctggccaacgtggtgaatccctgtctgtactaaaagtacaaaaaattagctgagcatggtggtgcgtgcctgtaatcccagctactcgggaggctgaggtgggagaatcgcttgagcccaggaggcggaggttgcaggagcagagattgcgccactgcactccagcctggatgacagagtgagacccaatctcaaaaaagaaatcgtttcccaccccacatctccttcagacctctcagggacaactctgggaggcagccttggcaggacatgggttagtgcgcccattttgctgtgaggaaactgaggtacaggtctcatcccagagcatgagaagtcactgagtttagatgagaacttgggtccaactctgtcctgtttgctgtgcaaatccgctgccctgctgggggcttttggtgggtccagaatacccagaatatgctgctggccaacccaggcataaaacaagtccattctagatcactgagccttgtgtattccagagggtgatctgaggtccccattcagcagaattctctgagggcatgttcagaatgtagattcctgggccccaccttgaatttgcatgtttaacaaactctcctggggttgaggggtgggtgcagtggtcacacctgtaatcccaaagtactgggattataggcgtgagccacggcatccagcctcatctttcttttaaccaataaacatgatgctgtatcttaaaaagagcactgagcagggacttaagggatcgagtcctcaaccaaactgatttaattactcaggattttcaaaaagcatcagaggctatttacaatcttaatcataggggttcagtaaaataaaaataagaagtaaaaaagcaagagaaattattctgtaaatctaactggtgtaattcccataatcatgcaattaagttttactcttgagtttcctgacagccattggtaaaaagagaaacacatcaggatttataatttttatcatccaattatgggaagcaagcatgttggccccaggagacgaactcttctactaatttatagcatgtatcctttcatcaagggccactgagccagttggtgagtcaacgggtgaacctaagatgcaaggatgttttccaggtgactatttaaaaaaataaataatccaccaacgtgattgaccttggcgagatcatgtttctagtctatacctcagtttccccatctgtaaagtgaggataatgtcccaccccatgtaactgtggtgaggaccaactgcaacactgtgcctgcgagtctccttggaaaagtgtaaggttctacacaaatggaaagtgatctgatcacactcagtgtccccagcccagcctttcagtgccctggccctggggtgggggacaatactctcctcacccccttcactagtcttcatgaatagcaaggaggccataacataatttggtctaaaccccttcctttttaaaagaatgatggcaaaatgtgcataacattaaatttaccattttaaagatttctaagtgtctcgaagtacatttgcaatgtgtaactgccacctccagaactttttcatcatcctaaactgaaactctgtacccactaaacagtaactccccactccccctgtccccagtccctggtaacctctattctacttttttttttctctgtggattggcctattctaggtatctcttttaagtagaatcatatagtatttgtccttttgtgtccagccccctcattttttgagatgaggaatcaggcccagagaaggcagtggctcacccaaggtcacatcgcaaaccagaggcagagccaagaccagaacccaggtttcctgactcctaacaggtcttgcatccccagtagtgaatgagacactgctttgactttctgtaatcttggtttagccccttcctttctctgggctcagtctgcttcccaccactcacccattctttctttatcatctccctccaaagcctcttgtcctcctgcctcctcttctccttggctggttcctgccagcaaatggagtggccctggtccatgccaggttttcctcttctgggtccggagctcactatagtattcagccctcagtcctcccaggatgttcttcccagcactgctgcctcgtgcggattttcccgtaacctcagtaactggcttcttgtccccctgcttcctaccagggaagccttcctgtccgcgtctgtggtttcccaactctgatatttgctctcaaatgtggtggtgtcctggttctgtgtttatttattttgtgttttctcacacacacaaaaaaaagcctcttcctccaatgcatcaggaggcaccagccctgccagcccttctcactgggctcaccctgccccagcaaccccccggtgccacccttaagccacactgtcttctctgtaagcagcctgccagcagcagccccagcactttgcaatgggcgtgtgtgtggtggtgggtggggggggcttggatccctcctttttcctcccctgccctgcccaggcccagatggccttgactgtaaagcaggtgctgcctgacaggttcttctctccctgtctctggtcattgatccatctctttgtccattcagtatccaaccatcctctccattctcctctggacctcaccactctcagagctgcttgtcctggcagaatctacaattcaccccaactctatgccttacccctcccaacccaacagcatttgcagtttgcaaaatatacagacccaagtcctgaggggactgaggacatgatgctgggcccaagtctcctgctcagggcttctctccaatgccagccctgccactccttcctcaccctccttggagcctcctcctgctgcttgtctatcccaacggccctgctcccctcccttcctgcccttcaccagctttctggacaccatgccctgaggaagggacctttggttttctctaaacatctttgaagggctgaggcagtcagggctggctgccttgtcactctttatttggaagccactcaaaccattcccaagaagagggacctcagctggcaatctggaaacctggcccaggtctgggcagatgtcttcacttctcctaccttcccagtcttgtgatcctgtgatgagcaccaggatggccctgtggtccctagagcacccctcatgctgtagggtcctgcagccccatcctttctctactgggccctggtatcctggctcctctctcagctctgccactgatctctgtgccttagtttacttctctgcacgggggactcaccccaagaccatttccagcagcttcccaggtgatgtggtgccccaaggctgggctttgccagctgtggcccagctccttagtgctgcccaggagacaccaggctgctcagaatgaggtgactgcgggcaccattctcagccagtggttcttgtattgcattccagcagcaggaatatcacctgggaacttgatagaagtgcagattagcagccccacccaagacccactgaattagagcttgtggagtggggccctacaagctggggttttaaggagccctccaaatgattctgacgcataagaatatgccaactgctgatctgggctagccattagtagagcctggggagggactgggactggctaggccaagaacaggtggaaaacaccagccttatctggactcctgagattgggaaccaccaccaacaaaaaccaaccctatagtcgctcctcttggaagaggaagagaagttgaagggcctggagaaagcacacattgtttgtttccctgctcctgctcacctctctcacttgtcttggttttacaaaaggctgtgtggatggtgccagccagggagggggtgggagtcctggggaggcaggaggcagaagaccctgactgtttctcccttgggaacctcaccataggccagatagcgcctcttcaaactgaaagaaatcttaactccacaaagaaagcatcctaaatccccagttcctcctcctcccaaccccagggataccttgtagacagtgccaaaaaacagctccaacccccagcagctgggaagagagccagaagctgcccttcctcctcatcctggcccctccccagcccccgccaatactgtgaacccccttcccactcagcctggtttcctggtgagggtcctgcagtcatgggccctgggggacccccagggcaaggcccatgggagggaagggaccaagggcatccttgggccaactgtccacctctcttgtccactattctctcctttccacttctgtcttcaaaaggctccttcctaggatggatcgggtgctaggacaactgcagtccaatccaccagctctccctgcccctgtgtcttatttcagacatgagaataactgtacagtgtaaacttataaagcgtttttaatggttgtagattggaaataaagtatgtcatatgaaca

SEQ ID NO: 300645 - DNA, 3994 bp, Homo sapiens
tcaacctcccgagtaactgggattacaggtgtgtgccaccacacccgactaatttttttatttttagtagagacggggtttcaccatgttggccaggctggtcttgaactcctgacctcaggtgatccacccacctcggcctcccaaagtactgggattataggcgtgagccacggcatccagcctcatctttcttttaaccaataaacatgatgctgtatcttaaaaagagcactgagcagggacttaagggatcgagtcctcaaccaaactgatttaattactcaggattttcaaaaagcatcagaggctatttacaatcttaatcataggggttcagtaaaataaaaataagaagtaaaaaagcaagagaaattattctgtaaatctaactggtgtaattcccataatcatgcaattaagttttactcttgagtttcctgacagccattggtaaaaagagaaacacatcaggatttataatttttatcatccaattatgggaagcaagcatgttggccccaggagacgaactcttctactaatttatagcatgtatcctttcatcaagggccactgagccagttggtgagtcaacgggtgaacctaagatgcaaggatgttttccaggtgactatttaaaaaaataaataatccaccaacgtgattgaccttggcgagatcatgtttctagtctatacctcagtttccccatctgtaaagtgaggataatgtcccaccccatgtaactgtggtgaggaccaactgcaacactgtgcctgcgagtctccttggaaaagtgtaaggttctacacaaatggaaagtgatctgatcacactcagtgtccccagcccagcctttcagtgccctggccctggggtgggggacaatactctcctcacccccttcactagtcttcatgaatagcaaggaggccataacataatttggtctaaaccccttcctttttaaaagaatgatggcaaaatgtgcataacattaaatttaccattttaaagatttctaagtgtctcgaagtacatttgcaatgtgtaactgccacctccagaactttttcatcatcctaaactgaaactctgtacccactaaacagtaactccccactccccctgtccccagtccctggtaacctctattctacttttttttttctctgtggattggcctattctaggtatctcttttaagtagaatcatatagtatttgtccttttgtgtccagccccctcattttttgagatgaggaatcaggcccagagaaggcagtggctcacccaaggtcacatcgcaaaccagaggcagagccaagaccagaacccaggtttcctgactcctaacaggtcttgcatccccagtagtgaatgagacactgctttgactttctgtaatcttggtttagccccttcctttctctgggctcagtctgcttcccaccactcacccattctttctttatcatctccctccaaagcctcttgtcctcctgcctcctcttctccttggctggttcctgccagcaaatggagtggccctggtccatgccaggttttcctcttctgggtccggagctcactatagtattcagccctcagtcctcccaggatgttcttcccagcactgctgcctcgtgcggattttcccgtaacctcagtaactggcttcttgtccccctgcttcctaccagggaagccttcctgtccgcgtctgtggtttcccaactctgatatttgctctcaaatgtggtggtgtcctggttctgtgtttatttattttgtgttttctcacacacacaaaaaaaagcctcttcctccaatgcatcaggaggcaccagccctgccagcccttctcactgggctcaccctgccccagcaaccccccggtgccacccttaagccacactgtcttctctgtaagcagcctgccagcagcagccccagcactttgcaatgggcgtgtgtgtggtggtgggtggggggggcttggatccctcctttttcctcccctgccctgcccaggcccagatggccttgactgtaaagcaggtgctgcctgacaggttcttctctccctgtctctggtcattgatccatctctttgtccattcagtatccaaccatcctctccattctcctctggacctcaccactctcagagctgcttgtcctggcagaatctacaattcaccccaactctatgccttacccctcccaacccaacagcatttgcagtttgcaaaatatacagacccaagtcctgaggggactgaggacatgatgctgggcccaagtctcctgctcagggcttctctccaatgccagccctgccactccttcctcaccctccttggagcctcctcctgctgcttgtctatcccaacggccctgctcccctcccttcctgcccttcaccagctttctggacaccatgccctgaggaagggacctttggttttctctaaacatctttgaagggctgaggcagtcagggctggctgccttgtcactctttatttggaagccactcaaaccattcccaagaagagggacctcagctggcaatctggaaacctggcccaggtctgggcagatgtcttcacttctcctaccttcccagtcttgtgatcctgtgatgagcaccaggatggccctgtggtccctagagcacccctcatgctgtagggtcctgcagccccatcctttctctactgggccctggtatcctggctcctctctcagctctgccactgatctctgtgccttagtttacttctctgcacgggggactcaccccaagaccatttccagcagcttcccaggtgatgtggtgccccaaggctgggctttgccagctgtggcccagctccttagtgctgcccaggagacaccaggctgctcagaatgaggtgactgcgggcaccattctcagccagtggttcttgtattgcattccagcagcaggaatatcacctgggaacttgatagaagtgcagattagcagccccacccaagacccactgaattagagcttgtggagtggggccctacaagctggggttttaaggagccctccaaatgattctgacgcataagaatatgccaactgctgatctgggctagccattagtagagcctggggagggactgggactggctaggccaagaacaggtggaaaacaccagccttatctggactcctgagattgggaaccaccaccaacaaaaaccaaccctatagtcgctcctcttggaagaggaagagaagttgaagggcctggagaaagcacacattgtttgtttccctgctcctgctcacctctctcacttgtcttggttttacaaaaggctgtgtggatggtgccagccagggagggggtgggagtcctggggaggcaggaggcagaagaccctgactgtttctcccttgggaacctcaccataggccagatagcgcctcttcaaactgaaagaaatcttaactccacaaagaaagcatcctaaatccccagttcctcctcctcccaaccccagggataccttgtagacagtgccaaaaaacagctccaacccccagcagctgggaagagagccagaagctgcccttcctcctcatcctggcccctccccagcccccgccaatactgtgaacccccttcccactcagcctggtttcctggtgagggtcctgcagtcatgggccctgggggacccccagggcaaggcccatgggagggaagggaccaagggcatccttgggccaactgtccacctctcttgtccactattctctcctttccacttctgtcttcaaaaggctccttcctaggatggatcgggtgctaggacaactgcagtccaatccaccagctctccctgcccctgtgtcttatttcagacatgagaataactgtacagtgtaaacttataaagcgtttttaatggttgtagattggaaataaagtatgtcatatgaaca

SEQ ID NO: 300646 - DNA, 4949 bp, Homo sapiens
ggctctttgtcgctctcccctcctatctacgaatgtcccctgctctctgagcctcaccatgaccccaccgaaggtcccactacttcttccatgataatagtaataacaatggttatcatcatcccctgcacatcccgcctaaagcactttactatatagaaaacgtttcccctggccgggcatggtggctcacgcctgaaatcccagctctttgggaggctgaggcgagcggatcagttgaggtcaggagttcaacgccagcctggccaacgtggtgaatccctgtctgtactaaaagtacaaaaaattagctgagcatggtggtgcgtgcctgtaatcccagctactcgggaggctgaggtgggagaatcgcttgagcccaggaggcggaggttgcaggagcagagattgcgccactgcactccagcctggatgacagagtgagacccaatctcaaaaaagaaatcgtttcccaccccacatctccttcagacctctcagggacaactctgggaggcagccttggcaggacatgggttagtgcgcccattttgctgtgaggaaactgaggtacaggtctcatcccagagcatgagaagtcactgagtttagatgagaacttgggtccaactctgtcctgtttgctgtgcaaatccgctgccctgctgggggcttttggtgggtccagaatacccagaatatgctgctggccaacccaggcataaaacaagtccattctagatcactgagccttgtgtattccagagggtgatctgaggtccccattcagcagaattctctgagggcatgttcagaatgtagattcctgggccccaccttgaatttgcatgtttaacaaactctcctggggttgaggggtgggtgcagtggtcacacctgtaatcccaaagtactgggattataggcgtgagccacggcatccagcctcatctttcttttaaccaataaacatgatgctgtatcttaaaaagagcactgagcagggacttaagggatcgagtcctcaaccaaactgatttaattactcaggattttcaaaaagcatcagaggctatttacaatcttaatcataggggttcagtaaaataaaaataagaagtaaaaaagcaagagaaattattctgtaaatctaactggtgtaattcccataatcatgcaattaagttttactcttgagtttcctgacagccattggtaaaaagagaaacacatcaggatttataatttttatcatccaattatgggaagcaagcatgttggccccaggagacgaactcttctactaatttatagcatgtatcctttcatcaagggccactgagccagttggtgagtcaacgggtgaacctaagatgcaaggatgttttccaggtgactatttaaaaaaataaataatccaccaacgtgattgaccttggcgagatcatgtttctagtctatacctcagtttccccatctgtaaagtgaggataatgtcccaccccatgtaactgtggtgaggaccaactgcaacactgtgcctgcgagtctccttggaaaagtgtaaggttctacacaaatggaaagtgatctgatcacactcagtgtccccagcccagcctttcagtgccctggccctggggtgggggacaatactctcctcacccccttcactagtcttcatgaatagcaaggaggccataacataatttggtctaaaccccttcctttttaaaagaatgatggcaaaatgtgcataacattaaatttaccattttaaagatttctaagtgtctcgaagtacatttgcaatgtgtaactgccacctccagaactttttcatcatcctaaactgaaactctgtacccactaaacagtaactccccactccccctgtccccagtccctggtaacctctattctacttttttttttctctgtggattggcctattctaggtatctcttttaagtagaatcatatagtatttgtccttttgtgtccagccccctcattttttgagatgaggaatcaggcccagagaaggcagtggctcacccaaggtcacatcgcaaaccagaggcagagccaagaccagaacccaggtttcctgactcctaacaggtcttgcatccccagtagtgaatgagacactgctttgactttctgtaatcttggtttagccccttcctttctctgggctcagtctgcttcccaccactcacccattctttctttatcatctccctccaaagcctcttgtcctcctgcctcctcttctccttggctggttcctgccagcaaatggagtggccctggtccatgccaggttttcctcttctgggtccggagctcactatagtattcagccctcagtcctcccaggatgttcttcccagcactgctgcctcgtgcggattttcccgtaacctcagtaactggcttcttgtccccctgcttcctaccagggaagccttcctgtccgcgtctgtggtttcccaactctgatatttgctctcaaatgtggtggtgtcctggttctgtgtttatttattttgtgttttctcacacacacaaaaaaaagcctcttcctccaatgcatcaggaggcaccagccctgccagcccttctcactgggctcaccctgccccagcaaccccccggtgccacccttaagccacactgtcttctctgtaagcagcctgccagcagcagccccagcactttgcaatgggcgtgtgtgtggtggtgggtggggggggcttggatccctcctttttcctcccctgccctgcccaggcccagatggccttgactgtaaagcaggtgctgcctgacaggttcttctctccctgtctctggtcattgatccatctctttgtccattcagtatccaaccatcctctccattctcctctggacctcaccactctcagagctgcttgtcctggcagaatctacaattcaccccaactctatgccttacccctcccaacccaacagcatttgcagtttgcaaaatatacagacccaagtcctgaggggactgaggacatgatgctgggcccaagtctcctgctcagggcttctctccaatgccagccctgccactccttcctcaccctccttggagcctcctcctgctgcttgtctatcccaacggccctgctcccctcccttcctgcccttcaccagctttctggacaccatgccctgaggaagggacctttggttttctctaaacatctttgaagggctgaggcagtcagggctggctgccttgtcactctttatttggaagccactcaaaccattcccaagaagagggacctcagctggcaatctggaaacctggcccaggtctgggcagatgtcttcacttctcctaccttcccagtcttgtgatcctgtgatgagcaccaggatggccctgtggtccctagagcacccctcatgctgtagggtcctgcagccccatcctttctctactgggccctggtatcctggctcctctctcagctctgccactgatctctgtgccttagtttacttctctgcacgggggactcaccccaagaccatttccagcagcttcccaggtgatgtggtgccccaaggctgggctttgccagctgtggcccagctccttagtgctgcccaggagacaccaggctgctcagaatgaggtgactgcgggcaccattctcagccagtggttcttgtattgcattccagcagcaggaatatcacctgggaacttgatagaagtgcagattagcagccccacccaagacccactgaattagagcttgtggagtggggccctacaagctggggttttaaggagccctccaaatgattctgacgcataagaatatgccaactgctgatctgggctagccattagtagagcctggggagggactgggactggctaggccaagaacaggtggaaaacaccagccttatctggactcctgagattgggaaccaccaccaacaaaaaccaaccctatagtcgctcctcttggaagaggaagagaagttgaagggcctggagaaagcacacattgtttgtttccctgctcctgctcacctctctcacttgtcttggttttacaaaaggctgtgtggatggtgccagccagggagggggtgggagtcctggggaggcaggaggcagaagaccctgactgtttctcccttgggaacctcaccataggccagatagcgcctcttcaaactgaaagaaatcttaactccacaaagaaagcatcctaaatccccagttcctcctcctcccaaccccagggataccttgtagacagtgccaaaaaacagctccaacccccagcagctgggaagagagccagaagctgcccttcctcctcatcctggcccctccccagcccccgccaatactgtgaacccccttcccactcagcctggtttcctggtgagggtcctgcagtcatgggccctgggggacccccagggcaaggcccatgggagggaagggaccaagggcatccttgggccaactgtccacctctcttgtccactattctctcctttccacttctgtcttcaaaaggctccttcctaggatggatcgggtgctaggacaactgcagtccaatccaccagctctccctgcccctgtgtcttatttcagacatgagaataactgtacagtgtaaacttataaagcgtttttaatggttgtagattggaaataaagtatgtcatatgaacaaaaaaaaaaaaaaaaaaaaaaaaaaaaaaaaaaaaaaaaaaaaaaaaaaaaaaaaaaaaaaaaaaaaaaaaaagaaggaggagaaaaaaaaagtaatcaaaagggagagaagtggaaacgctttgggaggggctcatgggctgtataaaggagggggttttatcttgggtgggtacgggcggggtaatccttg

SEQ ID NO: 300647 - DNA, 4431 bp, Homo sapiens
ggctctttgtcgctctcccctcctatctacgaatgtcccctgctctctgagcctcaccatgaccccaccgaaggtcccactacttcttccatgataatagtaataacaatggttatcatcatcccctgcacatcccgcctaaagcactttactatatagaaaacgtttcccctggccgggcatggtggctcacgcctgaaatcccagctctttgggaggctgaggcgagcggatcagttgaggtcaggagttcaacgccagcctggccaacgtggtgaatccctgtctgtactaaaagtacaaaaaattagctgagcatggtggtgcgtgcctgtaatcccagctactcgggaggctgaggtgggagaatcgcttgagcccaggaggcggaggttgcaggagcagagattgcgccactgcactccagcctggatgacagagtgagacccaatctcaaaaaagaaatcgtttcccaccccacatctccttcagacctctcagggacaactctgggaggcagccttggcaggacatgggttagtgcgcccattttgctgtgaggaaactgaggtacaggtctcatcccagagcatgagaagtcactgagtttagatgagaacttgggtccaactctgtcctgtttgctgtgcaaatccgctgccctgctgggggcttttggtgggtccagaatacccagaatatgctgctggccaacccaggcataaaacaagtccattctagatcactgagccttgtgtattccagagggtgatctgaggtccccattcagcagaattctctgagggcatgttcagaatgtagattcctgggccccaccttgaatttgcatgtttaacaaactctcctggggttgaggggtgggtgcagtggtcacacctgtaatcccaaagtactgggattataggcgtgagccacggcatccagcctcatctttcttttaaccaataaacatgatgctgtatcttaaaaagagcactgagcagggacttaagggatcgagtcctcaaccaaactgatttaattactcaggattttcaaaaagcatcagaggctatttacaatcttaatcataggggttcagtaaaataaaaataagaagtaaaaaagcaagagaaattattctgtaaatctaactggtgtaattcccataatcatgcaattaagttttactcttgagtttcctgacagccattggtaaaaagagaaacacatcaggatttataatttttatcatccaattatgggaagcaagcatgttggccccaggagacgaactcttctactaatttatagcatgtatcctttcatcaagggccactgagccagttggtgagtcaacgggtgaacctaagatgcaaggatgttttccaggtgactatttaaaaaaataaataatccaccaacgtgattgaccttggcgagatcatgtttctagtctatacctcagtttccccatctgtaaagtgaggataatgtcccaccccatgtaactgtggtgaggaccaactgcaacactgtgcctgcgagtctccttggaaaagtgtaaggttctacacaaatggaaagtgatctgatcacactcagtgtccccagcccagcctttcagtgccctggccctggggtgggggacaatactctcctcacccccttcactagtcttcatgaatagcaaggaggccataacataatttggtctaaaccccttcctttttaaaagaatgatggcaaaatgtgcataacattaaatttaccattttaaagatttctaagtgtctcgaagtacatttgcaatgtgtaactgccacctccagaactttttcatcatcctaaactgaaactctgtacccactaaacagtaactccccactccccctgtccccagtccctggtaacctctattctacttttttttttctctgtggattggcctattctaggtatctcttttaagtagaatcatatagtatttgtccttttgtgtccagccccctcattttttgagatgaggaatcaggcccagagaaggcagtggctcacccaaggtcacatcgcaaaccagaggcagagccaagaccagaacccaggtttcctgactcctaacaggtcttgcatccccagtagtgaatgagacactgctttgactttctgtaatcttggtttagccccttcctttctctgggctcagtctgcttcccaccactcacccattctttctttatcatctccctccaaagcctcttgtcctcctgcctcctcttctccttggctggttcctgccagcaaatggagtggccctggtccatgccaggttttcctcttctgggtccggagctcactatagtattcagccctcagtcctcccaggatgttcttcccagcactgctgcctcgtgcggattttcccgtaacctcagtaactggcttcttgtccccctgcttcctaccagggaagccttcctgtccgcgtctgtggtttcccaactctgatatttgctctcaaatgtggtggtgtcctggttctgtgtttatttattttgtgttttctcacacacacaaaaaaaagcctcttcctccaatgcatcaggaggcaccagccctgccagcccttctcactgggctcaccctgccccagcaaccccccggtgccacccttaagccacactgtcttctctgtaagcagcctgccagcagcagccccagcactttgcaatgggcgtgtgtgtggtggtgggtggggggggcttggatccctcctttttcctcccctgccctgcccaggcccagatggccttgactgtaaagcaggtgctgcctgacaggttcttctctccctgtctctggtcattgatccatctctttgtccattcagtatccaaccatcctctccattctcctctggacctcaccactctcagagctgcttgtcctggtgccttgtcactctttatttggaagccactcaaaccattcccaagaagagggacctcagctggcaatctggaaacctggcccaggtctgggcagatgtcttcacttctcctaccttcccagtcttgtgatcctgtgatgagcaccaggatggccctgtggtccctagagcacccctcatgctgtagggtcctgcagccccatcctttctctactgggccctggtatcctggctcctctctcagctctgccactgatctctgtgccttagtttacttctctgcacgggggactcaccccaagaccatttccagcagcttcccaggtgatgtggtgccccaaggctgggctttgccagctgtggcccagctccttagtgctgcccaggagacaccaggctgctcagaatgaggtgactgcgggcaccattctcagccagtggttcttgtattgcattccagcagcaggaatatcacctgggaacttgatagaagtgcagattagcagccccacccaagacccactgaattagagcttgtggagtggggccctacaagctggggttttaaggagccctccaaatgattctgacgcataagaatatgccaactgctgatctgggctagccattagtagagcctggggagggactgggactggctaggccaagaacaggtggaaaacaccagccttatctggactcctgagattgggaaccaccaccaacaaaaaccaaccctatagtcgctcctcttggaagaggaagagaagttgaagggcctggagaaagcacacattgtttgtttccctgctcctgctcacctctctcacttgtcttggttttacaaaaggctgtgtggatggtgccagccagggagggggtgggagtcctggggaggcaggaggcagaagaccctgactgtttctcccttgggaacctcaccataggccagatagcgcctcttcaaactgaaagaaatcttaactccacaaagaaagcatcctaaatccccagttcctcctcctcccaaccccagggataccttgtagacagtgccaaaaaacagctccaacccccagcagctgggaagagagccagaagctgcccttcctcctcatcctggcccctccccagcccccgccaatactgtgaacccccttcccactcagcctggtttcctggtgagggtcctgcagtcatgggccctgggggacccccagggcaaggcccatgggagggaagggaccaagggcatccttgggccaactgtccacctctcttgtccactattctctcctttccacttctgtcttcaaaaggctccttcctaggatggatcgggtgctaggacaactgcagtccaatccaccagctctccctgcccctgtgtcttatttcagacatgagaataactgtacagtgtaaacttataaagcgtttttaatggttgtagattggaaataaagtatgtcatatgaaca

SEQ ID NO: 300648 - DNA, 4184 bp, Homo sapiens
ggctctttgtcgctctcccctcctatctacgaatgtcccctgctctctgagcctcaccatgaccccaccgaaggtcccactacttcttccatgataatagtaataacaatggttatcatcatcccctgcacatcccgcctaaagcactttactatatagaaaacgtttcccctggccgggcatggtggctcacgcctgaaatcccagctctttgggaggctgaggcgagcggatcagttgaggtcaggagttcaacgccagcctggccaacgtggtgaatccctgtctgtactaaaagtacaaaaaattagctgagcatggtggtgcgtgcctgtaatcccagctactcgggaggctgaggtgggagaatcgcttgagcccaggaggcggaggttgcaggagcagagattgcgccactgcactccagcctggatgacagagtgagacccaatctcaaaaaagaaatcgtttcccaccccacatctccttcagacctctcagggacaactctgggaggcagccttggcaggacatgggttagtgcgcccattttgctgtgaggaaactgaggtacaggtctcatcccagagcatgagaagtcactgagtttagatgagaacttgggtccaactctgtcctgtttgctgtgcaaatccgctgccctgctgggggcttttggtgggtccagaatacccagaatatgctgctggccaacccaggcataaaacaagtccattctagatcactgagccttgtgtattccagagggtgatctgaggtccccattcagcagaattctctgagggcatgttcagaatgtagattcctgggccccaccttgaatttgcatgtttaacaaactctcctggggttgaggggtgggtgcagtggtcacacctgtaatcccaaagtactgggattataggcgtgagccacggcatccagcctcatctttcttttaaccaataaacatgatgctgtatcttaaaaagagcactgagcagggacttaagggatcgagtcctcaaccaaactgatttaattactcaggattttcaaaaagcatcagaggctatttacaatcttaatcataggggttcagtaaaataaaaataagaagtaaaaaagcaagagaaattattctgtaaatctaactggtgtaattcccataatcatgcaattaagttttactcttgagtttcctgacagccattggtaaaaagagaaacacatcaggatttataatttttatcatccaattatgggaagcaagcatgttggccccaggagacgaactcttctactaatttatagcatgtatcctttcatcaagggccactgagccagttggtgagtcaacgggtgaacctaagatgcaaggatgttttccaggtgactatttaaaaaaataaataatccaccaacgtgattgaccttggcgagatcatgtttctagtctatacctcagtttccccatctgtaaagtgaggataatgtcccaccccatgtaactgtggtgaggaccaactgcaacactgtgcctgcgagtctccttggaaaagtgtaaggttctacacaaatggaaagtgatctgatcacactcagtgtccccagcccagcctttcagtgccctggccctggggtgggggacaatactctcctcacccccttcactagtcttcatgaatagcaaggaggccataacataatttggtctaaaccccttcctttttaaaagaatgatggcaaaatgtgcataacattaaatttaccattttaaagatttctaagtgtctcgaagtacatttgcaatgtgtaactgccacctccagaactttttcatcatcctaaactgaaactctgtacccactaaacagtaactccccactccccctgtccccagtccctggtaacctctattctacttttttttttctctgtggattggcctattctaggtatctcttttaagtagaatcatatagtatttgtccttttgtgtccagccccctcattttttgagatgaggaatcaggcccagagaaggcagtggctcacccaaggtcacatcgcaaaccagaggcagagccaagaccagaacccaggtttcctgactcctaacaggtcttgcatccccagtagtgaatgagacactgctttgactttctgtaatcttggtttagccccttcctttctctgggctcagtctgcttcccaccactcacccattctttctttatcatctccctccaaagcctcttgtcctcctgcctcctcttctccttggctggttcctgccagcaaatggagtggccctggtccatgccaggttttcctcttctgggtccggagctcactatagtattcagccctcagtcctcccaggatgttcttcccagcactgctgcctcgtgcggattttcccgtaacctcagtaactggcttcttgtccccctgcttcctaccagggaagccttcctgtccgcgtctgtggtttcccaactctgatatttgctctcaaatgtggtggtgtcctggttctgtgtttatttattttgtgttttctcacacacacaaaaaaaagcctcttcctccaatgcatcaggaggcaccagccctgccagcccttctcactgggctcaccctgccccagcaaccccccggtgccacccttaagccacactgtcttctctgtaagcagcctgccagcagcagccccagcactttgcaatgggcgtgtgtgtggtggtgggtggggggggcttggatccctcctttttcctcccctgccctgcccaggcccagatggccttgactgtaaagcaggtgctgcctgacaggttcttctctccctgtctctggtcattgatccatctctttgtccattcagtatccaaccatcctctccattctcctctggacctcaccactctcagagctgcttgtcctggcagaatctacaattcaccccaactctatgccttacccctcccaacccaacagcatttgcagtttgcaaaatatacagacccaagtcctgaggggactgaggacatgatgctgggcccaagtctcctgctcagggcttctctccaatgccagccctgccactccttcctcaccctccttggagcctcctcctgctgcttgtctatcccaacggccctgctcccctcccttcctgcccttcaccagctttctggacaccatgccctgaggaagggacctttggttttctctaaacatctttgaagggctgaggcagtcagggctggctgccttgtcactctttatttggaagccactcaaaccattcccaagaagagggacctcagctggcaatctggaaacctggcccaggtctgggcagatgtcttcacttctcctaccttcccagtcttgtgatcctgtgatgagcaccaggatggccctgtggtccctagagcacccctcatgctgtagggtcctgcagccccatcctttctctactgggccctggtatcctggctcctctctcagctctgccactgatctctgtgccttagtttacttctctgcacgggggactcaccccaagaccatttccagcagcttcccaggtgatgtggtgccccaaggctgggctttgccagctgtggcccagctccttagtgctgcccaggagacaccaggctgctcagaatgaggtgactgcgggcaccattctcagccagtggttcttgtattgcattccagcagcaggaatatcacctgggaacttgatagaagtgcagattagcagccccacccaagacccactgaattagagcttgtggagtggggccctacaagctggggttttaaggagccctccaaatgattctgacgcataagaatatgccaactgctgatctgggctagccattagtagagcctggggagggactgggactggctaggccaagaacaggtggaaaacaccagccttatctggactcctgagattgggaaccaccaccaacaaaaaccaaccctatagtcgctcctcttggaagaggaagagaagttgaagggcctggagaaagcacacattgtttgtttccctgccctgtgtcttatttcagacatgagaataactgtacagtgtaaacttataaagcgtttttaatggttgtagattggaaataaagtatgtcatatgaaca

SEQ ID NO: 300649 - DNA, 3612 bp, Homo sapiens
  misc_feature (3601)..(3601): n is a, c, g, or t
ggctctttgtcgctctcccctcctatctacgaatgtcccctgctctctgagcctcaccatgaccccaccgaaggtcccactacttcttccatgataatagtaataacaatggttatcatcatcccctgcacatcccgcctaaagcactttactatatagaaaacgtttcccctggccgggcatggtggctcacgcctgaaatcccagctctttgggaggctgaggcgagcggatcagttgaggtcaggagttcaacgccagcctggccaacgtggtgaatccctgtctgtactaaaagtacaaaaaattagctgagcatggtggtgcgtgcctgtaatcccagctactcgggaggctgaggtgggagaatcgcttgagcccaggaggcggaggttgcaggagcagagattgcgccactgcactccagcctggatgacagagtgagacccaatctcaaaaaagaaatcgtttcccaccccacatctccttcagacctctcagggacaactctgggaggcagccttggcaggacatgggttagtgcgcccattttgctgtgaggaaactgaggtacaggtctcatcccagagcatgagaagtcactgagtttagatgagaacttgggtccaactctgtcctgtttgctgtgcaaatccgctgccctgctgggggcttttggtgggtccagaatacccagaatatgctgctggccaacccaggcataaaacaagtccattctagatcactgagccttgtgtattccagagggtgatctgaggtccccattcagcagaattctctgagggcatgttcagaatgtagattcctgggccccaccttgaatttgcatgtttaacaaactctcctggggttgaggggtgggtgcagtggtcacacctgtaatcccaaagtactgggattataggcgtgagccacggcatccagcctcatctttcttttaaccaataaacatgatgctgtatcttaaaaagagcactgagcagggacttaagggatcgagtcctcaaccaaactgatttaattactcaggattttcaaaaagcatcagaggctatttacaatcttaatcataggggttcagtaaaataaaaataagaagtaaaaaagcaagagaaattattctgtaaatctaactggtgtaattcccataatcatgcaattaagttttactcttgagtttcctgacagccattggtaaaaagagaaacacatcaggatttataatttttatcatccaattatgggaagcaagcatgttggccccaggagacgaactcttctactaatttatagcatgtatcctttcatcaagggccactgagccagttggtgagtcaacgggtgaacctaagatgcaaggatgttttccaggtgactatttaaaaaaataaataatccaccaacgtgattgaccttggcgagatcatgtttctagtctatacctcagtttccccatctgtaaagtgaggataatgtcccaccccatgtaactgtggtgaggaccaactgcaacactgtgcctgcgagtctccttggaaaagtgtaaggttctacacaaatggaaagtgatctgatcacactcagtgtccccagcccagcctttcagtgccctggccctggggtgggggacaatactctcctcacccccttcactagtcttcatgaatagcaaggaggccataacataatttggtctaaaccccttcctttttaaaagaatgatggcaaaatgtgcataacattaaatttaccattttaaagatttctaagtgtctcgaagtacatttgcaatgtgtaactgccacctccagaactttttcatcatcctaaactgaaactctgtacccactaaacagtaactccccactccccctgtccccagtccctggtaacctctattctacttttttttttctctgtggattggcctattctaggtatctcttttaagtagaatcatatagtatttgtccttttgtgtccagccccctcattttttgagatgaggaatcaggcccagagaaggcagtggctcacccaaggtcacatcgcaaaccagaggcagagccaagaccagaacccaggtttcctgactcctaacaggtcttgcatccccagtagtgaatgagacactgctttgactttctgtaatcttggtttagccccttcctttctctgggctcagtctgcttcccaccactcacccattctttctttatcatctccctccaaagcctcttgtcctcctgcctcctcttctccttggctggttcctgccagcaaatggagtggccctggtccatgccaggttttcctcttctgggtccggagctcactatagtattcagccctcagtcctcccaggatgttcttcccagcactgctgcctcgtgcggattttcccgtaacctcagtaactggcttcttgtccccctgcttcctaccagggaagccttcctgtccgcgtctgtggtttcccaactctgatatttgctctcaaatgtggtggtgtcctggttctgtgtttatttattttgtgttttctcacacacacaaaaaaaagcctcttcctccaatgcatcaggaggcaccagccctgccagcccttctcactgggctcaccctgccccagcaaccccccggtgccacccttaagccacactgtcttctctgtaagcagcctgccagcagcagccccagcactttgcaatgggcgtgtgtgtggtggtgggtggggggggcttggatccctcctttttcctcccctgccctgcccaggcccagatggccttgactgtaaagcaggtgctgcctgacaggttcttctctccctgtctctggtcattgatccatctctttgtccattcagtatccaaccatcctctccattctcctctggacctcaccactctcagagctgcttgtcctggcagaatctacaattcaccccaactctatgccttacccctcccaacccaacagcatttgcagtttgcaaaatatacagacccaagtcctgaggggactgaggacatgatgctgggcccaagtctcctgctcagggcttctctccaatgccagccctgccactccttcctcaccctccttggagcctcctcctgctgcttgtctatcccaacggccctgctcccctcccttcctgcccttcaccagctttctggacaccatgccctgaggaagggacctttggttttctctaaacatctttgaagggctgaggcagtcagggctggctgccttgtcactctttatttggaagccactcaaaccattcccaagaagagggacctcagctggcaatctggaaacctggcccaggtctgggcagatgtcttcacttctcctaccttcccagtcttgtgatcctgtgatgagcaccaggatggccctgtggtccctagagcacccctcatgctgtagggtcctgcagccccatcctttctctactgggccctggtatcctggctcctctctcagctctgccactgatctctgtgccttagtttacttctctgcacgggggactcaccccaagaccatttccagcagcaggaggagnacgggtccgag

SEQ ID NO: 300650 - DNA, 356 bp, Homo sapiens
cctatgatccaatgatgatcgaatttcgagctctggtaccccgaaagagacaacaggtgagggtcctgcagtcatgggccctgggggacccccagggcaaggcccatgggagggaagggaccaagggcatccttgggccaactgtccacctctcttgtccactattctctcctttccacttctgtcttcaaaaggctccttcctaggatggatcgggtgctaggacaactgcagtccaatccaccagctctccctgcccctgtgtcttatttcagacatgagaataactgtacagtgtaaacttataaagcgtttttaatggttgtagattggaaataaagtatgtcatatgaaca

SEQ ID NO: 300651 - DNA, 2541 bp, Homo sapiens
ccggcagaacctgttgagaaaggggcatccacagacatctgtgccttctgccacaagaccgtgtccccccgagagctggctgtggaggccatgaagaggcagtaccatgcccagtgcttcacgtgccgcacctgccgccgccagctggctgggcagagcttctaccagaaggatgggcgacccctctgcgaaccctgctaccaggacacactggagaggtgcggcaagtgtggcgaggtggtccgggaccacatcatcagggccctgggccaggccttccacccctcctgcttcacgtgtgtgacctgcgcccggtgcattggggatgagagctttgccctgggcagccagaacgaggtgtactgcctggacgacttctacaggaaattcgcccccgtctgcagcatctgtgaaaatcccatcatccctcgggatgggaaagatgccttcaaaatcgaatgcatgggaagaaacttccatgaaaattgctacaggtgtgaggactgcaggatcctcctgtctgtcgagcccacggaccaaggctgctaccccctgaacaaccatctcttctgcaagccatgccatgtgaagcggagtgctgcggggtgctgctgagagtgcccgctgggcagtgaacagaccactagccccggctggggcccttccctgacttggtttcccttcctaacctgctcttgcacactttccttctgagcctccatggagaccagcctgcaagccggcccagcctgtccaggatacagtggggctgagcacccccaggccttccactcctctaccctctgggcaccagaaggctcctggaccatgagcttcacccccagaattccctgctgaccctgccccacttccagggaaaagctgggggaggttggacccctctcactgactagctgtctggtaggggtgctaggaccagcctcgcctgtggggttgagctgtttgaggacaaactccaaggtcccttaaaaagtgccttttagaggctgggcatggtggctcacgcttgtaatcccagcactttgggaggccaaggtgggtggatcacctgaggtcaggagttcaagaccagcctggccaacatggtgaaaccctgtctctactaaaaatacaaaaattagccaggcatggtagcaggtgcctgtaatcccagctactggggaaagctgaggcaggagaattgcttcaatctggaaggcagaggttgcagtgagattgcaccattgcattccagcctgggcaacaagagggaaactccgtctcaaaaaaaaaaaaaagtgccttttaggccggatgtggtggctcatgcctgtaatcccagcactttgggaggccaaggcaggcagatcacttgaggtcaggagtttgagaccagcctggccaacacggcaaaaccccgtttctactaaaaatacaaaaattagctgggtgtggtggcgtgcgcctgtaatcccagctactcaggaggctgaggcaggagcattgcttgaacccgggaggcagaggttgcagtgagctgagatggcaccactgcactccagcctgggagacacagcgagactctgtctccaaaaaaaaaagtgctttttgaaaatgttgaggttgaaatgatgggaaccaacattctttggatttagtggggagcataatagcaaacacccccttggttcgcacatgtacaggaatgggacccagttggggcacagccatggacttccccgccctggaatgtgtggtgcaaagtggggccagggcccagacccaagaggagagggtggtccgcagacaccccgggatgtcagcatcccccgacctgccttctggcggcacctcccgggtgctgtgttgagtcagcaggcatggggtgagagcctggtatatgctgggaacagggtgcaggggccaagcgttcctccttcagccttgacttgggccatgcaccccctctcccccaaacacaaacaagcacttctccagtatggtgccaggacaggtgtcccttcagtcctctggttatgacctcaagtcctacttgggccctgcagcccagcctgtgttgtaacctctgcgtcctcaagaccacacctggaagattcttcttccctttgaaggagaatcatcattgttgctttatcacttctaagacattttgtacggcacggacaagttaaacagaatgtgcttccctccctggggtctcacacgctcccacgagaatgccacaggggccgtgcactgggcaggcttctctgtagaaccccaggggcttcggcccagaccacagcgtcttgccctgagcctagagcagggagtcccgaacttctgcattcacagaccacctccacaattgttataaccaaaggcctcctgttctgttatttcacttaaatcaacatgctattttgttttcactcacttctgactttagcctcgtgctgagccgtgtatccatgcagtcatgttcacgtgctagttacgtttttcttcttacacatgaaaataaatgcataagtgttagaa

SEQ ID NO: 300652 - DNA, 3200 bp, Homo sapiens
gcgggccaggacgaatccctccatccgggagcagtggtggcggtggaacaggtggcctggggtgctggaggcaggccaacctggagaggtaggcagtggctacctccactttacagatgaagacactgaggctcaggaggtggcgtgactgctccgggtctcacgcttagtaaacggccgcagaaccctggtcggtttgacgcaagaccctggcggatcccagagccaaacagagctggcctgaacctccaggacttcagcccttctaggagaatctgatcccaggtgagggaggtcacttggggtgtggcccagcaggcaggcgggactccagactgggaacggaagtcagccctgctggggctgggagctgaagcatctgttccttcctcgcgggtgtgagacaaggaagagtgatcattgccacaccaggagctgaagccatggcctcaaagcctgagaagagggtggcatcgtctgtctttatcaccctggcacccccgcgccgcgatgtggccgtggcggaggaagtgaggcaggcagtttgtgaggcccggcgtggccgcccctgggaggctcctgcccccatgaagacacccgaggctggcttggcggggaggcccagcccctggacaacccctggcagagctgcagccacagtgccggctgcacctatgcagctcttcaatggagacatctgtgccttctgccacaagaccgtgtccccccgagagctggctgtggaggccatgaagaggcagtaccatgcccagtgcttcacgtgccgcacctgccgccgccagctggctgggcagagcttctaccagaaggatgggcgacccctctgcgaaccctgctaccaggacacactggagaggtgcggcaagtgtggcgaggtggtccgggaccacatcatcagggccctgggccaggccttccacccctcctgcttcacgtgtgtgacctgcgcccggtgcattggggatgagagctttgccctgggcagccagaacgaggtgtactgcctggacgacttctacaggaaattcgcccccgtctgcagcatctgtgaaaatcccatcatccctcgggatgggaaagatgccttcaaaatcgaatgcatgggaagaaacttccatgaaaattgctacaggtgtgaggactgcaggatcctcctgtctgtcgagcccacggaccaaggctgctaccccctgaacaaccatctcttctgcaagccatgccatgtgaagcggagtgctgcggggtgctgctgagagtgcccgctgggcagtgaacagaccactagccccggctggggcccttccctgacttggtttcccttcctaacctgctcttgcacactttccttctgagcctccatggagaccagcctgcaagccggcccagcctgtccaggatacagtggggctgagcacccccaggccttccactcctctaccctctgggcaccagaaggctcctggaccatgagcttcacccccagaattccctgctgaccctgccccacttccagggaaaagctgggggaggttggacccctctcactgactagctgtctggtaggggtgctaggaccagcctcgcctgtggggttgagctgtttgaggacaaactccaaggtcccttaaaaagtgccttttagaggctgggcatggtggctcacgcttgtaatcccagcactttgggaggccaaggtgggtggatcacctgaggtcaggagttcaagaccagcctggccaacatggtgaaaccctgtctctactaaaaatacaaaaattagccaggcatggtagcaggtgcctgtaatcccagctactggggaaagctgaggcaggagaattgcttcaatctggaaggcagaggttgcagtgagattgcaccattgcattccagcctgggcaacaagagggaaactccgtctcaaaaaaaaaaaaaagtgccttttaggccggatgtggtggctcatgcctgtaatcccagcactttgggaggccaaggcaggcagatcacttgaggtcaggagtttgagaccagcctggccaacacggcaaaaccccgtttctactaaaaatacaaaaattagctgggtgtggtggcgtgcgcctgtaatcccagctactcaggaggctgaggcaggagcattgcttgaacccgggaggcagaggttgcagtgagctgagatggcaccactgcactccagcctgggagacacagcgagactctgtctccaaaaaaaaaagtgctttttgaaaatgttgaggttgaaatgatgggaaccaacattctttggatttagtggggagcataatagcaaacacccccttggttcgcacatgtacaggaatgggacccagttggggcacagccatggacttccccgccctggaatgtgtggtgcaaagtggggccagggcccagacccaagaggagagggtggtccgcagacaccccgggatgtcagcatcccccgacctgccttctggcggcacctcccgggtgctgtgttgagtcagcaggcatggggtgagagcctggtatatgctgggaacagggtgcaggggccaagcgttcctccttcagccttgacttgggccatgcaccccctctcccccaaacacaaacaagcacttctccagtatggtgccaggacaggtgtcccttcagtcctctggttatgacctcaagtcctacttgggccctgcagcccagcctgtgttgtaacctctgcgtcctcaagaccacacctggaagattcttcttccctttgaaggagaatcatcattgttgctttatcacttctaagacattttgtacggcacggacaagttaaacagaatgtgcttccctccctggggtctcacacgctcccacgagaatgccacaggggccgtgcactgggcaggcttctctgtagaaccccaggggcttcggcccagaccacagcgtcttgccctgagcctagagcagggagtcccgaacttctgcattcacagaccacctccacaattgttataaccaaaggcctcctgttctgttatttcacttaaatcaacatgctattttgttttcactcacttctgactttagcctcgtgctgagccgtgtatccatgcagtcatgttcacgtgctagttacgtttttcttcttacacatgaaaataaatgcataagtgttagaa

SEQ ID NO: 300653 - DNA, 2207 bp, Homo sapiens
tgtggttgtggcatgaacgcctcccaagcatgggttcctttgcttctaggaaattcgcccccgtctgcagcatctgtgaaaatcccatcatccctcgggatgggaaagatgccttcaaaatcgaatgcatgggaagaaacttccatgaaaattgctacaggtgtgaggactgcaggatcctcctgtctgtcgagcccacggaccaaggctgctaccccctgaacaaccatctcttctgcaagccatgccatgtgaagcggagtgctgcggggtgctgctgagagtgcccgctgggcagtgaacagaccactagccccggctggggcccttccctgacttggtttcccttcctaacctgctcttgcacactttccttctgagcctccatggagaccagcctgcaagccggcccagcctgtccaggatacagtggggctgagcacccccaggccttccactcctctaccctctgggcaccagaaggctcctggaccatgagcttcacccccagaattccctgctgaccctgccccacttccagggaaaagctgggggaggttggacccctctcactgactagctgtctggtaggggtgctaggaccagcctcgcctgtggggttgagctgtttgaggacaaactccaaggtcccttaaaaagtgccttttagaggctgggcatggtggctcacgcttgtaatcccagcactttgggaggccaaggtgggtggatcacctgaggtcaggagttcaagaccagcctggccaacatggtgaaaccctgtctctactaaaaatacaaaaattagccaggcatggtagcaggtgcctgtaatcccagctactggggaaagctgaggcaggagaattgcttcaatctggaaggcagaggttgcagtgagattgcaccattgcattccagcctgggcaacaagagggaaactccgtctcaaaaaaaaaaaaaagtgccttttaggccggatgtggtggctcatgcctgtaatcccagcactttgggaggccaaggcaggcagatcacttgaggtcaggagtttgagaccagcctggccaacacggcaaaaccccgtttctactaaaaatacaaaaattagctgggtgtggtggcgtgcgcctgtaatcccagctactcaggaggctgaggcaggagcattgcttgaacccgggaggcagaggttgcagtgagctgagatggcaccactgcactccagcctgggagacacagcgagactctgtctccaaaaaaaaaagtgctttttgaaaatgttgaggttgaaatgatgggaaccaacattctttggatttagtggggagcataatagcaaacacccccttggttcgcacatgtacaggaatgggacccagttggggcacagccatggacttccccgccctggaatgtgtggtgcaaagtggggccagggcccagacccaagaggagagggtggtccgcagacaccccgggatgtcagcatcccccgacctgccttctggcggcacctcccgggtgctgtgttgagtcagcaggcatggggtgagagcctggtatatgctgggaacagggtgcaggggccaagcgttcctccttcagccttgacttgggccatgcaccccctctcccccaaacacaaacaagcacttctccagtatggtgccaggacaggtgtcccttcagtcctctggttatgacctcaagtcctacttgggccctgcagcccagcctgtgttgtaacctctgcgtcctcaagaccacacctggaagattcttcttccctttgaaggagaatcatcattgttgctttatcacttctaagacattttgtacggcacggacaagttaaacagaatgtgcttccctccctggggtctcacacgctcccacgagaatgccacaggggccgtgcactgggcaggcttctctgtagaaccccaggggcttcggcccagaccacagcgtcttgccctgagcctagagcagggagtcccgaacttctgcattcacagaccacctccacaattgttataaccaaaggcctcctgttctgttatttcacttaaatcaacatgctattttgttttcactcacttctgactttagcctcgtgctgagccgtgtatccatgcagtcatgttcacgtgctagttacgtttttcttcttacacatgaaaataaatgcataagtgttagaa

SEQ ID NO: 300654 - DNA, 2222 bp, Homo sapiens
tcctgccaagaagaaacagacatctctgcagtcccatagcaacgggactgaaattgctcaggaggaaattcgcccccgtctgcagcatctgtgaaaatcccatcatccctcgggatgggaaagatgccttcaaaatcgaatgcatgggaagaaacttccatgaaaattgctacaggtgtgaggactgcaggatcctcctgtctgtcgagcccacggaccaaggctgctaccccctgaacaaccatctcttctgcaagccatgccatgtgaagcggagtgctgcggggtgctgctgagagtgcccgctgggcagtgaacagaccactagccccggctggggcccttccctgacttggtttcccttcctaacctgctcttgcacactttccttctgagcctccatggagaccagcctgcaagccggcccagcctgtccaggatacagtggggctgagcacccccaggccttccactcctctaccctctgggcaccagaaggctcctggaccatgagcttcacccccagaattccctgctgaccctgccccacttccagggaaaagctgggggaggttggacccctctcactgactagctgtctggtaggggtgctaggaccagcctcgcctgtggggttgagctgtttgaggacaaactccaaggtcccttaaaaagtgccttttagaggctgggcatggtggctcacgcttgtaatcccagcactttgggaggccaaggtgggtggatcacctgaggtcaggagttcaagaccagcctggccaacatggtgaaaccctgtctctactaaaaatacaaaaattagccaggcatggtagcaggtgcctgtaatcccagctactggggaaagctgaggcaggagaattgcttcaatctggaaggcagaggttgcagtgagattgcaccattgcattccagcctgggcaacaagagggaaactccgtctcaaaaaaaaaaaaaagtgccttttaggccggatgtggtggctcatgcctgtaatcccagcactttgggaggccaaggcaggcagatcacttgaggtcaggagtttgagaccagcctggccaacacggcaaaaccccgtttctactaaaaatacaaaaattagctgggtgtggtggcgtgcgcctgtaatcccagctactcaggaggctgaggcaggagcattgcttgaacccgggaggcagaggttgcagtgagctgagatggcaccactgcactccagcctgggagacacagcgagactctgtctccaaaaaaaaaagtgctttttgaaaatgttgaggttgaaatgatgggaaccaacattctttggatttagtggggagcataatagcaaacacccccttggttcgcacatgtacaggaatgggacccagttggggcacagccatggacttccccgccctggaatgtgtggtgcaaagtggggccagggcccagacccaagaggagagggtggtccgcagacaccccgggatgtcagcatcccccgacctgccttctggcggcacctcccgggtgctgtgttgagtcagcaggcatggggtgagagcctggtatatgctgggaacagggtgcaggggccaagcgttcctccttcagccttgacttgggccatgcaccccctctcccccaaacacaaacaagcacttctccagtatggtgccaggacaggtgtcccttcagtcctctggttatgacctcaagtcctacttgggccctgcagcccagcctgtgttgtaacctctgcgtcctcaagaccacacctggaagattcttcttccctttgaaggagaatcatcattgttgctttatcacttctaagacattttgtacggcacggacaagttaaacagaatgtgcttccctccctggggtctcacacgctcccacgagaatgccacaggggccgtgcactgggcaggcttctctgtagaaccccaggggcttcggcccagaccacagcgtcttgccctgagcctagagcagggagtcccgaacttctgcattcacagaccacctccacaattgttataaccaaaggcctcctgttctgttatttcacttaaatcaacatgctattttgttttcactcacttctgactttagcctcgtgctgagccgtgtatccatgcagtcatgttcacgtgctagttacgtttttcttcttacacatgaaaataaatgcataagtgttagaa

SEQ ID NO: 300655 - DNA, 1010 bp, Homo sapiens
gcgggccaggacgaatccctccatccgggagcagtggtggcggtggaacaggtggcctggggtgctggaggcaggccaacctggagaggtaggcagtggctacctccactttacagatgaagacactgaggctcaggaggtggcgtgactgctccgggtctcacgcttagtaaacggccgcagaaccctggtcggtttgacgcaagaccctggcggatcccagagccaaacagagctggcctgaacctccaggacttcagcccttctaggagaatctgatcccaggtgagggaggtcacttggggtgtggcccagcaggcaggcgggatgctgtgttgagtcagcaggcatggggtgagagcctggtatatgctgggaacagggtgcaggggccaagcgttcctccttcagccttgacttgggccatgcaccccctctcccccaaacacaaacaagcacttctccagtatggtgccaggacaggtgtcccttcagtcctctggttatgacctcaagtcctacttgggccctgcagcccagcctgtgttgtaacctctgcgtcctcaagaccacacctggaagattcttcttccctttgaaggagaatcatcattgttgctttatcacttctaagacattttgtacggcacggacaagttaaacagaatgtgcttccctccctggggtctcacacgctcccacgagaatgccacaggggccgtgcactgggcaggcttctctgtagaaccccaggggcttcggcccagaccacagcgtcttgccctgagcctagagcagggagtcccgaacttctgcattcacagaccacctccacaattgttataaccaaaggcctcctgttctgttatttcacttaaatcaacatgctattttgttttcactcacttctgactttagcctcgtgctgagccgtgtatccatgcagtcatgttcacgtgctagttacgtttttcttcttacacatgaaaataaatgcataagtgttagaa

SEQ ID NO: 300656 - DNA, 2025 bp, Homo sapiens
gcgggccaggacgaatccctccatccgggagcagtggtggcggtggaacaggtggcctggggtgctggaggcaggccaacctggagaggtaggcagtggctacctccactttacagatgaagacactgaggctcaggaggtggcgtgactgctccgggtctcacgcttagtaaacggccgcagaaccctggtcggtttgacgcaagaccctggcggatcccagagccaaacagagctggcctgaacctccaggacttcagcccttctaggagaatctgatcccaggtgagggaggtcacttggggtgtggcccagcaggcaggcgggactccagactgggaacggaagtcagccctgctggggctgggagctgaagcatctgttccttcctcgcgggtgtgagacaaggaagagtgatcattgccacaccaggagctgaagccatggcctcaaagcctgagaagagggtggcatcgtctgtctttatcaccctggcacccccgcgccgcgatgtggccgtggcggaggaagtgaggcaggcagtttgtgaggcccggcgtggccgcccctgggaggctcctgcccccatgaagacacccgaggctggcttggcggggaggcccagcccctggacaacccctggcagagctgcagccacagtgccggctgcacctatgcagctcttcaatggagacatctgtgccttctgccacaagaccgtgtccccccgagagctggctgtggaggccatgaagaggcagtaccatgcccagtgcttcacgtgccgcacctgccgccgccagctggctgggcagagcttctaccagaaggatgggcgacccctctgcgaaccctgctaccaggacacactggagaggtgcggcaagtgtggcgaggtggtccgggaccacatcatcagggccctgggccaggccttccacccctcctgcttcacgtgtgtgacctgcgcccggtgcattggggatgagagctttgccctgggcagccagaacgaggtgtactgcctggacgacttctacaggaaattcgcccccgtctgcagcatctgtgaaaatcccatcatccctcgggatgggaaagatgccttcaaaatcgaatgcatgggaagaaacttccatgaaaattgctacaggtgtgaggactgcaggatcctcctgtctgtcgagcccacggaccaaggctgctaccccctgaacaaccatctcttctgcaagccatgccatgtgaagcggagtgctgcggggtgctgctgagagtgcccgctgggcagtgaacagaccactagccccggctggggcccttccctgacttggtttcccttcctaacctgctcttgcacactttccttctgagcctccatggagaccagcctgcaagccggcccagcctgtccaggatacagtggggctgagcacccccaggccttccactcctctaccctctgggcaccagaaggctcctggaccatgagcttcacccccagaattccctgctgaccctgccccacttccagggaaaagctgggggaggttggacccctctcactgactagctgtctggtaggggtgctaggaccagcctcgcctgtggggttgagctgtttgaggacaaactccaaggtcccttaaaaagtgccttttagaggctgggcatggtggctcacgcttgtaatcccagcactttgggaggccaaggtgggtggatcacctgaggtcaggagttcaagaccagcctggccaacatggtgaaaccctgtctctactaaaaatacaaaaattagccaggcatggtagcaggtgcctgtaatcccagctactggggaaagctgaggcaggagaattgcttcaatctggaaggcagaggttgcagtgagccaagatcccgccactgcacttcagcctgggcaacagtgtgacacaccatctctgataaataagcaaacgaacaaaataaaccaaacacataagtatgcccactgatttccttattgtctgtggtgactct

SEQ ID NO: 300657 - DNA, 753 bp, Homo sapiens
gcgggccaggacgaatccctccatccgggagcagtggtggcggtggaacaggtggcctggggtgctggaggcaggccaacctggagaggtaggcagtggctacctccactttacagatgaagacactgaggctcaggaggtggcgtgactgctccgggtctcacgcttagtaaacggccgcagaaccctggtcggtttgacgcaagaccctggcggatcccagagccaaacagagctggcctgaacctccaggacttcagcccttctaggagaatctgatcccaggtgagggaggtcacttggggtgtggcccagcaggcaggcgggactccagactgggaacggaagtcagccctgctggggctgggagctgaagcatctgttccttcctcgcgggtgtgagacaaggaagagtgatcattgccacaccaggagctgaagccatggcctcaaagcctgagaagagggtggcatcgtctgtctttatcaccctggcacccccgcgccgcgatgtggccgtggcggaggaagtgaggcaggcagtttgtgaggcccggcgtggccgcccctgggaggctcctgcccccatgaagacacccgaggctggcttggcggggaggcccagcccctggacaacccctggcagagctgcagccacagtgccggctgcacctatgcagctcttcaatggaggatgcccaccccctcctcctgtcctggatggtgaggacgtgcttcctgacctggacctcc

SEQ ID NO: 300658 - DNA, 1826 bp, Homo sapiens
caagggaaggggaggagaagaggggtggggaaggacattccacaggcttttttggcccctgccagagacagaagggggtcaaagagaaagggaaaggagcaagccaggaagccagacaacaacagcatcaaaacaaggctgtttctgtgtgtgaggaactttgcctgggagataaaattagacctagagctttctgacagggagtctgaagcgtgggacatggaccgttcactgggatggcaagggaattctgtccctgaggacaggactgaagctgggatcaagcgtttcctggaggacaccacggatgatggagaactgagcaagttcgtgaaggatttctcaggaaatgcgagctgccacccaccagaggctaagacctgggcatccaggccccaagtcccggagccaaggccccaggccccggacctctatgatgatgacctggagttcagacccccctcgcggccccagtcctctgacaaccagcagtacttctgtgccccagcccctctcagcccatctgccaggccccgcagcccatggggcaagcttgatccctatgattcctctgaggatgacaaggagtatgtgggctttgcaaccctccccaaccaagtccaccgaaagtccgtgaagaaaggctttgactttaccctcatggtggcaggagagtctggcctgggcaaatccacacttgtcaatagcctcttcctcactgatctgtaccgggaccggaaacttcttggtgctgaagagaggatcatgcaaactgtggagatcactaagcatgcagtggacatagaagagaagggtgtgaggctgcggctcaccattgtggacacaccaggttttggggatgcagtcaacaacacagagtgctggaagcctgtggcagaatacattgatcagcagtttgagcagtatttccgagacgagagtggcctgaaccgaaagaacatccaagacaacagggtgcactgctgcctgtacttcatctcacccttcggccatgggctccggccattggatgttgaattcatgaaggccctgcatcagcgggtcaacatcgtgcctatcctggctaaggcagacacactgacacctcccgaagtggaccacaagaaacgcaaaatccgggaggagattgagcattttggaatcaagatctatcaattcccagactgtgactctgatgaggatgaggacttcaaattgcaggaccaagccctaaaggaaagcatcccatttgcagtaattggcagcaacactgtagtagaggccagagggcggcgagttcggggtcgactctacccctggggcatcgtggaagtggaaaacccagggcactgcgactttgtgaagctgaggacaatgctggtacgtacccacatgcaggacctgaaggatgtgacacgggagacacattatgagaactaccgggcacagtgcatccagagcatgacccgcctggtggtgaaggaacggaatcgcaacaaactgactcgggaaagtggtaccgacttccccatccctgctgtcccaccagggacagatccagaaactgagaagcttatccgagagaaagatgaggagctgcggcggatgcaggagatgctacacaaaatacaaaaacagatgaaggagaactattaactggctttcagccctggatatttaaatctcctcctcttcttcctgtccatgccggcccctcccagcaccagctctgctcaggccccttcagctactgccacttcgccttacatccctgctgactgcccagagactcagaggaaataaagtttaataaatctgtaggtggc

SEQ ID NO: 300659 - DNA, 1736 bp, Homo sapiens
ttggcctcgaggccaagattcggcacgaggaacagcatcaaaacaaggctgtttctgtgtgtgaggaactttgcctgggagataaaattagacctagagctttctgacagggagtctgaagcgtgggacatggaccgttcactgggatggcaagggaattctgtccctgaggacaggactgaagctgggatcaagcgtttcctggaggacaccacggatgatggagaactgagcaagttcgtgaaggatttctcaggaaatgcgagctgccacccaccagaggctaagacctgggcatccaggccccaagtcccggagccaaggccccaggccccggacctctatgatgatgacctggagttcagacccccctcgcggccccagtcctctgacaaccagcagtacttctgtgccccagcccctctcagcccatctgccaggccccgcagcccatggggcaagcttgatccctatgattcctctgaggatgacaaggagtatgtgggctttgcaaccctccccaaccaagtccaccgaaagtccgtgaagaaaggctttgactttaccctcatggtggcaggagagtctggcctgggcaaatccacacttgtcaatagcctcttcctcactgatctgtaccgggaccggaaacttcttggtgctgaagagaggatcatgcaaactgtggagatcactaagcatgcagtggacatagaagagaagggtgtgaggctgcggctcaccattgtggacacaccaggttttggggatgcagtcaacaacacagagtgctggaagcctgtggcagaatacattgatcagcagtttgagcagtatttccgagacgagagtggcctgaaccgaaagaacatccaagacaacagggtgcactgctgcctgtacttcatctcacccttcggccatgggctccggccattggatgttgaattcatgaaggccctgcatcagcgggtcaacatcgtgcctatcctggctaaggcagacacactgacacctcccgaagtggaccacaagaaacgcaaaatccgggaggagattgagcattttggaatcaagatctatcaattcccagactgtgactctgatgaggatgaggacttcaaattgcaggaccaagccctaaaggaaagcatcccatttgcagtaattggcagcaacactgtagtagaggccagagggcggcgagttcggggtcgactctacccctggggcatcgtggaagtggaaaacccagggcactgcgactttgtgaagctgaggacaatgctggtacgtacccacatgcaggacctgaaggatgtgacacgggagacacattatgagaactaccgggcacagtgcatccagagcatgacccgcctggtggtgaaggaacggaatcgcaacaaactgactcgggaaagtggtaccgacttccccatccctgctgtcccaccagggacagatccagaaactgagaagcttatccgagagaaagatgaggagctgcggcggatgcaggagatgctacacaaaatacaaaaacagatgaaggagaactattaactggctttcagccctggatatttaaatctcctcctcttcttcctgtccatgccggcccctcccagcaccagctctgctcaggccccttcagctactgccacttcgccttacatccctgctgactgcccagagactcagaggaaataaagtttaataaatctgtaggtggc

SEQ ID NO: 300660 - DNA, 1674 bp, Homo sapiens
cccgcagcggtccgcactcggggaggcgggagggtgacggcggtgctgcgaggtcggcgcgcagctccgccgcgggtcgctcgggcgctgtccaggcggagccggccccgcccgggctgcagccatgatcaagcgtttcctggaggacaccacggatgatggagaactgagcaagttcgtgaaggatttctcaggaaatgcgagctgccacccaccagaggctaagacctgggcatccaggccccaagtcccggagccaaggccccaggccccggacctctatgatgatgacctggagttcagacccccctcgcggccccagtcctctgacaaccagcagtacttctgtgccccagcccctctcagcccatctgccaggccccgcagcccatggggcaagcttgatccctatgattcctctgaggatgacaaggagtatgtgggctttgcaaccctccccaaccaagtccaccgaaagtccgtgaagaaaggctttgactttaccctcatggtggcaggagagtctggcctgggcaaatccacacttgtcaatagcctcttcctcactgatctgtaccgggaccggaaacttcttggtgctgaagagaggatcatgcaaactgtggagatcactaagcatgcagtggacatagaagagaagggtgtgaggctgcggctcaccattgtggacacaccaggttttggggatgcagtcaacaacacagagtgctggaagcctgtggcagaatacattgatcagcagtttgagcagtatttccgagacgagagtggcctgaaccgaaagaacatccaagacaacagggtgcactgctgcctgtacttcatctcacccttcggccatgggctccggccattggatgttgaattcatgaaggccctgcatcagcgggtcaacatcgtgcctatcctggctaaggcagacacactgacacctcccgaagtggaccacaagaaacgcaaaatccgggaggagattgagcattttggaatcaagatctatcaattcccagactgtgactctgatgaggatgaggacttcaaattgcaggaccaagccctaaaggaaagcatcccatttgcagtaattggcagcaacactgtagtagaggccagagggcggcgagttcggggtcgactctacccctggggcatcgtggaagtggaaaacccagggcactgcgactttgtgaagctgaggacaatgctggtacgtacccacatgcaggacctgaaggatgtgacacgggagacacattatgagaactaccgggcacagtgcatccagagcatgacccgcctggtggtgaaggaacggaatcgcaacaaactgactcgggaaagtggtaccgacttccccatccctgctgtcccaccagggacagatccagaaactgagaagcttatccgagagaaagatgaggagctgcggcggatgcaggagatgctacacaaaatacaaaaacagatgaaggagaactattaactggctttcagccctggatatttaaatctcctcctcttcttcctgtccatgccggcccctcccagcaccagctctgctcaggccccttcagctactgccacttcgccttacatccctgctgactgcccagagactcagaggaaataaagtttaataaatctgtaggtggc

SEQ ID NO: 300661 - DNA, 1947 bp, Homo sapiens
cccgcagcggtccgcactcggggaggcgggagggtgacggcggtgctgcgaggtcggcgcgcagctccgccgcgggtcgctcgggcgctgtccaggcggagccggccccgcccgggctgcagccatgatcaagcgtttcctggaggacaccacggatgatggagaactgagcaagttcgtgaaggatttctcaggaaatgcgagctgccacccaccagaggctaagacctgggcatccaggccccaagtcccggagccaaggccccaggccccggacctctatgatgatgacctggagttcagacccccctcgcggccccagtcctctgacaaccagcagtacttctgtgccccagcccctctcagcccatctgccaggccccgcagcccatggggcaagcttgatccctatgattcctctgaggatgacaaggagtatgtgggctttgcaaccctccccaaccaagtccaccgaaagtccgtgaagaaaggctttgactttaccctcatggtggcaggagagtctggcctgggcaaatccacacttgtcaatagcctcttcctcactgatctgtaccgggaccggaaacttcttggtgctgaagagaggatcatgcaaactgtggagatcactaagcatgcagtggacatagaagagaagggtgtgaggctgcggctcaccattgtggacacaccaggttttggggatgcagtcaacaacacagagtgctggaagcctgtggcagaatacattgatcagcagtttgagcagtatttccgagacgagagtggcctgaaccgaaagaacatccaagacaacagggtgcactgctgcctgtacttcatctcacccttcggccatgggtatggtccaagcctgaggctcctggcaccaccgggtgctgtcaagggaacaggccaagagcaccaggggcagggctgccactagcaggtggtcacaggttcctgttccccaggctccggccattggatgttgaattcatgaaggccctgcatcagcgggtcaacatcgtgcctatcctggctaaggcagacacactgacacctcccgaagtggaccacaagaaacgcaaaatccgggaggagattgagcattttggaatcaagatctatcaattcccagactgtgactctgatgaggatgaggacttcaaattgcaggaccaagccctaaaggaaagcatcccatttgcagtaattggcagcaacactgtagtagaggccagagggcggcgagttcggggtcgactctacccctggggcatcgtggaagtggaaaacccagggcactgcgactttgtgaagctgaggacaatgctggtacgtacccacatgcaggacctgaaggatgtgacacgggagacacattatgagaactaccgggcacagtgcatccagagcatgacccgcctggtggtgaaggaacggaatcgcaacgcaagtatgaccagaagccaggacaaagctggcagggggagatcccaagcctagccttgggtgagaccaagccctacttttgttcttctataggccctgggctcaatctaagcgggtgctggggtcctcctcgccttatcaacccttttctccctttagcaaactgactcgggaaagtggtaccgacttccccatccctgctgtcccaccagggacagatccagaaactgagaagcttatccgagagaaagatgaggagctgcggcggatgcaggagatgctacacaaaatacaaaaacagatgaaggagaactattaactggctttcagccctggatatttaaatctcctcctcttcttcctgtccatgccggcccctcccagcaccagctctgctcaggccccttcagctactgccacttcgccttacatccctgctgactgcccagagactcagaggaaataaagtttaataaatctgtaggtggc

SEQ ID NO: 300662 - DNA, 1294 bp, Homo sapiens
tttaacttgtatacagtacagtttcaaacaaaattggggcaactttgtacttcgtaccttattaaaactggggcgaacacagcgtgtttggtttgatcttgtcttcataggatcttctggctgattccttctctggatgagtcctgagaatttctagaatctcgggagagtaaaggagggtctggagccttctctatgtacaaggaaatcccagttttgttaaaaacttgccaaaggcttggtgatataactccaaagacaaatccacagattcctttcaggtacttctttgggattctgtgaagaattgtggctgtacactaggatgtttaataggaaggaagctccttcctttatgacatcaccagacagagaggtagctaaggggattatttgagacactcttagaacaacagccacttttgtgggagcccaagaaacagcagctttaaaacagggtaaatattcaggcatcattaggatcctgaatacaagccagccagtaaaatacgggatctactcagaagggcacaatctatcagatggtcaagacaaataaacctggggccaaggtagcggtttcagcacagagagggtctgaggttactactaacacatcccctcagcagggacatgggtacgttcttgcctcaagccatcgaagtgctgcagtctccctgaacccttcccaccgaagatcagaagctgcacatcccaccactccccattcggcatcagactaccctcgatctgtctccctccagtcaggacctggacactatgcagtacccactcctcggggaaccgagactggaccaagaacagaatcatcccgccattcctctccccatctaaagagccagaagactcagacactggcttcccatgcttcaagcagacaatggaaagttagtccacccagagaggaagcagcacgaagaggcagtgagagcaagtcagggcgcgaggtcggccatcatgcttcatcaatcccagatgccaaatctactcatcagttgagttttcaagaccagaagaataacttacaatcacaaatcttagaagatgacccaccatccaaggtccagaacccccaaggagtcagagttccccgtaggattttgtcttacccaaaggatgaagcagtacaaactgagcccatccaaagaattacgactactagtgagatcagatctccaaggagtccctctctcctagagcacggaagcagctgtgtctctgcagactatcagacagcccagagaagggtccctgtagaagaatcagaaacagg

SEQ ID NO: 300663 - DNA, 276 bp, Homo sapiens
aaggactctccaaaagtccccattttgatgcctgtgcctattccagctgcggcggatgcaggagatgctacacaaaatacaaaaacagatgaaggagaactattaactggctttcagccctggatatttaaatctcctcctcttcttcctgtccatgccggcccctcccagcaccagctctgctcaggccccttcagctactgccacttcgccttacatccctgctgactgcccagagactcagaggaaataaagtttaataaatctgtaggtggc

SEQ ID NO: 300664 - DNA, 1746 bp, Homo sapiens
cccgcagcggtccgcactcggggaggcgggagggtgacggcggtgctgcgaggtcggcgcgcagctccgccgcgggtcgctcgggcgctgtccaggcggagccggccccgcccgggctgcagccatggggccagtaccaacttcatttggaaaacgcagaggaggcccacaaacactgcctgcctcaccaggagggatgatcaagcgtttcctggaggacaccacggatgatggagaactgagcaagttcgtgaaggatttctcaggaaatgcgagctgccacccaccagaggctaagacctgggcatccaggccccaagtcccggagccaaggccccaggccccggacctctatgatgatgacctggagttcagacccccctcgcggccccagtcctctgacaaccagcagtacttctgtgccccagcccctctcagcccatctgccaggccccgcagcccatggggcaagcttgatccctatgattcctctgaggatgacaaggagtatgtgggctttgcaaccctccccaaccaagtccaccgaaagtccgtgaagaaaggctttgactttaccctcatggtggcaggagagtctggcctgggcaaatccacacttgtcaatagcctcttcctcactgatctgtaccgggaccggaaacttcttggtgctgaagagaggatcatgcaaactgtggagatcactaagcatgcagtggacatagaagagaagggtgtgaggctgcggctcaccattgtggacacaccaggttttggggatgcagtcaacaacacagagtgctggaagcctgtggcagaatacattgatcagcagtttgagcagtatttccgagacgagagtggcctgaaccgaaagaacatccaagacaacagggtgcactgctgcctgtacttcatctcacccttcggccatgggctccggccattggatgttgaattcatgaaggccctgcatcagcgggtcaacatcgtgcctatcctggctaaggcagacacactgacacctcccgaagtggaccacaagaaacgcaaaatccgggaggagattgagcattttggaatcaagatctatcaattcccagactgtgactctgatgaggatgaggacttcaaattgcaggaccaagccctaaaggaaagcatcccatttgcagtaattggcagcaacactgtagtagaggccagagggcggcgagttcggggtcgactctacccctggggcatcgtggaagtggaaaacccagggcactgcgactttgtgaagctgaggacaatgctggtacgtacccacatgcaggacctgaaggatgtgacacgggagacacattatgagaactaccgggcacagtgcatccagagcatgacccgcctggtggtgaaggaacggaatcgcaacaaactgactcgggaaagtggtaccgacttccccatccctgctgtcccaccagggacagatccagaaactgagaagcttatccgagagaaagatgaggagctgcggcggatgcaggagatgctacacaaaatacaaaaacagatgaaggagaactattaactggctttcagccctggatatttaaatctcctcctcttcttcctgtccatgccggcccctcccagcaccagctctgctcaggccccttcagctactgccacttcgccttacatccctgctgactgcccagagactcagaggaaataaagtttaataaatctgtaggtggc

SEQ ID NO: 300665 - DNA, 1702 bp, Homo sapiens
acaatgagagttgggggaaacagttcctcttctgagctgaggatggggtagaacaggcttctacagaggagtcagtccattctctgccttccactccctgtgggtcatggttcaggccaggccctctcgtgcactgccggctctgggcagaggggatcaagcgtttcctggaggacaccacggatgatggagaactgagcaagttcgtgaaggatttctcaggaaatgcgagctgccacccaccagaggctaagacctgggcatccaggccccaagtcccggagccaaggccccaggccccggacctctatgatgatgacctggagttcagacccccctcgcggccccagtcctctgacaaccagcagtacttctgtgccccagcccctctcagcccatctgccaggccccgcagcccatggggcaagcttgatccctatgattcctctgaggatgacaaggagtatgtgggctttgcaaccctccccaaccaagtccaccgaaagtccgtgaagaaaggctttgactttaccctcatggtggcaggagagtctggcctgggcaaatccacacttgtcaatagcctcttcctcactgatctgtaccgggaccggaaacttcttggtgctgaagagaggatcatgcaaactgtggagatcactaagcatgcagtggacatagaagagaagggtgtgaggctgcggctcaccattgtggacacaccaggttttggggatgcagtcaacaacacagagtgctggaagcctgtggcagaatacattgatcagcagtttgagcagtatttccgagacgagagtggcctgaaccgaaagaacatccaagacaacagggtgcactgctgcctgtacttcatctcacccttcggccatgggctccggccattggatgttgaattcatgaaggccctgcatcagcgggtcaacatcgtgcctatcctggctaaggcagacacactgacacctcccgaagtggaccacaagaaacgcaaaatccgggaggagattgagcattttggaatcaagatctatcaattcccagactgtgactctgatgaggatgaggacttcaaattgcaggaccaagccctaaaggaaagcatcccatttgcagtaattggcagcaacactgtagtagaggccagagggcggcgagttcggggtcgactctacccctggggcatcgtggaagtggaaaacccagggcactgcgactttgtgaagctgaggacaatgctggtacgtacccacatgcaggacctgaaggatgtgacacgggagacacattatgagaactaccgggcacagtgcatccagagcatgacccgcctggtggtgaaggaacggaatcgcaacaaactgactcgggaaagtggtaccgacttccccatccctgctgtcccaccagggacagatccagaaactgagaagcttatccgagagaaagatgaggagctgcggcggatgcaggagatgctacacaaaatacaaaaacagatgaaggagaactattaactggctttcagccctggatatttaaatctcctcctcttcttcctgtccatgccggcccctcccagcaccagctctgctcaggccccttcagctactgccacttcgccttacatccctgctgactgcccagagactcagaggaaataaagtttaataaatctgtaggtggc

SEQ ID NO: 300666 - DNA, 1939 bp, Homo sapiens
caagggaaggggaggagaagaggggtggggaaggacattccacaggcttttttggcccctgccagagacagaagggggtcaaagagaaagggaaaggagcaagccaggaagccagacaacaacagcatcaaaacaaggctgtttctgtgtgtgaggaactttgcctgggagataaaattagacctagagctttctgacagggagtctgaagcgtgggacatggaccgttcactgggatggcaagggaattctgtccctgaggacaggactgaagctgggatcaagcgtttcctggaggacaccacggatgatggagaactgagcaagttcgtgaaggatttctcaggaaatgcgagctgccacccaccagaggctaagacctgggcatccaggccccaagtcccggagccaaggccccaggccccggacctctatgatgatgacctggagttcagacccccctcgcggccccagtcctctgacaaccagcagtacttctgtgccccagcccctctcagcccatctgccaggccccgcagcccatggggcaagcttgatccctatgattcctctgaggatgacaaggagtatgtgggctttgcaaccctccccaaccaagtccaccgaaagtccgtgaagaaaggctttgactttaccctcatggtggcaggagagtctggcctgggcaaatccacacttgtcaatagcctcttcctcactgatctgtaccgggaccggaaacttcttggtgctgaagagaggatcatgcaaactgtggagatcactaagcatgcagtggacatagaagagaagggtgtgaggctgcggctcaccattgtggacacaccaggttttggggatgcagtcaacaacacagagtgctggaagcctgtggcagaatacattgatcagcagtttgagcagtatttccgagacgagagtggcctgaaccgaaagaacatccaagacaacagggtgcactgctgcctgtacttcatctcacccttcggccatgggtatggtccaagcctgaggctcctggcaccaccgggtgctgtcaagggaacaggccaagagcaccaggggcagggctgccactagcaggtggtcacaggttcctgttccccaggctccggccattggatgttgaattcatgaaggccctgcatcagcgggtcaacatcgtgcctatcctggctaaggcagacacactgacacctcccgaagtggaccacaagaaacgcaaaatccgggaggagattgagcattttggaatcaagatctatcaattcccagactgtgactctgatgaggatgaggacttcaaattgcaggaccaagccctaaaggaaagcatcccatttgcagtaattggcagcaacactgtagtagaggccagagggcggcgagttcggggtcgactctacccctggggcatcgtggaagtggaaaacccagggcactgcgactttgtgaagctgaggacaatgctggtacgtacccacatgcaggacctgaaggatgtgacacgggagacacattatgagaactaccgggcacagtgcatccagagcatgacccgcctggtggtgaaggaacggaatcgcaacaaactgactcgggaaagtggtaccgacttccccatccctgctgtcccaccagggacagatccagaaactgagaagcttatccgagagaaagatgaggagctgcggcggatgcaggagatgctacacaaaatacaaaaacagatgaaggagaactattaactggctttcagccctggatatttaaatctcctcctcttcttcctgtccatgccggcccctcccagcaccagctctgctcaggccccttcagctactgccacttcgccttacatccctgctgactgcccagagactcagaggaaataaagtttaataaatctgtaggtggc

SEQ ID NO: 300667 - DNA, 1730 bp, Homo sapiens
caagggaaggggaggagaagaggggtggggaaggacattccacaggcttttttggcccctgccagagacagaagggggtcaaagagaaagggaaaggagcaagccaggaagccagacaacaacagcatcaaaacaaggctgtttctgtgtgtgaggaactttgcctgggagataaaattagacctagagctttctgacagggagtctgaagcgtgggacatggaccgttcactgggatggcaagggaattctgtccctgaggacaggactgaagctgggatcaagcgtttcctggaggacaccacggatgatggagaactgagcaagttcgtgaaggatttctcaggaaatgcgagctgccacccaccagaggctaagacctgggcatccaggccccaagtcccggagccaaggccccaggccccggacctctatgatgatgacctggagttcagacccccctcgcggccccagtcctctgacaaccagcagtacttctgtgccccagcccctctcagcccatctgccaggccccgcagcccatggggcaagcttgatccctatgattcctctgaggatgacaaggagtatgtgggctttgcaaccctccccaaccaagtccaccgaaagtccgtgaagaaaggctttgactttaccctcatggtggcaggagagtctggcctgggcaaatccacacttgtcaatagcctcttcctcactgatctgtaccgggaccggaaacttcttggtgctgaagagaggatcatgcaaactgtggagatcactaagcatgcagtggacatagaagagaagggtgtgaggctgcggctcaccattgtggacacaccaggttttggggatgcagtcaacaacacagagtgctggaagcctgtggcagaatacattgatcagcagtttgagcagtatttccgagacgagagtggcctgaaccgaaagaacatccaagacaacatcgtgcctatcctggctaaggcagacacactgacacctcccgaagtggaccacaagaaacgcaaaatccgggaggagattgagcattttggaatcaagatctatcaattcccagactgtgactctgatgaggatgaggacttcaaattgcaggaccaagccctaaaggaaagcatcccatttgcagtaattggcagcaacactgtagtagaggccagagggcggcgagttcggggtcgactctacccctggggcatcgtggaagtggaaaacccagggcactgcgactttgtgaagctgaggacaatgctggtacgtacccacatgcaggacctgaaggatgtgacacgggagacacattatgagaactaccgggcacagtgcatccagagcatgacccgcctggtggtgaaggaacggaatcgcaacaaactgactcgggaaagtggtaccgacttccccatccctgctgtcccaccagggacagatccagaaactgagaagcttatccgagagaaagatgaggagctgcggcggatgcaggagatgctacacaaaatacaaaaacagatgaaggagaactattaactggctttcagccctggatatttaaatctcctcctcttcttcctgtccatgccggcccctcccagcaccagctctgctcaggccccttcagctactgccacttcgccttacatccctgctgactgcccagagactcagaggaaataaagtttaataaatctgtaggtggc

SEQ ID NO: 300668 - DNA, 2196 bp, Homo sapiens
caagggaaggggaggagaagaggggtggggaaggacattccacaggcttttttggcccctgccagagacagaagggggtcaaagagaaagggaaaggagcaagccaggaagccagacaacaacagcatcaaaacaaggctgtttctgtgtgtgaggaactttgcctgggagataaaattagacctagagctttctgacagggagtctgaagcgtgggacatggaccgttcactgggatggcaagggaattctgtccctgaggacaggactgaagctgggatcaagcgtttcctggaggacaccacggatgatggagaactgagcaagttcgtgaaggatttctcaggaaatgcgagctgccacccaccagaggctaagacctgggcatccaggccccaagtcccggagccaaggccccaggccccggacctctatgatgatgacctggagttcagacccccctcgcggccccagtcctctgacaaccagcagtacttctgtgccccagcccctctcagcccatctgccaggccccgcagcccatggggcaagcttgatccctatgattcctctgaggtagagcctccagccctgcctttgcctttcagtgggctgctgcaggaagaccgggggcagggagcagagtgtgtgtgtgtgtgtgtgtgtgtgtgtgtgtgtgtgtgtgtgtgtgtgtgtgtgtatctgggacctatttcagtcctgtgtcagccctagctccaagatatctgcccccaagggcactggaaatttgcagtttcagcaagggcaggaggcccagctggtggcctcagatgggaactcacagaagtctggcactgcttttttaaggctggggcaaaggcctgaaagggagagaagattggcgctgggtgccggggcccctttggctcctcaccgtgatgcattctgccttcctgtctactaggatgacaaggagtatgtgggctttgcaaccctccccaaccaagtccaccgaaagtccgtgaagaaaggctttgactttaccctcatggtggcaggagagtctggcctgggcaaatccacacttgtcaatagcctcttcctcactgatctgtaccgggaccggaaacttcttggtgctgaagagaggatcatgcaaactgtggagatcactaagcatgcagtggacatagaagagaagggtgtgaggctgcggctcaccattgtggacacaccaggttttggggatgcagtcaacaacacagagtgctggaagcctgtggcagaatacattgatcagcagtttgagcagtatttccgagacgagagtggcctgaaccgaaagaacatccaagacaacagggtgcactgctgcctgtacttcatctcacccttcggccatgggctccggccattggatgttgaattcatgaaggccctgcatcagcgggtcaacatcgtgcctatcctggctaaggcagacacactgacacctcccgaagtggaccacaagaaacgcaaaatccgggaggagattgagcattttggaatcaagatctatcaattcccagactgtgactctgatgaggatgaggacttcaaattgcaggaccaagccctaaaggaaagcatcccatttgcagtaattggcagcaacactgtagtagaggccagagggcggcgagttcggggtcgactctacccctggggcatcgtggaagtggaaaacccagggcactgcgactttgtgaagctgaggacaatgctggtacgtacccacatgcaggacctgaaggatgtgacacgggagacacattatgagaactaccgggcacagtgcatccagagcatgacccgcctggtggtgaaggaacggaatcgcaacaaactgactcgggaaagtggtaccgacttccccatccctgctgtcccaccagggacagatccagaaactgagaagcttatccgagagaaagatgaggagctgcggcggatgcaggagatgctacacaaaatacaaaaacagatgaaggagaactattaactggctttcagccctggatatttaaatctcctcctcttcttcctgtccatgccggcccctcccagcaccagctctgctcaggccccttcagctactgccacttcgccttacatccctgctgactgcccagagactcagaggaaataaagtttaataaatctgtaggtggc

SEQ ID NO: 300669 - DNA, 1377 bp, Homo sapiens
cccgcagcggtccgcactcggggaggcgggagggtgacggcggtgctgcgaggtcggcgcgcagctccgccgcgggtcgctcgggcgctgtccaggcggagccggccccgcccgggctgcagccatggatgacaaggagtatgtgggctttgcaaccctccccaaccaagtccaccgaaagtccgtgaagaaaggctttgactttaccctcatggtggcaggagagtctggcctgggcaaatccacacttgtcaatagcctcttcctcactgatctgtaccgggaccggaaacttcttggtgctgaagagaggatcatgcaaactgtggagatcactaagcatgcagtggacatagaagagaagggtgtgaggctgcggctcaccattgtggacacaccaggttttggggatgcagtcaacaacacagagtgctggaagcctgtggcagaatacattgatcagcagtttgagcagtatttccgagacgagagtggcctgaaccgaaagaacatccaagacaacagggtgcactgctgcctgtacttcatctcacccttcggccatgggctccggccattggatgttgaattcatgaaggccctgcatcagcgggtcaacatcgtgcctatcctggctaaggcagacacactgacacctcccgaagtggaccacaagaaacgcaaaatccgggaggagattgagcattttggaatcaagatctatcaattcccagactgtgactctgatgaggatgaggacttcaaattgcaggaccaagccctaaaggaaagcatcccatttgcagtaattggcagcaacactgtagtagaggccagagggcggcgagttcggggtcgactctacccctggggcatcgtggaagtggaaaacccagggcactgcgactttgtgaagctgaggacaatgctggtacgtacccacatgcaggacctgaaggatgtgacacgggagacacattatgagaactaccgggcacagtgcatccagagcatgacccgcctggtggtgaaggaacggaatcgcaacaaactgactcgggaaagtggtaccgacttccccatccctgctgtcccaccagggacagatccagaaactgagaagcttatccgagagaaagatgaggagctgcggcggatgcaggagatgctacacaaaatacaaaaacagatgaaggagaactattaactggctttcagccctggatatttaaatctcctcctcttcttcctgtccatgccggcccctcccagcaccagctctgctcaggccccttcagctactgccacttcgccttacatccctgctgactgcccagagactcagaggaaataaagtttaataaatctgtaggtggc

SEQ ID NO: 300670 - DNA, 2044 bp, Homo sapiens
cccgcagcggtccgcactcggggaggcgggagggtgacggcggtgctgcgaggtcggcgcgcagctccgccgcgggtcgctcgggcgctgtccaggcggagccggccccgcccgggctgcagccatgatcaagcgtttcctggaggacaccacggatgatggagaactgagcaagttcgtgaaggatttctcaggaaatgcgagctgccacccaccagaggctaagacctgggcatccaggccccaagtcccggagccaaggccccaggccccggacctctatgatgatgacctggagttcagacccccctcgcggccccagtcctctgacaaccagcagtacttctgtgccccagcccctctcagcccatctgccaggccccgcagcccatggggcaagcttgatccctatgattcctctgaggtagagcctccagccctgcctttgcctttcagtgggctgctgcaggaagaccgggggcagggagcagagtgtgtgtgtgtgtgtgtgtgtgtgtgtgtgtgtgtgtgtgtgtgtgtgtgtgtgtatctgggacctatttcagtcctgtgtcagccctagctccaagatatctgcccccaagggcactggaaatttgcagtttcagcaagggcaggaggcccagctggtggcctcagatgggaactcacagaagtctggcactgcttttttaaggctggggcaaaggcctgaaagggagagaagattggcgctgggtgccggggcccctttggctcctcaccgtgatgcattctgccttcctgtctactaggatgacaaggagtatgtgggctttgcaaccctccccaaccaagtccaccgaaagtccgtgaagaaaggctttgactttaccctcatggtggcaggagagtctggcctgggcaaatccacacttgtcaatagcctcttcctcactgatctgtaccgggaccggaaacttcttggtgctgaagagaggatcatgcaaactgtggagatcactaagcatgcagtggacatagaagagaagggtgtgaggctgcggctcaccattgtggacacaccaggttttggggatgcagtcaacaacacagagtgctggaagcctgtggcagaatacattgatcagcagtttgagcagtatttccgagacgagagtggcctgaaccgaaagaacatccaagacaacagggtgcactgctgcctgtacttcatctcacccttcggccatgggctccggccattggatgttgaattcatgaaggccctgcatcagcgggtcaacatcgtgcctatcctggctaaggcagacacactgacacctcccgaagtggaccacaagaaacgcaaaatccgggaggagattgagcattttggaatcaagatctatcaattcccagactgtgactctgatgaggatgaggacttcaaattgcaggaccaagccctaaaggaaagcatcccatttgcagtaattggcagcaacactgtagtagaggccagagggcggcgagttcggggtcgactctacccctggggcatcgtggaagtggaaaacccagggcactgcgactttgtgaagctgaggacaatgctggtacgtacccacatgcaggacctgaaggatgtgacacgggagacacattatgagaactaccgggcacagtgcatccagagcatgacccgcctggtggtgaaggaacggaatcgcaacaaactgactcgggaaagtggtaccgacttccccatccctgctgtcccaccagggacagatccagaaactgagaagcttatccgagagaaagatgaggagctgcggcggatgcaggagatgctacacaaaatacaaaaacagatgaaggagaactattaactggctttcagccctggatatttaaatctcctcctcttcttcctgtccatgccggcccctcccagcaccagctctgctcaggccccttcagctactgccacttcgccttacatccctgctgactgcccagagactcagaggaaataaagtttaataaatctgtaggtggc

SEQ ID NO: 300671 - DNA, 1529 bp, Homo sapiens
caagggaaggggaggagaagaggggtggggaaggacattccacaggcttttttggcccctgccagagacagaagggggtcaaagagaaagggaaaggagcaagccaggaagccagacaacaacagcatcaaaacaaggctgtttctgtgtgtgaggaactttgcctgggagataaaattagacctagagctttctgacagggagtctgaagcgtgggacatggaccgttcactgggatggcaagggaattctgtccctgaggacaggactgaagctggggatgacaaggagtatgtgggctttgcaaccctccccaaccaagtccaccgaaagtccgtgaagaaaggctttgactttaccctcatggtggcaggagagtctggcctgggcaaatccacacttgtcaatagcctcttcctcactgatctgtaccgggaccggaaacttcttggtgctgaagagaggatcatgcaaactgtggagatcactaagcatgcagtggacatagaagagaagggtgtgaggctgcggctcaccattgtggacacaccaggttttggggatgcagtcaacaacacagagtgctggaagcctgtggcagaatacattgatcagcagtttgagcagtatttccgagacgagagtggcctgaaccgaaagaacatccaagacaacagggtgcactgctgcctgtacttcatctcacccttcggccatgggctccggccattggatgttgaattcatgaaggccctgcatcagcgggtcaacatcgtgcctatcctggctaaggcagacacactgacacctcccgaagtggaccacaagaaacgcaaaatccgggaggagattgagcattttggaatcaagatctatcaattcccagactgtgactctgatgaggatgaggacttcaaattgcaggaccaagccctaaaggaaagcatcccatttgcagtaattggcagcaacactgtagtagaggccagagggcggcgagttcggggtcgactctacccctggggcatcgtggaagtggaaaacccagggcactgcgactttgtgaagctgaggacaatgctggtacgtacccacatgcaggacctgaaggatgtgacacgggagacacattatgagaactaccgggcacagtgcatccagagcatgacccgcctggtggtgaaggaacggaatcgcaacaaactgactcgggaaagtggtaccgacttccccatccctgctgtcccaccagggacagatccagaaactgagaagcttatccgagagaaagatgaggagctgcggcggatgcaggagatgctacacaaaatacaaaaacagatgaaggagaactattaactggctttcagccctggatatttaaatctcctcctcttcttcctgtccatgccggcccctcccagcaccagctctgctcaggccccttcagctactgccacttcgccttacatccctgctgactgcccagagactcagaggaaataaagtttaataaatctgtaggtggc

SEQ ID NO: 300672 - DNA, 1905 bp, Homo sapiens
caagggaaggggaggagaagaggggtggggaaggacattccacaggcttttttggcccctgccagagacagaagggggtcaaagagaaagggaaaggagcaagccaggaagccagacaacaacagcatcaaaacaaggctgtttctgtgtgtgaggaactttgcctgggagataaaattagacctagagctttctgacagggagtctgaagcgtgggacatggaccgttcactgggatggcaagggaattctgtccctgaggacaggactgaagctgggatcaagcgtttcctggaggacaccacggatgatggagaactgagcaagttcgtgaaggatttctcaggaaatgcgagctgccacccaccagaggctaagacctgggcatccaggccccaagtcccggagccaaggccccaggccccggacctctatgatgatgacctggagttcagacccccctcgcggccccagtcctctgacaaccagcagtacttctgtgccccagcccctctcagcccatctgccaggccccgcagcccatggggcaagcttgatccctatgattcctctgaggatgacaaggagtatgtgggctttgcaaccctccccaaccaagtccaccgaaagtccgtgaagaaaggctttgactttaccctcatggtggcaggagagtctggcctgggcaaatccacacttgtcaatagcctcttcctcactgatctgtaccgggaccggaaacttcttggtgctgaagagaggatcatgcaaactgtggagatcactaagcatgcagtggacatagaagagaagggtgtgaggctgcggctcaccattgtggacacaccaggttttggggatgcagtcaacaacacagagtgctggaagcctgtggcagaatacattgatcagcagtttgagcagtatttccgagacgagagtggcctgaaccgaaagaacatccaagacaacagggtgcactgctgcctgtacttcatctcacccttcggccatgggctccggccattggatgttgaattcatgaaggccctgcatcagcgggtcaacatcgtgcctatcctggctaaggcagacacactgacacctcccgaagtggaccacaagaaacgcaaaatccgggaggagattgagcattttggaatcaagatctatcaattcccagactgtgactctgatgaggatgaggacttcaaattgcaggaccaagccctaaaggaaagcatcccatttgcagtaattggcagcaacactgtagtagaggccagagggcggcgagttcggggtcgactctacccctggggcatcgtggaagtggaaaacccagggcactgcgactttgtgaagctgaggacaatgctggtacgtacccacatgcaggacctgaaggatgtgacacgggagacacattatgagaactaccgggcacagtgcatccagagcatgacccgcctggtggtgaaggaacggaatcgcaacaaactgactcgggaaagtggtaccgacttccccatccctgctgtcccaccagggacagatccagaaactgagaagcttatccgagagaaagatgaggagctgcggcggatgcaggagatgctacacaaaatacaaaaacagatgaaggagaactattaactggctttcagccctggatatttaaatctcctcctcttcttcctgtccatgccggcccctcccagcaccagctctgctcaggccccttcagctactgccacttcgccttacatccctgctgactgcccagagactcagaggaaataaagtttaataaatctgtaggtggcaaaaaaaaaactaaagaaaaaagaatatatactataaagtataagaaatatggaggtcaactcttatactgtagcgtaa

SEQ ID NO: 300673 - DNA, 1449 bp, Homo sapiens
cccgcagcggtccgcactcggggaggcgggagggtgacggcggtgctgcgaggtcggcgcgcagctccgccgcgggtcgctcgggcgctgtccaggcggagccggccccgcccgggctgcagccatggggccagtaccaacttcatttggaaaacgcagaggaggcccacaaacactgcctgcctcaccaggagggatggatgacaaggagtatgtgggctttgcaaccctccccaaccaagtccaccgaaagtccgtgaagaaaggctttgactttaccctcatggtggcaggagagtctggcctgggcaaatccacacttgtcaatagcctcttcctcactgatctgtaccgggaccggaaacttcttggtgctgaagagaggatcatgcaaactgtggagatcactaagcatgcagtggacatagaagagaagggtgtgaggctgcggctcaccattgtggacacaccaggttttggggatgcagtcaacaacacagagtgctggaagcctgtggcagaatacattgatcagcagtttgagcagtatttccgagacgagagtggcctgaaccgaaagaacatccaagacaacagggtgcactgctgcctgtacttcatctcacccttcggccatgggctccggccattggatgttgaattcatgaaggccctgcatcagcgggtcaacatcgtgcctatcctggctaaggcagacacactgacacctcccgaagtggaccacaagaaacgcaaaatccgggaggagattgagcattttggaatcaagatctatcaattcccagactgtgactctgatgaggatgaggacttcaaattgcaggaccaagccctaaaggaaagcatcccatttgcagtaattggcagcaacactgtagtagaggccagagggcggcgagttcggggtcgactctacccctggggcatcgtggaagtggaaaacccagggcactgcgactttgtgaagctgaggacaatgctggtacgtacccacatgcaggacctgaaggatgtgacacgggagacacattatgagaactaccgggcacagtgcatccagagcatgacccgcctggtggtgaaggaacggaatcgcaacaaactgactcgggaaagtggtaccgacttccccatccctgctgtcccaccagggacagatccagaaactgagaagcttatccgagagaaagatgaggagctgcggcggatgcaggagatgctacacaaaatacaaaaacagatgaaggagaactattaactggctttcagccctggatatttaaatctcctcctcttcttcctgtccatgccggcccctcccagcaccagctctgctcaggccccttcagctactgccacttcgccttacatccctgctgactgcccagagactcagaggaaataaagtttaataaatctgtaggtggc

SEQ ID NO: 300674 - DNA, 1642 bp, Homo sapiens
caagggaaggggaggagaagaggggtggggaaggacattccacaggcttttttggcccctgccagagacagaagggggtcaaagagaaagggaaaggagcaagccaggaagccagacaacaacagcatcaaaacaaggctgtttctgtgtgtgaggaactttgcctgggagataaaattagacctagagctttctgacagggagtctgaagcgtgggacatggaccgttcactgggatggcaagggaattctgtccctgaggacaggactgaagctggggatgacaaggagtatgtgggctttgcaaccctccccaaccaagtccaccgaaagtccgtgaagaaaggctttgactttaccctcatggtggcaggagagtctggcctgggcaaatccacacttgtcaatagcctcttcctcactgatctgtaccgggaccggaaacttcttggtgctgaagagaggatcatgcaaactgtggagatcactaagcatgcagtggacatagaagagaagggtgtgaggctgcggctcaccattgtggacacaccaggttttggggatgcagtcaacaacacagagtgctggaagcctgtggcagaatacattgatcagcagtttgagcagtatttccgagacgagagtggcctgaaccgaaagaacatccaagacaacagggtgcactgctgcctgtacttcatctcacccttcggccatgggtatggtccaagcctgaggctcctggcaccaccgggtgctgtcaagggaacaggccaagagcaccaggggcagggctgccactagcaggtggtcacaggttcctgttccccaggctccggccattggatgttgaattcatgaaggccctgcatcagcgggtcaacatcgtgcctatcctggctaaggcagacacactgacacctcccgaagtggaccacaagaaacgcaaaatccgggaggagattgagcattttggaatcaagatctatcaattcccagactgtgactctgatgaggatgaggacttcaaattgcaggaccaagccctaaaggaaagcatcccatttgcagtaattggcagcaacactgtagtagaggccagagggcggcgagttcggggtcgactctacccctggggcatcgtggaagtggaaaacccagggcactgcgactttgtgaagctgaggacaatgctggtacgtacccacatgcaggacctgaaggatgtgacacgggagacacattatgagaactaccgggcacagtgcatccagagcatgacccgcctggtggtgaaggaacggaatcgcaacaaactgactcgggaaagtggtaccgacttccccatccctgctgtcccaccagggacagatccagaaactgagaagcttatccgagagaaagatgaggagctgcggcggatgcaggagatgctacacaaaatacaaaaacagatgaaggagaactattaactggctttcagccctggatatttaaatctcctcctcttcttcctgtccatgccggcccctcccagcaccagctctgctcaggccccttcagctactgccacttcgccttacatccctgctgactgcccagagactcagaggaaataaagtttaataaatctgtaggtggc

SEQ ID NO: 300675 - DNA, 1771 bp, Homo sapiens
caagggaaggggaggagaagaggggtggggaaggacattccacaggcttttttggcccctgccagagacagaagggggtcaaagagaaagggaaaggagcaagccaggaagccagacaacaacagcatcaaaacaaggctgtttctgtgtgtgaggaactttgcctgggagataaaattagacctagagctttctgacagggagtctgaagcgtgggacatggaccgttcactgggatggcaagggaattctgtccctgaggacaggactgaagctgggatcaagcgtttcctggaggacaccacggatgatggagaactgagcaagttcgtgaaggatttctcaggaaatgcgagctgccacccaccagaggctaagacctgggcatccaggccccaagtcccggagccaaggccccaggccccggacctctatgatgatgacctggagttcagacccccctcgcggccccagtcctctgacaaccagcagtacttctgtgccccagcccctctcagcccatctgccaggccccgcagcccatggggcaagcttgatccctatgattcctctgaggatgacaaggagtatgtgggctttgcaaccctccccaaccaagtccaccgaaagtccgtgaagaaaggctttgactttaccctcatggtggcaggagagtctggcctgggcaaatccacacttgtcaatagcctcttcctcactgatctgtaccgggaccggaaacttcttggtgctgaagagaggatcatgcaaactgtggagatcactaagcatgcagtggacatagaagagaagggtgtgaggctgcggctcaccattgtggacacaccaggttttggggatgcagtcaacaacacagagtgctggaagcctgtggcagaatacattgatcagcagtttgagcagtatttccgagacgagagtggcctgaaccgaaagaacatccaagacaacagggtgcactgctgcctgtacttcatctcacccttcggccatgggctccggccattggatgttgaattcatgaaggccctgcatcagcgggtcaacatcgtgcctatcctggctaaggcagacacactgacacctcccgaagtggaccacaagaaacgcaaaatccgggaggagattgagcattttggaatcaagatctatcaattcccagactgtgactctgatgaggatgaggacttcaaattgcaggaccaagccctaaaggaaagcatcccatttgcagtaattggcagcaacactgtagtagaggccagagggcggcgagttcggggtcgactctacccctggggcatcgtggaagccacatgcaggacctgaaggatgtgacacgggagacacattatgagaactaccgggcacagtgcatccagagcatgacccgcctggtggtgaaggaacggaatcgcaacaaactgactcgggaaagtggtaccgacttccccatccctgctgtcccaccagggacagatccagaaactgagaagcttatccgagagaaagatgaggagctgcggcggatgcaggagatgctacacaaaatacaaaaacagatgaaggagaactattaactggctttcagccctggatatttaaatctcctcctcttcttcctgtccatgccggcccctcccagcaccagctctgctcaggccccttcagctactgccacttcgccttacatccctgctgactgcccagagactcagaggaaataaagtttaataaatctgtaggtggc

SEQ ID NO: 300676 - DNA, 1986 bp, Homo sapiens
caagggaaggggaggagaagaggggtggggaaggacattccacaggcttttttggcccctgccagagacagaagggggtcaaagagaaagggaaaggagcaagccaggaagccagacaacaacagcatcaaaacaaggctgtttctgtgtgtgaggaactttgcctgggagataaaattagacctagagctttctgacagggagtctgaagcgtgggacatggaccgttcactgggatggcaagggaattctgtccctgaggacaggactgaagctgggatcaagcgtttcctggaggacaccacggatgatggagaactgagcaagttcgtgaaggatttctcaggaaatgcgagctgccacccaccagaggctaagacctgggcatccaggccccaagtcccggagccaaggccccaggccccggacctctatgatgatgacctggagttcagacccccctcgcggccccagtcctctgacaaccagcagtacttctgtgccccagcccctctcagcccatctgccaggccccgcagcccatggggcaagcttgatccctatgattcctctgaggatgacaaggagtatgtgggctttgcaaccctccccaaccaagtccaccgaaagtccgtgaagaaaggctttgactttaccctcatggtggcaggagagtctggcctgggcaaatccacacttgtcaatagcctcttcctcactgatctgtaccgggaccggaaacttcttggtgctgaagagaggatcatgcaaactgtggagatcactaagcatgcagtggacatagaagagaagggtgtgaggctgcggctcaccattgtggacacaccaggttttggggatgcagtcaacaacacagagtgctggaagcctgtggcagaatacattgatcagcagtttgagcagtatttccgagacgagagtggcctgaaccgaaagaacatccaagacaacagggtgcactgctgcctgtacttcatctcacccttcggccatgggctccggccattggatgttgaattcatgaaggccctgcatcagcgggtcaacatcgtgcctatcctggctaaggcagacacactgacacctcccgaagtggaccacaagaaacgcaaaatccgggaggagattgagcattttggaatcaagatctatcaattcccagactgtgactctgatgaggatgaggacttcaaattgcaggaccaagccctaaaggaaagcatcccatttgcagtaattggcagcaacactgtagtagaggccagagggcggcgagttcggggtcgactctacccctggggcatcgtggaagtggaaaacccagggcactgcgactttgtgaagctgaggacaatgctggtacgtacccacatgcaggacctgaaggatgtgacacgggagacacattatgagaactaccgggcacagtgcatccagagcatgacccgcctggtggtgaaggaacggaatcgcaacgcaagtatgaccagaagccaggacaaagctggcagggggagatcccaagcctagccttgggtgagaccaagccctacttttgttcttctataggccctgggctcaatctaagcgggtgctggggtcctcctcgccttatcaacccttttctccctttagcaaactgactcgggaaagtggtaccgacttccccatccctgctgtcccaccagggacagatccagaaactgagaagcttatccgagagaaagatgaggagctgcggcggatgcaggagatgctacacaaaatacaaaaacagatgaaggagaactattaactggctttcagccctggatatttaaatctcctcctcttcttcctgtccatgccggcccctcccagcaccagctctgctcaggccccttcagctactgccacttcgccttacatccctgctgactgcccagagactcagaggaaataaagtttaataaatctgtaggtggc

SEQ ID NO: 300677 - DNA, 1672 bp, Homo sapiens
  misc_feature (1630)..(1630): n is a, c, g, or t
  misc_feature (1654)..(1654): n is a, c, g, or t
caagggaaggggaggagaagaggggtggggaaggacattccacaggcttttttggcccctgccagagacagaagggggtcaaagagaaagggaaaggagcaagccaggaagccagacaacaacagcatcaaaacaaggctgtttctgtgtgtgaggaactttgcctgggagataaaattagacctagagctttctgacagggagtctgaagcgtgggacatggaccgttcactgggatggcaagggaattctgtccctgaggacaggactgaagctgggatcaagcgtttcctggaggacaccacggatgatggagaactgagcaagttcgtgaaggatttctcaggaaatgcgagctgccacccaccagaggctaagacctgggcatccaggccccaagtcccggagccaaggccccaggccccggacctctatgatgatgacctggagttcagacccccctcgcggccccagtcctctgacaaccagcagtacttctgtgccccagcccctctcagcccatctgccaggccccgcagcccatggggcaagcttgatccctatgattcctctgaggatgacaaggagtatgtgggctttgcaaccctccccaaccaagtccaccgaaagtccgtgaagaaaggctttgactttaccctcatggtggcaggagagtctggcctgggcaaatccacacttgtcaatagcctcttcctcactgatctgtaccgggaccggaaacttcttggtgctgaagagaggatcatgcaaactgtggagatcactaagcatgcagtggacatagaagagaagggtgtgaggctgcggctcaccattgtggacacaccaggttttggggatgcagtcaacaacacagagtgctggaagcctgtggcagaatacattgatcagcagtttgagcagtatttccgagacgagagtggcctgaaccgaaagaacatccaagacaacagggtgcactgctgcctgtacttcatctcacccttcggccatgggctccggccattggatgttgaattcatgaaggccctgcatcagcgggtcaacatcgtgcctatcctggctaaggcagacacactgacacctcccgaagtggaccacaagaaacgcaaaatccgggaggagattgagcattttggaatcaagatctatcaattcccagactgtgactctgatgaggatgaggacttcaaattgcaggaccaagccctaaaggaaagcatcccatttgcagtaattggcagcaacactgtagtagaggccagagggcggcgagttcggggtcgactctacccctggggcatcgtggaagtggaaaacccagggcactgcgactttgtgaagctgaggacaatgctggtacgtacccacatgcaggacctgaaggatgtgacacgggagacacattatgagaactaccgggcacagtgcatccagagcatgacccgcctggtggtgaaggaacggaatcgcaacaaactgactcgggaaagtggtaccgacttccccatccctgctgtcccaccagggacagatccagaaactgagaagcttatccgagagaaagatgaggagctgcggcggatgcaggagatgcttcccaaaatcntctcttttttctgtcatgccgggncctcccaacaccaaatat

SEQ ID NO: 300678 - DNA, 1855 bp, Homo sapiens
caagggaaggggaggagaagaggggtggggaaggacattccacaggcttttttggcccctgccagagacagaagggggtcaaagagaaagggaaaggagcaagccaggaagccagacaacaacagcatcaaaacaaggctgtttctgtgtgtgaggaactttgcctgggagataaaattagacctagagctttctgacagggagtctgaagcgtgggacatggaccgttcactgggatggcaagggaattctgtccctgaggacaggactgaagctgggatcaagcgtttcctggaggacaccacggatgatggagaactgagcaagttcgtgaaggatttctcaggaaatgcgagctgccacccaccagaggctaagacctgggcatccaggccccaagtcccggagccaaggccccaggccccggacctctatgatgatgacctggagttcagacccccctcgcggccccagtcctctgacaaccagcagtacttctgtgccccagcccctctcagcccatctgccaggccccgcagcccatggggcaagcttgatccctatgattcctctgaggatgacaaggagtatgtgggctttgcaaccctccccaaccaagtccaccgaaagtccgtgaagaaaggctttgactttaccctcatggtggcaggagagtctggcctgggcaaatccacacttgtcaatagcctcttcctcactgatctgtaccgggaccggaaacttcttggtgctgaagagaggatcatgcaaactgtggagatcactaagcatgcagtggacatagaagagaagggtgtgaggctgcggctcaccattgtggacacaccaggttttggggatgcagtcaacaacacagagtgctggaagcctgtggcagaatacattgatcagcagtttgagcagtatttccgagacgagagtggcctgaaccgaaagaacatccaagacaacagggtgcactgctgcctgtacttcatctcacccttcggccatgggctccggccattggatgttgaattcatgaaggccctgcatcagcgggtcaacatcgtgcctatcctggctaaggcagacacactgacacctcccgaagtggaccacaagaaacgcaaaatccgggaggagattgagcattttggaatcaagatctatcaattcccagactgtgactctgatgaggatgaggacttcaaattgcaggaccaagccctaaaggaaagcatcccatttgcagtaattggcagcaacactgtagtagaggccagagggcggcgagttcggggtcgactctacccctggggcatcgtggaagtggaaaacccagggcactgcgactttgtgaagcgcaagtatgaccagaagccaggacaaagctggcagggggagatcccaagcctagccttgggtgagaccaagccctacttttgttcttctataggccctgggctcaatctaagcgggtgctggggtcctcctcgccttatcaacccttttctccctttagcaaactgactcgggaaagtggtaccgacttccccatccctgctgtcccaccagggacagatccagaaactgagaagcttatccgagagaaagatgaggagctgcggcggatgcaggagatgctacacaaaatacaaaaacagatgaaggagaactattaactggctttcagccctggatatttaaatctcctcctcttcttcctgtccatgccggcccctcccagcaccagctctgctcaggccccttcagctactgccacttcgccttacatccctgctgactgcccagagactcagaggaaataaagtttaataaatctgtaggtggc

SEQ ID NO: 300679 - DNA, 1831 bp, Homo sapiens
caagggaaggggaggagaagaggggtggggaaggacattccacaggcttttttggcccctgccagagacagaagggggtcaaagagaaagggaaaggagcaagccaggaagccagacaacaacagcatcaaaacaaggctgtttctgtgtgtgaggaactttgcctgggagataaaattagacctagagctttctgacagggagtctgaagcgtgggacatggaccgttcactgggatggcaagggaattctgtccctgaggacaggactgaagctgggatcaagcgtttcctggaggacaccacggatgatggagaactgagcaagttcgtgaaggatttctcaggaaatgcgagctgccacccaccagaggctaagacctgggcatccaggccccaagtcccggagccaaggccccaggccccggacctctatgatgatgacctggagttcagacccccctcgcggccccagtcctctgacaaccagcagtacttctgtgccccagcccctctcagcccatctgccaggccccgcagcccatggggcaagcttgatccctatgattcctctgaggatgacaaggagtatgtgggctttgcaaccctccccaaccaagtccaccgaaagtccgtgaagaaaggctttgactttaccctcatggtggcaggagagtctggcctgggcaaatccacacttgtcaatagcctcttcctcactgatctgtaccgggaccggaaacttcttggtgctgaagagaggatcatgcaaactgtggagatcactaagcatgcagtggacatagaagagaagggtgtgaggctgcggctcaccattgtggacacaccaggttttggggatgcagtcaacaacacagagtgctggaagcctgtggcagaatacattgatcagcagtttgagcagtatttccgagacgagagtggcctgaaccgaaagaacatccaagacaacagggtgcactgctgcctgtacttcatctcacccttcggccatgggctccggccattggatgttgaattcatgaaggccctgcatcagcgggtcaacatcgtgcctatcctggctaaggcagacacactgacacctcccgaagtggaccacaagaaacgcaaaatccgggaggagattgagcattttggaatcaagatctatcaattcccagactgtgactctgatgaggatgaggacttcaaattgcaggaccaagccctaaaggaaagcatcccatttgcagtaattggcagcaacactgtagtagaggccagagggcggcgagttcggggtcgactctacccctggggcatcgtggaagtggaaaacccagggcactgcgactttgtgaagctgaggacaatgctggtacgtacccacatgcaggacctgaaggatgtgacacgggagacacattatgagaactaccgggcacagtgcatccagagcatgacccgcctggtggtgaaggaacggaatcgcaacgcaacaaactgactcgggaaagtggtaccgacttccccatccctgctgtcccaccagggacagatccagaaactgagaagcttatccgagagaaagatgaggagctgcggcggatgcaggagatgctacacaaaatacaaaaacagatgaaggagaactattaactggctttcagccctggatatttaaatctcctcctcttcttcctgtccatgccggcccctcccagcaccagctctgctcaggccccttcagctactgccacttcgccttacatccctgctgactgcccagagactcagaggaaataaagtttaataaatctgtaggtggc

SEQ ID NO: 300680 - DNA, 1668 bp, Homo sapiens
caagggaaggggaggagaagaggggtggggaaggacattccacaggcttttttggcccctgccagagacagaagggggtcaaagagaaagggaaaggagcaagccaggaagccagacaacaacagcatcaaaacaaggctgtttctgtgtgtgaggaactttgcctgggagataaaattagacctagagctttctgacagggagtctgaagcgtgggacatggaccgttcactgggatggcaagggaattctgtccctgaggacaggactgaagctgggatcaagcgtttcctggaggacaccacggatgatggagaactgagcaagttcgtgaaggatttctcaggaaatgcgagctgccacccaccagaggctaagacctgggcatccaggccccaagtcccggagccaaggccccaggccccggacctctatgatgatgacctggagttcagacccccctcgcggccccagtcctctgacaaccagcagtacttctgtgccccagcccctctcagcccatctgccaggccccgcagcccatggggcaagcttgatccctatgattcctctgaggatgacaaggagtatgtgggctttgcaaccctccccaaccaagtccaccgaaagtccgtgaagaaaggctttgactttaccctcatggtggcaggagagtctggcctgggcaaatccacacttgtcaatagcctcttcctcactgatctgtaccgggaccggaaacttcttggtgctgaagagaggatcatgcaaactgtggagatcactaagcatgcagtggacatagaagagaagggtgtgaggctgcggctcaccattgtggacacaccaggttttggggatgcagtcaacaacacagagtgctggaagcctgtggcagaatacattgatcagcagtttgagcagtatttccgagacgagagtggcctgaaccgaaagaacatccaagacaacagggtgcactgctgcctgtacttcatctcacccttcggccatgggctccggccattggatgttgaattcatgaaggccctgcatcagcgggtcaacatcgtgcctatcctggctaaggcagacacactgacacctcccgaagtggaccacaagaaacgcaaaatccgggaggagattgagcattttggaatcaagatctatcaattcccagactgtgactctgatgaggatgaggacttcaaattgcaggaccaagccctaaaggaaagcatcccatttgcagtaattggcagcaacactgtagtagaggccagagggcggcgagttcggggtcgactctacccctggggcatcgtggaagcgcaacaaactgactcgggaaagtggtaccgacttccccatccctgctgtcccaccagggacagatccagaaactgagaagcttatccgagagaaagatgaggagctgcggcggatgcaggagatgctacacaaaatacaaaaacagatgaaggagaactattaactggctttcagccctggatatttaaatctcctcctcttcttcctgtccatgccggcccctcccagcaccagctctgctcaggccccttcagctactgccacttcgccttacatccctgctgactgcccagagactcagaggaaataaagtttaataaatctgtaggtggc

SEQ ID NO: 300681 - DNA, 1696 bp, Homo sapiens
caagggaaggggaggagaagaggggtggggaaggacattccacaggcttttttggcccctgccagagacagaagggggtcaaagagaaagggaaaggagcaagccaggaagccagacaacaacagcatcaaaacaaggctgtttctgtgtgtgaggaactttgcctgggagataaaattagacctagagctttctgacagggagtctgaagcgtgggacatggaccgttcactgggatggcaagggaattctgtccctgaggacaggactgaagctgggatcaagcgtttcctggaggacaccacggatgatggagaactgagcaagttcgtgaaggatttctcaggaaatgcgagctgccacccaccagaggctaagacctgggcatccaggccccaagtcccggagccaaggccccaggccccggacctctatgatgatgacctggagttcagacccccctcgcggccccagtcctctgacaaccagcagtacttctgtgccccagcccctctcagcccatctgccaggccccgcagcccatggggcaagcttgatccctatgattcctctgaggatgacaaggagtatgtgggctttgcaaccctccccaaccaagtccaccgaaagtccgtgaagaaaggctttgactttaccctcatggtggcaggagagtctggcctgggcaaatccacacttgtcaatagcctcttcctcactgatctgtaccgggaccggaaacttcttggtgctgaagagaggatcatgcaaactgtggagatcactaagcatgcagtggacatagaagagaagggtgtgaggctgcggctcaccattgtggacacaccaggttttggggatgcagtcaacaacacagagtgctggaagcctgtggcagaatacattgatcagcagtttgagcagtatttccgagacgagagtggcctgaaccgaaagaacatccaagacaacagggtgcactgctgcctgtacttcatctcacccttcggccatgggctccggccattggatgttgaattcatgaaggccctgcatcagcgggtcaacatcgtgcctatcctggctaaggcagacacactgacacctcccgaagtggaccacaagaaacgcaaaatccgggaggagattgagcattttggaatcaagatctatcaattcccagactgtgactctgatgaggatgaggacttcaaattgcaggaccaagccctaaaggaaagcatcccatttgcagtaattggcagcaacactgtagtagaggccagagggcggcgagttcggggtcgactctacccctggggcatcgtggaagtggaaaacccagggcactgcgactttgtgaagctgaggacaatgctggtacgtacccacatgcaggacctgaaggatgtgacacgggagacacattatgagaactaccgggcacagtgcatccagagcatgacccgcctggtggtgaaggaacggaatcgcaacaaactgactcgggaaagtggtaccgacttccccatccctgctgtcccaccagggacagatccagaaactgagaagcttatccgagagaaagatgaggagctgcggcggatgcaggagatgctactgccacttcgccttacatccctgctgactgcccagagactcagaggaaataaagtttaataaatctgtaggtggc

SEQ ID NO: 300682 - DNA, 1714 bp, Homo sapiens
caagggaaggggaggagaagaggggtggggaaggacattccacaggcttttttggcccctgccagagacagaagggggtcaaagagaaagggaaaggagcaagccaggaagccagacaacaacagcatcaaaacaaggctgtttctgtgtgtgaggaactttgcctgggagataaaattagacctagagctttctgacagggagtctgaagcgtgggacatggaccgttcactgggatggcaagggaattctgtccctgaggacaggactgaagctgggatcaagcgtttcctggaggacaccacggatgatggagaactgagcaagttcgtgaaggatttctcaggaaatgcgagctgccacccaccagaggctaagacctgggcatccaggccccaagtcccggagccaaggccccaggccccggacctctatgatgatgacctggagttcagacccccctcgcggccccagtcctctgacaaccagcagtacttctgtgccccagcccctctcagcccatctgccaggccccgcagcccatggggcaagcttgatccctatgattcctctgaggatgacaaggagtatgtgggctttgcaaccctccccaaccaagtccaccgaaagtccgtgaagaaaggctttgactttaccctcatggtggcaggagagtctggcctgggcaaatccacacttgtcaatagcctcttcctcactgatctgtaccgggaccggaaacttcttggtgctgaagagaggatcatgcaaactgtggagatcactaagcatgcagtggacatagaagagaagggtgtgaggctgcggctcaccattgtggacacaccaggttttggggatgcagtcaacaacacagagtgctggaagcctgtggcagaatacattgatcagcagtttgagcagtatttccgagacgagagtggcctgaaccgaaagaacatccaagacaacagggtgcactgctgcctgtacttcatctcacccttcggccatgggctccggccattggatgttgaattcatgaaggccctgcatcagcgggtcaacatcgtgcctatcctggctaaggcagacacactgacacctcccgaagtggaccacaagaaacgcaaaatccgggaggagattgagcattttggaatcaagatctatcaattcccagactgtgactctgatgaggatgaggacttcaaattgcaggaccaagccctaaaggaaagcatcccatttgcagtaattggcagcaacactgtagtagaggccagagggcggcgagttcggggtcgactctacccctggggcatcgtggaagtggaaaacccagggcactgcgactttgtgaagctgaggacaatgctggtacgtacccacatgcaggacctgaaggatgtgacacgggagacacattatgagaactaccgggcacagtgcatccagagcatgacccgcctggtggtgaaggaacggaatcgcaacgcaacaaactgactcgggaaagtggtaccgacttccccatccctgctgtcccaccagggacagatccagaaactgagaagcttatccgagagaaagatgaggagctgcggcggatgcaggtgggaacctatgatttcttgccttagatgtgaactttagaggtggcctggagaaccttgtgtctacctcaaaaaaaaaatgacaaaaaaaatagcag

SEQ ID NO: 300683 - DNA, 1701 bp, Homo sapiens
caagggaaggggaggagaagaggggtggggaaggacattccacaggcttttttggcccctgccagagacagaagggggtcaaagagaaagggaaaggagcaagccaggaagccagacaacaacagcatcaaaacaaggctgtttctgtgtgtgaggaactttgcctgggagataaaattagacctagagctttctgacagggagtctgaagcgtgggacatggaccgttcactgggatggcaagggaattctgtccctgaggacaggactgaagctgggatcaagcgtttcctggaggacaccacggatgatggagaactgagcaagttcgtgaaggatttctcaggaaatgcgagctgccacccaccagaggctaagacctgggcatccaggccccaagtcccggagccaaggccccaggccccggacctctatgatgatgacctggagttcagacccccctcgcggccccagtcctctgacaaccagcagtacttctgtgccccagcccctctcagcccatctgccaggccccgcagcccatggggcaagcttgatccctatgattcctctgaggatgacaaggagtatgtgggctttgcaaccctccccaaccaagtccaccgaaagtccgtgaagaaaggctttgactttaccctcatggtggcaggagagtctggcctgggcaaatccacacttgtcaatagcctcttcctcactgatctgtaccgggaccggaaacttcttggtgctgaagagaggatcatgcaaactgtggagatcactaagcatgcagtggacatagaagagaagggtgtgaggctgcggctcaccattgtggacacaccaggttttggggatgcagtcaacaacacagagtgctggaagcctgtggcagaatacattgatcagcagtttgagcagtatttccgagacgagagtggcctgaaccgaaagaacatccaagacaacagggtgcactgctgcctgtacttcatctcacccttcggccatgggctccggccattggatgttgaattcatgaaggccctgcatcagcgggtcaacatcgtgcctatcctggctaaggcagacacactgacacctcccgaagtggaccacaagaaacgcaaaatccgggaggagattgagcattttggaatcaagatctatcaattcccagactgtgactctgatgaggatgaggacttcaaattgcaggaccaagccctaaaggaaagcatcccatttgcagtaattggcagcaacactgtagtagaggccagagggcggcgagttcggggtcgactctacccctggggcatcgtggaagtggaaaacccagggcactgcgactttgtgaagctgaggacaatgctggtacgtacccacatgcaggacctgaaggatgtgacacgggagacacattatgagaactaccgggcacagtgcatccagagcatgacccgcctggtggtgaaggaacggaatcgcaacgcaacaaactgactcgggaaagtggtaccgacttccccatccctgctgtcccaccagggacagatccagaaactgagaagcttatccgagagaaagatgaggagctgcggcggatgcaggagatgctactgccacttcgccttacatccctgctgactgcccagagactcagaggaaataaagtttaataaatctgtaggtggc

SEQ ID NO: 300684 - DNA, 1861 bp, Homo sapiens
cccgcagcggtccgcactcggggaggcgggagggtgacggcggtgctgcgaggtcggcgcgcagctccgccgcgggtcgctcgggcgctgtccaggcggagccggccccgcccgggctgcagccatggggccagtaccaacttcatttggaaaacgcagaggaggcccacaaacactgcctgcctcaccaggagggatggtaagacgcttggcccctccttccctcagcctgacaaggggcagtccctggccctttcccaaagggaccccagagagggggaggcccagcccaccatcctgcccggtgggattagctatatccttctgcccctgggacaggaaccatgggaaagcttcctcctgctgcatctacccgctccctccccaccagccaggtccctctgcagtgtgtgggggtgggggcacccatccctgccacctgcctgtagtgggaagagaaacagtaaccccagccagcctccctggaggtgcccaggtaggaagtttttgatgcttggctctgaagatgtaatctcttctcctgacattgttgccagagcctgccacaaataacgtaagggtgtcaggacctctaggccacacaccgtcctctcctctcagtctggaagccccacagcctttgccctctgcattgggggacacaaactgtttacagcagggggggatcactgaccagcctgtggggcgggatgttggctgtgggcagcctccagaagggagctccctgggccccctgggatcagaagctttcaggtttggtagggccaaccttttgggctcttgtctctcaagctgtgtccaggcagaggcccaagccttggccaggaagtcttggtgaccctgtgaccttcccccaacgggggttcctgagagaggcctgtccttattcctttcccccacttctccccacatggtggatggatggactgattgttctagggatggaagcctagggaagcactgattgtccccagtgccaagcccagcaggggctagaggggctttttctgccacacactaacttcagttcagctgaggtcttggtgctttcggcttgtccgaggccacactgttcttctctaattaaagacacacccccctccaccccaaccaccatcaccaaagtccccatcctcaggcccctgccctcaagccagccaagttcttaggctgactggttcagatcagactcctctatgagggtctctttgtcaaaggaggtcagtgtcctagctgctttgggaatcagtgggggagacccccccaacccaggtatgccagggggtttaaatttacatgtgaaaagaatgacaggccaacattaatgaccatcctgtgacttgggatgcaccttctcttctcaggttcaaagcagcttaaggtatctatcatctgggagtgctttctctccccagcctcgctgggaggcaaggaagggccattcacaactgaacattaaggtcctcaaattaagacactatccagactcacaaaagatgtttccacccaaccagaaacagtggacccctgacccctagttgagtgcacacttccaaccaggccccttaatttatctcccacctaaatggcagctctgaagcttctgggctgccagcctcccattgccttgaacccgtgctcctcagagaccaagtgctaacagctcccctgttgacactatggaagccatggagtgatctaattgatacaggttgctataagtcagaggtcaggtgtcctagggtaaggggagtccctggagcaaagtcttctctgtggctgatgctccctgcagggaaatttaggagcagatttctgaaacagtgacgttcctcacagg

SEQ ID NO: 300685 - DNA, 1155 bp, Homo sapiens
caagggaaggggaggagaagaggggtggggaaggacattccacaggcttttttggcccctgccagagacagaagggggtcaaagagaaagggaaaggagcaagccaggaagccagacaacaacagcatcaaaacaaggctgtttctgtgtgtgaggaactttgcctgggagataaaattagacctagagctttctgacagggagtctgaagcgtgggacatggaccgttcactgggatggcaagggaattctgtccctgaggacaggactgaagctgggatcaagcgtttcctggaggacaccacggatgatggagaactgagcaagttcgtgaaggatttctcaggaaatgcgagctgccacccaccagaggctaagacctgggcatccaggccccaagtcccggagccaaggccccaggccccggacctctatgatgatgacctggagttcagacccccctcgcggccccagtcctctgacaaccagcagtacttctgtgccccagcccctctcagcccatctgccaggccccgcagcccatggggcaagcttgatccctatgattcctctgaggatgacaaggagtatgtgggctttgcaaccctccccaaccaagtccaccgaaagtccgtgaagaaaggctttgactttaccctcatggtggcaggagagtctggcctgggcaaatccacacttgtcaatagcctcttcctcactgatctgtaccgggaccggaaacttcttggtgctgaaggtaaggaaaggagaggacaatcaggcagacttgccttgggaaattaaactcactccagagtctgggggatggggctctcccccacatgcaggaaaccatggcctcctagagagactgacagcagctctccataggcctaactgcctggcagcccaccagccagctccctaaagatttgggtgctgaagcagggcagagaccagagccttgctctctgaatgagtctctgacccccaaggattccaggaatccaagaaaaaaaccgggagcagagaagaggctggggccagagccaacagccaccggcatttcctgtgttgggaaatgtactccttgctggttcccagagaacagtcccccagacagcttgggagtggagaagggggcagtgtggatta

SEQ ID NO: 300686 - DNA, 1180 bp, Homo sapiens
caagggaaggggaggagaagaggggtggggaaggacattccacaggcttttttggcccctgccagagacagaagggggtcaaagagaaagggaaaggagcaagccaggaagccagacaacaacagcatcaaaacaaggctgtttctgtgtgtgaggaactttgcctgggagataaaattagacctagagctttctgacagggagtctgaagcgtgggacatggaccgttcactgggatggcaagggaattctgtccctgaggacaggactgaagctgggatcaagcgtttcctggaggacaccacggatgatggagaactgagcaagttcgtgaaggatttctcaggaaatgcgagctgccacccaccagaggctaagacctgggcatccaggccccaagtcccggagccaaggccccaggccccggacctctatgatgatgacctggagttcagacccccctcgcggccccagtcctctgacaaccagcagtacttctgtgccccagcccctctcagcccatctgccaggccccgcagcccatggggcaagcttgatccctatgattcctctgaggtagagcctccagccctgcctttgcctttcagtgggctgctgcaggaagaccgggggcagggagcagagtgtgtgtgtgtgtgtgtgtgtgtgtgtgtgtgtgtgtgtgtgtgtgtgtgtgtgtatctgggacctatttcagtcctgtgtcagccctagctccaagatatctgcccccaagggcactggaaatttgcagtttcagcaagggcaggaggcccagctggtggcctcagatgggaactcacagaagtctggcactgcttttttaaggctggggcaaaggcctgaaagggagagaagattggcgctgggtgccggggcccctttggctcctcaccgtgatgcattctgccttcctgtctactaggatgacaaggagtatgtgggctttgcaaccctccccaaccaagtccaccgaaagtccgtgaagaaaggctttgactttaccctcatggtggcagctcctcttcttcctgtccatgccggcccctcccagcaccagctctgctcaggccccttcagctactgccacttcgccttacatccctgctgactgcccagagactcagaggaaataaagtttaataaatctgtaggtggc

SEQ ID NO: 300687 - DNA, 442 bp, Homo sapiens
actgacacctcccgaagtggaccacaagaaacgcaaagtgagggaagctggtggtgggaggggatcaggtgggcttctagaaaggatgtggtccccagaactgtgggcccctcatctgtttgtcagatccgggaggagattgagcattttggaatcaagatctatcaattcccagactgtgactctgatgaggatgaggacttcaaattgcaggaccaagccctaaaggtggggccactctagggcatcccattcctatcttatttcttccgggtagaaaaagggagtagaattctatattcaggctatcagggtgggaaaggaccctggcttcctagaatgaagcagagaagatgacgatacaggtggaaagaaagaggtgagaacagagggtgctgacaggcacccctaacctcttccaggaaagcatcccatttgcagt

SEQ ID NO: 300688 - DNA, 5608 bp, Homo sapiens
agggcgttggggcagctcctgtgacagacggagctggagcggcggggcggcggcggagtccggcggccgggagagcgagtgagcgagcggaggagcagcgacacgggagtctagggagcgagaaggagaaggaggggagcgctcgggcgcgagcgagagaaaccgcgagcgccgagcttggactcgagccccggaacggctgaggagcccgcccgctcacctcccctccccctccccgggcccgggcccagcgcgccatcctcccccctccttccctccctccctccttcctccctcccctctccctccccctcccccgccggtggatgggagtgaaggacggaagaggccctgcggaggcggcggtgcagcgctccggtggaatgaatcttacttgttgaatatcttctggttactagttggattcatttgtgaaagaatcattttcccctgtgtggaagacacttagtggcatatttaaattataagtccacggatcaaaaagctttttgatttcccaaaggagggacataccactatatcagataagcttgacattacagccaagatggtgctgtcccagagacaacgagatgaactaaatcgagctatagcagattatcttcgttcaaatggctatgaagaggcatattcagtttttaaaaaggaagctgaattagatgtgaatgaagaattagataaaaagtatgctggtcttttggaaaaaaaatggacatctgttattagattacaaaagaaggttatggaattagaatcaaagctaaatgaagcaaaagaagaatttacgtcaggtggacctcttggtcagaaacgagacccaaaagaatggattccccgtccgccagaaaaatatgcattgagtggtcacaggagtccagtcactcgagtcattttccatcctgtgttcagtgttatggtctctgcttcagaggatgctacaattaaggtgtgggattatgagactggagattttgaacgaactcttaaaggacatacagactctgtacaggacatttcattcgaccacagcggcaagcttctggcttcctgttctgcagatatgaccattaaactatgggattttcagggctttgaatgcatcagaaccatgcacggccatgaccacaatgtttcttcagtagccatcatgcccaatggagatcatatagtgtctgcctcaagggataaaactataaaaatgtgggaagtgcaaactggctactgtgtgaagacattcacaggacacagagaatgggtacgtatggtacggccaaatcaagatggcactctgatagccagctgttccaatgaccagactgtgcgtgtatgggtcgtagcaacaaaggaatgcaaggctgagctccgagagcatgagcatgtggtagaatgcatttcctgggctccagaaagctcatattcctccatctctgaagcaacaggatctgagactaaaaaaagtggtaaacctgggccattcttgctgtctggatccagagacaagactattaagatgtgggatgtcagtactggcatgtgccttatgaccctcgtgggtcatgataactgggtacgtggagttctgttccattctggggggaagtttattttgagttgtgctgatgacaagaccctacgcgtatgggattacaagaacaagcgatgcatgaagaccctcaatgcgcatgaacactttgttacctccttggatttccacaagacggcaccctatgtcgtcactggcagcgtagatcaaacagtaaaagtgtgggagtgccgttgattgtgtctccttcggcccctcctccctcttttcctctggatgcactctgatgataccatggttaccccattgagctctgtttaaataaatattgtcctttcatgtaaattattctggatgtagattgagcttattaaatgttacacacaaagtattcatgcatggtgaatccaaattgtatactgtaaatttacatacgttgtctagaagtaccatagggtttaaaaacctgggctggcattggtcacaccaggcctaagaaggcagaagttgaatcaattgaactagggcactaaactgaatagttgacagtgtcattttatgttggattattaattcctgtttttctttctgctatctgttggtgcctgacttgatggcctcatttggggaaaagtggtggttattagggctttttctgaaatgtgtatctatgtaacatcacttaagtgtgcttaataaatcttctgtaaggattttagatgataaggctacaattcagaatcttctgaaccatctatgtaatgaatggggattatacattggaatttttgtcatgacacatttgccaaatcagtaggatatatttgttttggcagcctatcacgcagaggctagtggtatatttatgtaagaaaatgactgtaaatctcaagaaaaatctcagcagctaatagcaactcatttatttcattttggtcttaatgctttgtaaacaggtcaaaaaatactgtcatactctaagcttctattttccacactggacatacttctagttgtattctccatactattagactgtgtagtgatgtgacttccaagtagaatttaatctccccattgagtgtgtcatggtacaaatcactattcgtttttggtgttttttagggatgtgcaatgtgcattacataatgacagaaatactgagaaggttctgtgtgcccatttgaaaggagtgggaggaatacagcagtttgtttttcaacatgaatctgatattgatttaaactgtgtttcacttacaagttttaaaaaaatgacagggtttaatggagcgtgcataaaaatgtactgttttcaccttttgtttatatgtaaatgtttgtaagtatatgggcctatctgtaagtgggtaagtctgtatgtgtgtatcatacacatcaacctccatgtccttagtcctgggtttttgaaaaagtgctaaaacggacaagtagaataaatgttgctgtggaatgccatgctttagaacaaaccctttttgatcttaatgcttctgaaaactaggtctgactctggggatttttttccagccgaaggaaaatcacttccgttatgtccccctctaatttagccgctcgacattttacacaacccggatatgttgtatattttgacccaaagttacaggtaggtttaagagaatttttagccatgacttttggagcactattccattgtcagttattaataaagaattccattgcttagctaaccaacaggttttttttgtttccaagagagttatttgaaaagttaacagaacaatgagataacagtgacagtttaacaaagataaaattctgaactgcgttttattcatttgtgtactatgtgattttttaaatgtcccctttagtatttaatggaaaattggttcctgcaaaagacaaagggtgagagttagcgtcctgtagatacacacagagactaggccgtatattaactagaagcagctttatgtctagcttgtgtctttttgtttgtttgcttgtttgtttttagattcctgagagatgtctctggaagggaaagttttgagaactaatggctatttttgaggacaaaaattacatcttaagctaattccttaaatacatacagtaggtgaattttcaggacaatattgcctcacaaccctgcttacattgaaaagtctttttcccttagctcttctgactggatttttctacaaaaactatggaaaatatctttgttcttgtttgctgctattttctgtcctattttgagaaatataaatacatagaaatggtgcatcttaacatttgtttgtacatgtataaatgtcttgtattttaattcatttttagcatgaattgtttaagggtaagccacaacatctagaaatcactcatagatattgaacaataaaggagaatggtaccgatgcaggaggaagcaagcgtgtcttcccctgcagcacacagcgacttgcgttgacaaaggaggaggaaacgattactctgtaaacaaagttatccttacttgggagattgccacagcctgctgctgagttgagttaccagacatcctccatgtgagaagcagcgaacattgaatctcagggatggcccacaactgggtccacatgtaatgagccctgtttaataacgaaggggtgggggagagcagtccgtctacaacctggaatcagatttgcaaaatttcctgcactgctgtctgacactgtcctgttgatgccctttctgactgtgttctctgttttctctgtctgctgtctaaccctgtgccttgcctgggataaggacaatgatgaggttactggtttggattgtaagtagaggacttttattaattggtttagaggttcactgctgctttgtcactttctcaatcaaattggccacttaagaaataaagagctggtagaattgcatcctcagatgattattgactgtgtgtgtgtgtgaaaacagacattccagtgccacccaaatatatatctgtaacgtgcccaagaaatcctagctgcgctcttgagagtgcatgccatggagactggtttagacaccgcgtggagcctagttgcctgttgtcacggcatcttgcactttaggagactaagaccgtcctggttcgtctgtgtgtggtgtgaccaatggtgtgcccagagcactactctcaaaatcactagtgttagcaagtcgtcccgggctggggagcgttcgccgtagtctttggaagctttggctttagatttaccaagccccgcctccccgctgccagtgccctgctctcccgttcgcctctttctgtttctgtgtgaactttcccggtaatatcactcgttaaataggttttctttaaacttaattaaagaaaaactatttaaaggtaaaggatattttgttgacatcggtggctcgatcatccttaagcaactgaagttaaaattgttgaaggaaaaggcacttaaattggttactttcatgtccagctgtatataagtccagtgtgttcatctagatgacgcaaagaatctcctggtagagaagcgacatgtaaaaaactggtggaaaaaggttttggattttttttccagtggggtggggggagggcaagctggatttacaggtcacggctggactgaatgggcctttttatcttcccactgtatcatggaagtagctgcttgcttgtactgtccatccttcaggcatccctaaagctcactctgaagatgttagagacaaacacaaactcttcgagttaaagttgatcctgacactgacatgaaggcaagccttgatttcgtatgaacgttgctgaagtggtaattgaggaaaacagttccccagattgttaagagttcactgaagatattgacacaattttaaaaaatcagtaaaggaatgtatataatattgctctcgtgttttacagtaagatttgttgctctcagactgtgtaaaacaaaatttattcatgttttctgcatattaaaaaatcttattgtaccaactggtaaactattaaatgcctata

SEQ ID NO: 300689 - DNA, 674 bp, Homo sapiens
tactactactaaattcgcggccggtcgaggatattttgttgacatcggtggctcgatcatccttaagcaactgaagttaaaattgttgaaggaaaaggcacttaaattggttactttcatgtccagctgtatataagtccagtgtgttcatctagatgacgcaaagaatctcctggtagagaagcgacatgtaaaaaactggtggaaaaaggttttggattttttttccagtggggtggggggagggcaagctggatttacaggtcacggctggactgaatgggcctttttatcttcccactgtatcatggaagtagctgcttgcttgtactgtccatccttcaggcatccctaaagctcactctgaagatgttagagacaaacacaaactcttcgagttaaagttgatcctgacactgacatgaaggcaagccttgatttcgtatgaacgttgctgaagtggtaattgaggaaaacagttccccagattgttaagagttcactgaagatattgacacaattttaaaaaatcagtaaaggaatgtatataatattgctctcgtgttttacagtaagatttgttgctctcagactgtgtaaaacaaaatttattcatgttttctgcatattaaaaaatcttattgtaccaactggtaaactattaaatgcctata

SEQ ID NO: 300690 - DNA, 200 bp, Homo sapiens
tactactactaaattcgcggccggtcgagtgaagatattgacacaattttaaaaaatcagtaaaggaatgtatataatattgctctcgtgttttacagtaagatttgttgctctcagactgtgtaaaacaaaatttattcatgttttctgcatattaaaaaatcttattgtaccaactggtaaactattaaatgcctata

SEQ ID NO: 300691 - DNA, 703 bp, Homo sapiens
ttattcacctcttaattgtcagtattggtggaagagcataccatgtagatagtccagggataagccacagtagttgagagtgctttctattaggaagttttaagtatcttttagtactttacataaaatatttgtatgagtattttttggtaagaaaaactgccaggtcatttatctgtatttgagttaaaaatggttttgtttgtgttttaatttttgttagttgggaaactgaagtccagagagagtaggtcgagtgaaaacgagcccagattctcttgctcacttaagtgaaatgagctgagcgcacagaccccatgccctcgttcattatttcccgggtcttgttgtgggaactgttttctgaggcagtatgttttgtggaaagagagtaatttgctttggagtcagacacctgggttcaaattcctacttgtctacttacggtattagaaaatttaaacctctttcatctgcaaaacagaggtaataataccagagtcatagagttgtcatgaggataagatgaagtcataagataaatcatcttggtgtagtacctgccacataggagatgctcattacttagggatttttgttgtttctttatacatgatgacatttgaatgttgggattttgtacaaggaacacgttaacacatgagtaaactgtgtttacctagagggcataatttgaaggttg

SEQ ID NO: 300692 - DNA, 495 bp, Homo sapiens
ttattcacctcttaattgtcagtattggtggaagagcataccatgtagatagtccagggataagccacagtagttgagagtgctttctattaggaagttttaagtatcttttagtactttacataaaatatttgtatgagtattttttggtaagaaaaactgccaggtcatttatctgtatttgagttaaaaatggttttgtttgtgttttaatttttgttagttgggaaactgaagtccagagagagtaggtcgagtgaaaacgagcccagattctcttgctcacttaagtgaaatgagctgagcgcacagaccccatgccctcgttcattatttcccgggtcttgttgtgggaactgttttctgaggcagtatgttttgtggaaagagagtaatttgctttggagtcagacacctgggtttggtttaatccacatcaacaaccgactaatccccacccaacaatgactaatcaaactaaatcaaacaatgata

SEQ ID NO: 300693 - DNA, 477 bp, Homo sapiens
agggcgttggggcagctcctgtgacagacggagctggagcggcggggcggcggcggagtccggcggccgggagactgagcgcacagaccccatgccctcgttcattatttcccgggtcttgttgtgggaactgttttctgaggcagtatgttttgtggaaagagagtaatttgctttggagtcagacacctgggttcaaattcctacttgtctacttacggtattagaaaatttaaacctctttcatctgcaaaacagaggtaataataccagagtcatagagttgtcatgaggataagatgaagtcataagataaatcatcttggtgtagtacctgccacataggagatgctcattacttagggatttttgttgtttctttatacatgatgacatttgaatgttgggattttgtacaaggaacacgttaacacatgagtaaactgtgtttacctagagggcataatttgaaggttg

SEQ ID NO: 300694 - DNA, 5649 bp, Homo sapiens
agggcgttggggcagctcctgtgacagacggagctggagcggcggggcggcggcggagtccggcggccgggagagcgagtgagcgagcggaggagcagcgacacgggagtctagggagcgagaaggagaaggaggggagcgctcgggcgcgagcgagagaaaccgcgagcgccgagcttggactcgagccccggaacggctgaggagcccgcccgctcacctcccctccccctccccgggcccgggcccagcgcgccatcctcccccctccttccctccctccctccttcctccctcccctctccctccccctcccccgccggtggatgggagtgaaggacggaagaggccctgcggaggcggcggtgcagcgctccggtggaatgaatcttacttgttgaatatcttctggttactagttggattcatttgtgaaagaatcattttcccctgtgtggaagacacttagtggcatatttaaattataagtccacggatcaaaaagctttttgatttcccaaaggagggacataccactatatcagataagcttgacattacagccaagatggtgctgtcccagagacaacgagatgaactaaatcgagctatagcagattatcttcgttcaaatggctatgaagaggcatattcagtttttaaaaaggaagctgaattagatgtgaatgaagaattagataaaaagtatgctggtcttttggaaaaaaaatggacatctgttattagattacaaaagaaggttatggaattagaatcaaagctaaatgaagcaaaagaagaatttacgtcaggtggacctcttggtcagaaacgagacccaaaagaatggattccccgtccgccagaaaaatatgcattgagtggtcacaggagtccagtcactcgagtcattttccatcctgtgttcagtgttatggtctctgcttcagaggatgctacaattaaggtgtgggattatgagactggagattttgaacgaactcttaaaggacatacagactctgtacaggacatttcattcgaccacagcggcaagcttctggcttcctgttctgcagatatgaccattaaactatgggattttcagggctttgaatgcatcagaaccatgcacggccatgaccacaatgtttcttcagtagccatcatgcccaatggagatcatatagtgtctgcctcaagggataaaactataaaaatgtgggaagtgcaaactggctactgtgtgaagacattcacaggacacagagaatgggtacgtatggtacggccaaatcaagatggcactctgatagccagctgttccaatgaccagactgtgcgtgtatgggtcgtagcaacaaaggaatgcaaggctgagctccgagagcatgagcatgtggtagaatgcatttcctgggctccagaaagctcatattcctccatctctgaagcaacaggatctgagactaaaaaaagtggtaaacctgggccattcttgctgtctggatccagagacaagactattaagatgtgggatgtcagtactggcatgtgccttatgaccctcgtgggtcatgataactgggtacgtggagttctgttccattctggggggaagtttattttgagttgtgctgatgacaagaccctacgcgtatgggattacaagaacaagcgatgcatgaagaccctcaatgcgcatgaacactttgttacctccttggatttccacaagacggcaccctatgtcgtcactggcagcgtagatcaaacagtaaaagtgtgggagtgccgttgattgtgtctccttcggcccctcctccctcttttcctctggatgcactctgatgataccatggttaccccattgagctctgtttaaataaatattgtcctttcatgtaaattattctggatgtagattgagcttattaaatgttacacacaaagtattcatgcatggtgaatccaaattgtatactgtaaatttacatacgttgtctagaagtaccatagggtttaaaaacctgggctggcattggtcacaccaggcctaagaaggcagaagttgaatcaattgaactagggcactaaactgaatagttgacagtgtcattttatgttggattattaattcctgtttttctttctgctatctgttggtgcctgacttgatggcctcatttggggaaaagtggtggttattagggctttttctgaaatgtgtatctatgtaacatcacttaagtgtgcttaataaatcttctgtaaggattttagatgataaggctacaattcagaatcttctgaaccatctatgtaatgaatggggattatacattggaatttttgtcatgacacatttgccaaatcagtaggatatatttgttttggcagcctatcacgcagaggctagtggtatatttatgtaagaaaatgactgtaaatctcaagaaaaatctcagcagctaatagcaactcatttatttcattttggtcttaatgctttgtaaacaggtcaaaaaatactgtcatactctaagcttctattttccacactggacatacttctagttgtattctccatactattagactgtgtagtgatgtgacttccaagtagaatttaatctccccattgagtgtgtcatggtacaaatcactattcgtttttggtgttttttagggatgtgcaatgtgcattacataatgacagaaatactgagaaggttctgtgtgcccatttgaaaggagtgggaggaatacagcagtttgtttttcaacatgaatctgatattgatttaaactgtgtttcacttacaagttttaaaaaaatgacagggtttaatggagcgtgcataaaaatgtactgttttcaccttttgtttatatgtaaatgtttgtaagtatatgggcctatctgtaagtgggtaagtctgtatgtgtgtatcatacacatcaacctccatgtccttagtcctgggtttttgaaaaagtgctaaaacggacaagtagaataaatgttgctgtggaatgccatgctttagaacaaaccctttttgatcttaatgcttctgaaaactaggtctgactctggggatttttttccagccgaaggaaaatcacttccgttatgtccccctctaatttagccgctcgacattttacacaacccggatatgttgtatattttgacccaaagttacaggtaggtttaagagaatttttagccatgacttttggagcactattccattgtcagttattaataaagaattccattgcttagctaaccaacaggttttttttgtttccaagagagttatttgaaaagttaacagaacaatgagataacagtgacagtttaacaaagataaaattctgaactgcgttttattcatttgtgtactatgtgattttttaaatggttccccagttttcaggttaatctctaaaaaattgggggccaacaacacaaattttgggcgtttccccttgcgatagaaggacaaagggtgagagttagcgtcctgtagatacacacagagactaggccgtatattaactagaagcagctttatgtctagcttgtgtctttttgtttgtttgcttgtttgtttttagattcctgagagatgtctctggaagggaaagttttgagaactaatggctatttttgaggacaaaaattacatcttaagctaattccttaaatacatacagtaggtgaattttcaggacaatattgcctcacaaccctgcttacattgaaaagtctttttcccttagctcttctgactggatttttctacaaaaactatggaaaatatctttgttcttgtttgctgctattttctgtcctattttgagaaatataaatacatagaaatggtgcatcttaacatttgtttgtacatgtataaatgtcttgtattttaattcatttttagcatgaattgtttaagggtaagccacaacatctagaaatcactcatagatattgaacaataaaggagaatggtaccgatgcaggaggaagcaagcgtgtcttcccctgcagcacacagcgacttgcgttgacaaaggaggaggaaacgattactctgtaaacaaagttatccttacttgggagattgccacagcctgctgctgagttgagttaccagacatcctccatgtgagaagcagcgaacattgaatctcagggatggcccacaactgggtccacatgtaatgagccctgtttaataacgaaggggtgggggagagcagtccgtctacaacctggaatcagatttgcaaaatttcctgcactgctgtctgacactgtcctgttgatgccctttctgactgtgttctctgttttctctgtctgctgtctaaccctgtgccttgcctgggataaggacaatgatgaggttactggtttggattgtaagtagaggacttttattaattggtttagaggttcactgctgctttgtcactttctcaatcaaattggccacttaagaaataaagagctggtagaattgcatcctcagatgattattgactgtgtgtgtgtgtgaaaacagacattccagtgccacccaaatatatatctgtaacgtgcccaagaaatcctagctgcgctcttgagagtgcatgccatggagactggtttagacaccgcgtggagcctagttgcctgttgtcacggcatcttgcactttaggagactaagaccgtcctggttcgtctgtgtgtggtgtgaccaatggtgtgcccagagcactactctcaaaatcactagtgttagcaagtcgtcccgggctggggagcgttcgccgtagtctttggaagctttggctttagatttaccaagccccgcctccccgctgccagtgccctgctctcccgttcgcctctttctgtttctgtgtgaactttcccggtaatatcactcgttaaataggttttctttaaacttaattaaagaaaaactatttaaaggtaaaggatattttgttgacatcggtggctcgatcatccttaagcaactgaagttaaaattgttgaaggaaaaggcacttaaattggttactttcatgtccagctgtatataagtccagtgtgttcatctagatgacgcaaagaatctcctggtagagaagcgacatgtaaaaaactggtggaaaaaggttttggattttttttccagtggggtggggggagggcaagctggatttacaggtcacggctggactgaatgggcctttttatcttcccactgtatcatggaagtagctgcttgcttgtactgtccatccttcaggcatccctaaagctcactctgaagatgttagagacaaacacaaactcttcgagttaaagttgatcctgacactgacatgaaggcaagccttgatttcgtatgaacgttgctgaagtggtaattgaggaaaacagttccccagattgttaagagttcactgaagatattgacacaattttaaaaaatcagtaaaggaatgtatataatattgctctcgtgttttacagtaagatttgttgctctcagactgtgtaaaacaaaatttattcatgttttctgcatattaaaaaatcttattgtaccaactggtaaactattaaatgcctata

SEQ ID NO: 300695 - DNA, 5476 bp, Homo sapiens
cacgagatctggtcgtttaaaagtgtgtagcacctccctgctccctctttcttcctcctgcttctgccatggaaaatgcctccctcccgctttgccttctgccatgattgtaagttccctgaggcctccccagaaacgtgtcaccatgcttcctgtacggcctgtggaactgtgaagcaattaaacctcttttctgtataaattacccagtctcaggtatttccttatagcaatgagagaacagatgaatacaaccagaggccaaatacatatttcttattacacagcatcatactttgcttcacatgtgtataaccaaggatgtttttgcttgtcttatatggtatgaccagcttggcagtggatctaaccttttaggacttttgctactaactctgcttggtttctgtttgtgtgtgacaatgtgattcaagcagatgttatagtctggtgaacgccaggtgtactgtactggagaaaatagaaaaagtcaggggctggtttgatatcttgtggtcttcctgcatgtactatatgccaggagacttacttcatagtaagacatactatgaagccactagaaattgtttttaaagactagtttagtgacatgatgttaagaagagtggcaaggtacaaatgcctataaatagaccagaatgaaaatatacttaaatgtagtggacctcttggtcagaaacgagacccaaaagaatggattccccgtccgccagaaaaatatgcattgagtggtcacaggagtccagtcactcgagtcattttccatcctgtgttcagtgttatggtctctgcttcagaggatgctacaattaaggtgtgggattatgagactggagattttgaacgaactcttaaaggacatacagactctgtacaggacatttcattcgaccacagcggcaagcttctggcttcctgttctgcagatatgaccattaaactatgggattttcagggctttgaatgcatcagaaccatgcacggccatgaccacaatgtttcttcagtagccatcatgcccaatggagatcatatagtgtctgcctcaagggataaaactataaaaatgtgggaagtgcaaactggctactgtgtgaagacattcacaggacacagagaatgggtacgtatggtacggccaaatcaagatggcactctgatagccagctgttccaatgaccagactgtgcgtgtatgggtcgtagcaacaaaggaatgcaaggctgagctccgagagcatgagcatgtggtagaatgcatttcctgggctccagaaagctcatattcctccatctctgaagcaacaggatctgagactaaaaaaagtggtaaacctgggccattcttgctgtctggatccagagacaagactattaagatgtgggatgtcagtactggcatgtgccttatgaccctcgtgggtcatgataactgggtacgtggagttctgttccattctggggggaagtttattttgagttgtgctgatgacaagaccctacgcgtatgggattacaagaacaagcgatgcatgaagaccctcaatgcgcatgaacactttgttacctccttggatttccacaagacggcaccctatgtcgtcactggcagcgtagatcaaacagtaaaagtgtgggagtgccgttgattgtgtctccttcggcccctcctccctcttttcctctggatgcactctgatgataccatggttaccccattgagctctgtttaaataaatattgtcctttcatgtaaattattctggatgtagattgagcttattaaatgttacacacaaagtattcatgcatggtgaatccaaattgtatactgtaaatttacatacgttgtctagaagtaccatagggtttaaaaacctgggctggcattggtcacaccaggcctaagaaggcagaagttgaatcaattgaactagggcactaaactgaatagttgacagtgtcattttatgttggattattaattcctgtttttctttctgctatctgttggtgcctgacttgatggcctcatttggggaaaagtggtggttattagggctttttctgaaatgtgtatctatgtaacatcacttaagtgtgcttaataaatcttctgtaaggattttagatgataaggctacaattcagaatcttctgaaccatctatgtaatgaatggggattatacattggaatttttgtcatgacacatttgccaaatcagtaggatatatttgttttggcagcctatcacgcagaggctagtggtatatttatgtaagaaaatgactgtaaatctcaagaaaaatctcagcagctaatagcaactcatttatttcattttggtcttaatgctttgtaaacaggtcaaaaaatactgtcatactctaagcttctattttccacactggacatacttctagttgtattctccatactattagactgtgtagtgatgtgacttccaagtagaatttaatctccccattgagtgtgtcatggtacaaatcactattcgtttttggtgttttttagggatgtgcaatgtgcattacataatgacagaaatactgagaaggttctgtgtgcccatttgaaaggagtgggaggaatacagcagtttgtttttcaacatgaatctgatattgatttaaactgtgtttcacttacaagttttaaaaaaatgacagggtttaatggagcgtgcataaaaatgtactgttttcaccttttgtttatatgtaaatgtttgtaagtatatgggcctatctgtaagtgggtaagtctgtatgtgtgtatcatacacatcaacctccatgtccttagtcctgggtttttgaaaaagtgctaaaacggacaagtagaataaatgttgctgtggaatgccatgctttagaacaaaccctttttgatcttaatgcttctgaaaactaggtctgactctggggatttttttccagccgaaggaaaatcacttccgttatgtccccctctaatttagccgctcgacattttacacaacccggatatgttgtatattttgacccaaagttacaggtaggtttaagagaatttttagccatgacttttggagcactattccattgtcagttattaataaagaattccattgcttagctaaccaacaggttttttttgtttccaagagagttatttgaaaagttaacagaacaatgagataacagtgacagtttaacaaagataaaattctgaactgcgttttattcatttgtgtactatgtgattttttaaatgtcccctttagtatttaatggaaaattggttcctgcaaaagacaaagggtgagagttagcgtcctgtagatacacacagagactaggccgtatattaactagaagcagctttatgtctagcttgtgtctttttgtttgtttgcttgtttgtttttagattcctgagagatgtctctggaagggaaagttttgagaactaatggctatttttgaggacaaaaattacatcttaagctaattccttaaatacatacagtaggtgaattttcaggacaatattgcctcacaaccctgcttacattgaaaagtctttttcccttagctcttctgactggatttttctacaaaaactatggaaaatatctttgttcttgtttgctgctattttctgtcctattttgagaaatataaatacatagaaatggtgcatcttaacatttgtttgtacatgtataaatgtcttgtattttaattcatttttagcatgaattgtttaagggtaagccacaacatctagaaatcactcatagatattgaacaataaaggagaatggtaccgatgcaggaggaagcaagcgtgtcttcccctgcagcacacagcgacttgcgttgacaaaggaggaggaaacgattactctgtaaacaaagttatccttacttgggagattgccacagcctgctgctgagttgagttaccagacatcctccatgtgagaagcagcgaacattgaatctcagggatggcccacaactgggtccacatgtaatgagccctgtttaataacgaaggggtgggggagagcagtccgtctacaacctggaatcagatttgcaaaatttcctgcactgctgtctgacactgtcctgttgatgccctttctgactgtgttctctgttttctctgtctgctgtctaaccctgtgccttgcctgggataaggacaatgatgaggttactggtttggattgtaagtagaggacttttattaattggtttagaggttcactgctgctttgtcactttctcaatcaaattggccacttaagaaataaagagctggtagaattgcatcctcagatgattattgactgtgtgtgtgtgtgaaaacagacattccagtgccacccaaatatatatctgtaacgtgcccaagaaatcctagctgcgctcttgagagtgcatgccatggagactggtttagacaccgcgtggagcctagttgcctgttgtcacggcatcttgcactttaggagactaagaccgtcctggttcgtctgtgtgtggtgtgaccaatggtgtgcccagagcactactctcaaaatcactagtgttagcaagtcgtcccgggctggggagcgttcgccgtagtctttggaagctttggctttagatttaccaagccccgcctccccgctgccagtgccctgctctcccgttcgcctctttctgtttctgtgtgaactttcccggtaatatcactcgttaaataggttttctttaaacttaattaaagaaaaactatttaaaggtaaaggatattttgttgacatcggtggctcgatcatccttaagcaactgaagttaaaattgttgaaggaaaaggcacttaaattggttactttcatgtccagctgtatataagtccagtgtgttcatctagatgacgcaaagaatctcctggtagagaagcgacatgtaaaaaactggtggaaaaaggttttggattttttttccagtggggtggggggagggcaagctggatttacaggtcacggctggactgaatgggcctttttatcttcccactgtatcatggaagtagctgcttgcttgtactgtccatccttcaggcatccctaaagctcactctgaagatgttagagacaaacacaaactcttcgagttaaagttgatcctgacactgacatgaaggcaagccttgatttcgtatgaacgttgctgaagtggtaattgaggaaaacagttccccagattgttaagagttcactgaagatattgacacaattttaaaaaatcagtaaaggaatgtatataatattgctctcgtgttttacagtaagatttgttgctctcagactgtgtaaaacaaaatttattcatgttttctgcatattaaaaaatcttattgtaccaactggtaaactattaaatgcctata

SEQ ID NO: 300696 - DNA, 5286 bp, Homo sapiens
acggtgccaacgggacgccgcggtcggccgcatgagcgcaaaagcagggcagcgaggtggaatgaatcttacttgttgaatatcttctggttactagttggattcatttgtgaaagaatcattttcccctgtgtggaagacacttagtggcatatttaaattataagtccacggatcaaaaagctttttgatttcccaaaggagggacataccactatatcagataagcttgacattacagccaagatggtgctgtcccagagacaacgagatgaactaaatcgagctatagcagattatcttcgttcaaatggctatgaagaggcatattcagtttttaaaaaggaagctgaattagatgtgaatgaagaattagataaaaagtatgctggtcttttggaaaaaaaatggacatctgttattagattacaaaagaaggttatggaattagaatcaaagctaaatgaagcaaaagaagaatttacgtcaggtggacctcttggtcagaaacgagacccaaaagaatggattccccgtccgccagaaaaatatgcattgagtggtcacaggagtccagtcactcgagtcattttccatcctgtgttcagtgttatggtctctgcttcagaggatgctacaattaaggtgtgggattatgagactggagattttgaacgaactcttaaaggacatacagactctgtacaggacatttcattcgaccacagcggcaagcttctggcttcctgttctgcagatatgaccattaaactatgggattttcagggctttgaatgcatcagaaccatgcacggccatgaccacaatgtttcttcagtagccatcatgcccaatggagatcatatagtgtctgcctcaagggataaaactataaaaatgtgggaagtgcaaactggctactgtgtgaagacattcacaggacacagagaatgggtacgtatggtacggccaaatcaagatggcactctgatagccagctgttccaatgaccagactgtgcgtgtatgggtcgtagcaacaaaggaatgcaaggctgagctccgagagcatgagcatgtggtagaatgcatttcctgggctccagaaagctcatattcctccatctctgaagcaacaggatctgagactaaaaaaagtggtaaacctgggccattcttgctgtctggatccagagacaagactattaagatgtgggatgtcagtactggcatgtgccttatgaccctcgtgggtcatgataactgggtacgtggagttctgttccattctggggggaagtttattttgagttgtgctgatgacaagaccctacgcgtatgggattacaagaacaagcgatgcatgaagaccctcaatgcgcatgaacactttgttacctccttggatttccacaagacggcaccctatgtcgtcactggcagcgtagatcaaacagtaaaagtgtgggagtgccgttgattgtgtctccttcggcccctcctccctcttttcctctggatgcactctgatgataccatggttaccccattgagctctgtttaaataaatattgtcctttcatgtaaattattctggatgtagattgagcttattaaatgttacacacaaagtattcatgcatggtgaatccaaattgtatactgtaaatttacatacgttgtctagaagtaccatagggtttaaaaacctgggctggcattggtcacaccaggcctaagaaggcagaagttgaatcaattgaactagggcactaaactgaatagttgacagtgtcattttatgttggattattaattcctgtttttctttctgctatctgttggtgcctgacttgatggcctcatttggggaaaagtggtggttattagggctttttctgaaatgtgtatctatgtaacatcacttaagtgtgcttaataaatcttctgtaaggattttagatgataaggctacaattcagaatcttctgaaccatctatgtaatgaatggggattatacattggaatttttgtcatgacacatttgccaaatcagtaggatatatttgttttggcagcctatcacgcagaggctagtggtatatttatgtaagaaaatgactgtaaatctcaagaaaaatctcagcagctaatagcaactcatttatttcattttggtcttaatgctttgtaaacaggtcaaaaaatactgtcatactctaagcttctattttccacactggacatacttctagttgtattctccatactattagactgtgtagtgatgtgacttccaagtagaatttaatctccccattgagtgtgtcatggtacaaatcactattcgtttttggtgttttttagggatgtgcaatgtgcattacataatgacagaaatactgagaaggttctgtgtgcccatttgaaaggagtgggaggaatacagcagtttgtttttcaacatgaatctgatattgatttaaactgtgtttcacttacaagttttaaaaaaatgacagggtttaatggagcgtgcataaaaatgtactgttttcaccttttgtttatatgtaaatgtttgtaagtatatgggcctatctgtaagtgggtaagtctgtatgtgtgtatcatacacatcaacctccatgtccttagtcctgggtttttgaaaaagtgctaaaacggacaagtagaataaatgttgctgtggaatgccatgctttagaacaaaccctttttgatcttaatgcttctgaaaactaggtctgactctggggatttttttccagccgaaggaaaatcacttccgttatgtccccctctaatttagccgctcgacattttacacaacccggatatgttgtatattttgacccaaagttacaggtaggtttaagagaatttttagccatgacttttggagcactattccattgtcagttattaataaagaattccattgcttagctaaccaacaggttttttttgtttccaagagagttatttgaaaagttaacagaacaatgagataacagtgacagtttaacaaagataaaattctgaactgcgttttattcatttgtgtactatgtgattttttaaatgtcccctttagtatttaatggaaaattggttcctgcaaaagacaaagggtgagagttagcgtcctgtagatacacacagagactaggccgtatattaactagaagcagctttatgtctagcttgtgtctttttgtttgtttgcttgtttgtttttagattcctgagagatgtctctggaagggaaagttttgagaactaatggctatttttgaggacaaaaattacatcttaagctaattccttaaatacatacagtaggtgaattttcaggacaatattgcctcacaaccctgcttacattgaaaagtctttttcccttagctcttctgactggatttttctacaaaaactatggaaaatatctttgttcttgtttgctgctattttctgtcctattttgagaaatataaatacatagaaatggtgcatcttaacatttgtttgtacatgtataaatgtcttgtattttaattcatttttagcatgaattgtttaagggtaagccacaacatctagaaatcactcatagatattgaacaataaaggagaatggtaccgatgcaggaggaagcaagcgtgtcttcccctgcagcacacagcgacttgcgttgacaaaggaggaggaaacgattactctgtaaacaaagttatccttacttgggagattgccacagcctgctgctgagttgagttaccagacatcctccatgtgagaagcagcgaacattgaatctcagggatggcccacaactgggtccacatgtaatgagccctgtttaataacgaaggggtgggggagagcagtccgtctacaacctggaatcagatttgcaaaatttcctgcactgctgtctgacactgtcctgttgatgccctttctgactgtgttctctgttttctctgtctgctgtctaaccctgtgccttgcctgggataaggacaatgatgaggttactggtttggattgtaagtagaggacttttattaattggtttagaggttcactgctgctttgtcactttctcaatcaaattggccacttaagaaataaagagctggtagaattgcatcctcagatgattattgactgtgtgtgtgtgtgaaaacagacattccagtgccacccaaatatatatctgtaacgtgcccaagaaatcctagctgcgctcttgagagtgcatgccatggagactggtttagacaccgcgtggagcctagttgcctgttgtcacggcatcttgcactttaggagactaagaccgtcctggttcgtctgtgtgtggtgtgaccaatggtgtgcccagagcactactctcaaaatcactagtgttagcaagtcgtcccgggctggggagcgttcgccgtagtctttggaagctttggctttagatttaccaagccccgcctccccgctgccagtgccctgctctcccgttcgcctctttctgtttctgtgtgaactttcccggtaatatcactcgttaaataggttttctttaaacttaattaaagaaaaactatttaaaggtaaaggatattttgttgacatcggtggctcgatcatccttaagcaactgaagttaaaattgttgaaggaaaaggcacttaaattggttactttcatgtccagctgtatataagtccagtgtgttcatctagatgacgcaaagaatctcctggtagagaagcgacatgtaaaaaactggtggaaaaaggttttggattttttttccagtggggtggggggagggcaagctggatttacaggtcacggctggactgaatgggcctttttatcttcccactgtatcatggaagtagctgcttgcttgtactgtccatccttcaggcatccctaaagctcactctgaagatgttagagacaaacacaaactcttcgagttaaagttgatcctgacactgacatgaaggcaagccttgatttcgtatgaacgttgctgaagtggtaattgaggaaaacagttccccagattgttaagagttcactgaagatattgacacaattttaaaaaatcagtaaaggaatgtatataatattgctctcgtgttttacagtaagatttgttgctctcagactgtgtaaaacaaaatttattcatgttttctgcatattaaaaaatcttattgtaccaactggtaaactattaaatgcctata

SEQ ID NO: 300697 - DNA, 4929 bp, Homo sapiens
tgatatgcgtctcaacaaaataaaaattaaaaaattagccaggtgtggtagcacacatctgttattagattacaaaagaaggttatggaattagaatcaaagctaaatgaagcaaaagaagaatttacgtcaggtggacctcttggtcagaaacgagacccaaaagaatggattccccgtccgccagaaaaatatgcattgagtggtcacaggagtccagtcactcgagtcattttccatcctgtgttcagtgttatggtctctgcttcagaggatgctacaattaaggtgtgggattatgagactggagattttgaacgaactcttaaaggacatacagactctgtacaggacatttcattcgaccacagcggcaagcttctggcttcctgttctgcagatatgaccattaaactatgggattttcagggctttgaatgcatcagaaccatgcacggccatgaccacaatgtttcttcagtagccatcatgcccaatggagatcatatagtgtctgcctcaagggataaaactataaaaatgtgggaagtgcaaactggctactgtgtgaagacattcacaggacacagagaatgggtacgtatggtacggccaaatcaagatggcactctgatagccagctgttccaatgaccagactgtgcgtgtatgggtcgtagcaacaaaggaatgcaaggctgagctccgagagcatgagcatgtggtagaatgcatttcctgggctccagaaagctcatattcctccatctctgaagcaacaggatctgagactaaaaaaagtggtaaacctgggccattcttgctgtctggatccagagacaagactattaagatgtgggatgtcagtactggcatgtgccttatgaccctcgtgggtcatgataactgggtacgtggagttctgttccattctggggggaagtttattttgagttgtgctgatgacaagaccctacgcgtatgggattacaagaacaagcgatgcatgaagaccctcaatgcgcatgaacactttgttacctccttggatttccacaagacggcaccctatgtcgtcactggcagcgtagatcaaacagtaaaagtgtgggagtgccgttgattgtgtctccttcggcccctcctccctcttttcctctggatgcactctgatgataccatggttaccccattgagctctgtttaaataaatattgtcctttcatgtaaattattctggatgtagattgagcttattaaatgttacacacaaagtattcatgcatggtgaatccaaattgtatactgtaaatttacatacgttgtctagaagtaccatagggtttaaaaacctgggctggcattggtcacaccaggcctaagaaggcagaagttgaatcaattgaactagggcactaaactgaatagttgacagtgtcattttatgttggattattaattcctgtttttctttctgctatctgttggtgcctgacttgatggcctcatttggggaaaagtggtggttattagggctttttctgaaatgtgtatctatgtaacatcacttaagtgtgcttaataaatcttctgtaaggattttagatgataaggctacaattcagaatcttctgaaccatctatgtaatgaatggggattatacattggaatttttgtcatgacacatttgccaaatcagtaggatatatttgttttggcagcctatcacgcagaggctagtggtatatttatgtaagaaaatgactgtaaatctcaagaaaaatctcagcagctaatagcaactcatttatttcattttggtcttaatgctttgtaaacaggtcaaaaaatactgtcatactctaagcttctattttccacactggacatacttctagttgtattctccatactattagactgtgtagtgatgtgacttccaagtagaatttaatctccccattgagtgtgtcatggtacaaatcactattcgtttttggtgttttttagggatgtgcaatgtgcattacataatgacagaaatactgagaaggttctgtgtgcccatttgaaaggagtgggaggaatacagcagtttgtttttcaacatgaatctgatattgatttaaactgtgtttcacttacaagttttaaaaaaatgacagggtttaatggagcgtgcataaaaatgtactgttttcaccttttgtttatatgtaaatgtttgtaagtatatgggcctatctgtaagtgggtaagtctgtatgtgtgtatcatacacatcaacctccatgtccttagtcctgggtttttgaaaaagtgctaaaacggacaagtagaataaatgttgctgtggaatgccatgctttagaacaaaccctttttgatcttaatgcttctgaaaactaggtctgactctggggatttttttccagccgaaggaaaatcacttccgttatgtccccctctaatttagccgctcgacattttacacaacccggatatgttgtatattttgacccaaagttacaggtaggtttaagagaatttttagccatgacttttggagcactattccattgtcagttattaataaagaattccattgcttagctaaccaacaggttttttttgtttccaagagagttatttgaaaagttaacagaacaatgagataacagtgacagtttaacaaagataaaattctgaactgcgttttattcatttgtgtactatgtgattttttaaatgtcccctttagtatttaatggaaaattggttcctgcaaaagacaaagggtgagagttagcgtcctgtagatacacacagagactaggccgtatattaactagaagcagctttatgtctagcttgtgtctttttgtttgtttgcttgtttgtttttagattcctgagagatgtctctggaagggaaagttttgagaactaatggctatttttgaggacaaaaattacatcttaagctaattccttaaatacatacagtaggtgaattttcaggacaatattgcctcacaaccctgcttacattgaaaagtctttttcccttagctcttctgactggatttttctacaaaaactatggaaaatatctttgttcttgtttgctgctattttctgtcctattttgagaaatataaatacatagaaatggtgcatcttaacatttgtttgtacatgtataaatgtcttgtattttaattcatttttagcatgaattgtttaagggtaagccacaacatctagaaatcactcatagatattgaacaataaaggagaatggtaccgatgcaggaggaagcaagcgtgtcttcccctgcagcacacagcgacttgcgttgacaaaggaggaggaaacgattactctgtaaacaaagttatccttacttgggagattgccacagcctgctgctgagttgagttaccagacatcctccatgtgagaagcagcgaacattgaatctcagggatggcccacaactgggtccacatgtaatgagccctgtttaataacgaaggggtgggggagagcagtccgtctacaacctggaatcagatttgcaaaatttcctgcactgctgtctgacactgtcctgttgatgccctttctgactgtgttctctgttttctctgtctgctgtctaaccctgtgccttgcctgggataaggacaatgatgaggttactggtttggattgtaagtagaggacttttattaattggtttagaggttcactgctgctttgtcactttctcaatcaaattggccacttaagaaataaagagctggtagaattgcatcctcagatgattattgactgtgtgtgtgtgtgaaaacagacattccagtgccacccaaatatatatctgtaacgtgcccaagaaatcctagctgcgctcttgagagtgcatgccatggagactggtttagacaccgcgtggagcctagttgcctgttgtcacggcatcttgcactttaggagactaagaccgtcctggttcgtctgtgtgtggtgtgaccaatggtgtgcccagagcactactctcaaaatcactagtgttagcaagtcgtcccgggctggggagcgttcgccgtagtctttggaagctttggctttagatttaccaagccccgcctccccgctgccagtgccctgctctcccgttcgcctctttctgtttctgtgtgaactttcccggtaatatcactcgttaaataggttttctttaaacttaattaaagaaaaactatttaaaggtaaaggatattttgttgacatcggtggctcgatcatccttaagcaactgaagttaaaattgttgaaggaaaaggcacttaaattggttactttcatgtccagctgtatataagtccagtgtgttcatctagatgacgcaaagaatctcctggtagagaagcgacatgtaaaaaactggtggaaaaaggttttggattttttttccagtggggtggggggagggcaagctggatttacaggtcacggctggactgaatgggcctttttatcttcccactgtatcatggaagtagctgcttgcttgtactgtccatccttcaggcatccctaaagctcactctgaagatgttagagacaaacacaaactcttcgagttaaagttgatcctgacactgacatgaaggcaagccttgatttcgtatgaacgttgctgaagtggtaattgaggaaaacagttccccagattgttaagagttcactgaagatattgacacaattttaaaaaatcagtaaaggaatgtatataatattgctctcgtgttttacagtaagatttgttgctctcagactgtgtaaaacaaaatttattcatgttttctgcatattaaaaaatcttattgtaccaactggtaaactattaaatgcctata

SEQ ID NO: 300698 - DNA, 5592 bp, Homo sapiens
agggcgttggggcagctcctgtgacagacggagctggagcggcggggcggcggcggagtccggcggccgggagagcgagtgagcgagcggaggagcagcgacacgggagtctagggagcgagaaggagaaggaggggagcgctcgggcgcgagcgagagaaaccgcgagcgccgagcttggactcgagccccggaacggctgaggagcccgcccgctcacctcccctccccctccccgggcccgggcccagcgcgccatcctcccccctccttccctccctccctccttcctccctcccctctccctccccctcccccgccggtggatgggagtgaaggacggaagaggccctgcggaggcggcggtgcagcgctccggtggaatgaatcttacttgttgaatatcttctggttactagttggattcatttgtgaaagaatcattttcccctgtgtggaagacacttagtggcatatttaaattataagtccacggatcaaaaagctttttgatttcccaaaggagggacataccactatatcagataagcttgacattacagccaagatggtgctgtcccagagacaacgagatgaactaaatcgagctatagcagattatcttcgttcaaatggctatgaagaggcatattcagtttttaaaaaggaagctgaattagatgtgaatgaagaattagataaaaagtatgctggtcttttggaaaaaaaatggacatctgttattagattacaaaagaaggttatggaattagaatcaaagctaaatgaagcaaaagaagaatttacgtcaggtggacctcttggtcagaaacgagacccaaaagaatggattccccgtccgccagaaaaatatgcattgagtggtcacaggagtccagtcactcgagtcattttccatcctgtgttcagtgttatggtctctgcttcagaggatgctacaattaaggtgtgggattatgagactggagattttgaacgaactcttaaaggacatacagactctgtacaggacatttcattcgaccacagcggcaagcttctggcttcctgttctgcagatatgaccattaaactatgggattttcagggctttgaatgcatcagaaccatgcacggccatgaccacaatgtttcttcagtagccatcatgcccaatggagatcatatagtgtctgcctcaagggataaaactataaaaatgtgggaagtgcaaactggctactgtgtgaagacattcacaggacacagagaatgggtacgtatggtacggccaaatcaagatggcactctgatagccagctgttccaatgaccagactgtgcgtgtatgggtcgtagcaacaaaggaatgcaaggctgagctccgagagcatgagcatgtggtagaatgcatttcctgggctccagaaagctcatattcctccatctctgaagcaacaggatctgagactaaaaaaagtggtaaacctgggccattcttgctgtctggatccagagacaagactattaagatgtgggatgtcagtactggcatgtgccttatgaccctcgtgggtcatgataactgggtacgtggagttctgttccattctggggggaagtttattttgagttgtgctgatgacaagaccctacgcgtatgggattacaagaacaagcgatgcatgaagaccctcaatgcgcatgaacactttgttacctccttggatttccacaagacggcaccctatgtcgtcactggcagcgtagatcaaacagtaaaagtgtgggagtgccgttgattgtgtctccttcggcccctcctccctcttttcctctggatgcactctgatgataccatggttaccccattgagctctgtttaaataaatattgtcctttcatgtaaattattctggatgtagattgagcttattaaatgttacacacaaagtattcatgcatggtgaatccaaattgtatactgtaaatttacatacgttgtctagaagtaccatagggtttaaaaacctgggctggcattggtcacaccaggcctaagaaggcagaagttgaatcaattgaactagggcactaaactgaatagttgacagtgtcattttatgttggattattaattcctgtttttctttctgctatctgttggtgcctgacttgatggcctcatttggggaaaagtggtggttattagggctttttctgaaatgtgtatctatgtaacatcacttaagtgtgcttaataaatcttctgtaaggattttagatgataaggctacaattcagaatcttctgaaccatctatgtaatgaatggggattatacattggaatttttgtcatgacacatttgccaaatcagtaggatatatttgttttggcagcctatcacgcagaggctagtggtatatttatgtaagaaaatgactgtaaatctcaagaaaaatctcagcagctaatagcaactcatttatttcattttggtcttaatgctttgtaaacaggtcaaaaaatactgtcatactctaagcttctattttccacactggacatacttctagttgtattctccatactattagactgtgtagtgatgtgacttccaagtagaatttaatctccccattgagtgtgtcatggtacaaatcactattcgtttttggtgttttttagggatgtgcaatgtgcattacataatgacagaaatactgagaaggttctgtgtgcccatttgaaaggagtgggaggaatacagcagtttgtttttcaacatgaatctgatattgatttaaactgtgtttcacttacaagttttaaaaaaatgacagggtttaatggagcgtgcataaaaatgtactgttttcaccttttgtttatatgtaaatgtttgtaagtatatgggcctatctgtaagtgggtaagtctgtatgtgtgtatcatacacatcaacctccatgtccttagtcctgggtttttgaaaaagtgctaaaacggacaagtagaataaatgttgctgtggaatgccatgctttagaacaaaccctttttgatcttaatgcttctgaaaactaggtctgactctggggatttttttccagccgaaggaaaatcacttccgttatgtccccctctaatttagccgctcgacattttacacaacccggatatgttgtatattttgacccaaagttacaggtaggtttaagagaatttttagccatgacttttggagcactattccattgtcagttattaataaagaattccattgcttagctaaccaacaggttttttttgtttccaagagagttatttgaaaagttaacagaacaatgagataacagtgacagtttaacaaagataaaattctgaactgcgttttattcatttgtgtactatgtgattttttaaatgtcccctttagtatttaatggaaaattggttcctgcaaaagacaaagggtgagagttagcgtcctgtagatacacacagagactaggccgtatattaactagaagcagctttatgtctagcttgtgtctttttgtttgtttgcttgtttgtttttagattcctgagagatgtctctggaagggaaagttttgagaactaatggctatttttgaggacaaaaattacatcttaagctaattccttaaatacatacagtaggtgaattttcaggacaatattgcctcacaaccctgcttacattgaaaagtctttttcccttagctcttctgactggatttttctacaaaaactatggaaaatatctttgttcttgtttgctgctattttctgtcctattttgagaaatataaatacatagaaatggtgcatcttaacatttgtttgtacatgtataaatgtcttgtattttaattcatttttagcatgaattgtttaagggtaagccacaacatctagaaatcactcatagatattgaacaataaaggagaatggtaccgatgcaggaggaagcaagcgtgtcttcccctgcagcacacagcgacttgcgttgacaaaggaggaggaaacgattactctgtaaacaaagttatccttacttgggagattgccacagcctgctgctgagttgagttaccagacatcctccatattgaatctcagggatggcccacaactgggtccacatgtaatgagccctgtttaataacgaaggggtgggggagagcagtccgtctacaacctggaatcagatttgcaaaatttcctgcactgctgtctgacactgtcctgttgatgccctttctgactgtgttctctgttttctctgtctgctgtctaaccctgtgccttgcctgggataaggacaatgatgaggttactggtttggattgtaagtagaggacttttattaattggtttagaggttcactgctgctttgtcactttctcaatcaaattggccacttaagaaataaagagctggtagaattgcatcctcagatgattattgactgtgtgtgtgtgtgaaaacagacattccagtgccacccaaatatatatctgtaacgtgcccaagaaatcctagctgcgctcttgagagtgcatgccatggagactggtttagacaccgcgtggagcctagttgcctgttgtcacggcatcttgcactttaggagactaagaccgtcctggttcgtctgtgtgtggtgtgaccaatggtgtgcccagagcactactctcaaaatcactagtgttagcaagtcgtcccgggctggggagcgttcgccgtagtctttggaagctttggctttagatttaccaagccccgcctccccgctgccagtgccctgctctcccgttcgcctctttctgtttctgtgtgaactttcccggtaatatcactcgttaaataggttttctttaaacttaattaaagaaaaactatttaaaggtaaaggatattttgttgacatcggtggctcgatcatccttaagcaactgaagttaaaattgttgaaggaaaaggcacttaaattggttactttcatgtccagctgtatataagtccagtgtgttcatctagatgacgcaaagaatctcctggtagagaagcgacatgtaaaaaactggtggaaaaaggttttggattttttttccagtggggtggggggagggcaagctggatttacaggtcacggctggactgaatgggcctttttatcttcccactgtatcatggaagtagctgcttgcttgtactgtccatccttcaggcatccctaaagctcactctgaagatgttagagacaaacacaaactcttcgagttaaagttgatcctgacactgacatgaaggcaagccttgatttcgtatgaacgttgctgaagtggtaattgaggaaaacagttccccagattgttaagagttcactgaagatattgacacaattttaaaaaatcagtaaaggaatgtatataatattgctctcgtgttttacagtaagatttgttgctctcagactgtgtaaaacaaaatttattcatgttttctgcatattaaaaaatcttattgtaccaactggtaaactattaaatgcctata

SEQ ID NO: 300699 - DNA, 4523 bp, Homo sapiens
tatatagtgaatgcctgtatatccttcacttagttaccatttgttggttttccttcatgtatgtgtgtatattttgctgaaatcatttgagcgttctttgcagacatcgtaacactttacccccaagtattttagcatgaaccacctaagaacaaggatagtatataaataaccaaaataaaattattcacactcaagaaatttaccattgatagactacatattgagatttgttcttgttatttccataatgccctgcgggacttctttttaaccctcatccaggacccagtcagggatcgtacgttatattcactcctcatgtcttatgagttttcagtttcctttaatctagaatcccctagacttttattttcttctggtcttttgatgtttttggtatgtatagttttatcgtattatgaaatagatgctatttaaacattttgccttttactgagtcaaataacttttttgtttttaaggtgggtcatgataactgggtacgtggagttctgttccattctggggggaagtttattttgagttgtgctgatgacaagaccctacgcgtatgggattacaagaacaagcgatgcatgaagaccctcaatgcgcatgaacactttgttacctccttggatttccacaagacggcaccctatgtcgtcactggcagcgtagatcaaacagtaaaagtgtgggagtgccgttgattgtgtctccttcggcccctcctccctcttttcctctggatgcactctgatgataccatggttaccccattgagctctgtttaaataaatattgtcctttcatgtaaattattctggatgtagattgagcttattaaatgttacacacaaagtattcatgcatggtgaatccaaattgtatactgtaaatttacatacgttgtctagaagtaccatagggtttaaaaacctgggctggcattggtcacaccaggcctaagaaggcagaagttgaatcaattgaactagggcactaaactgaatagttgacagtgtcattttatgttggattattaattcctgtttttctttctgctatctgttggtgcctgacttgatggcctcatttggggaaaagtggtggttattagggctttttctgaaatgtgtatctatgtaacatcacttaagtgtgcttaataaatcttctgtaaggattttagatgataaggctacaattcagaatcttctgaaccatctatgtaatgaatggggattatacattggaatttttgtcatgacacatttgccaaatcagtaggatatatttgttttggcagcctatcacgcagaggctagtggtatatttatgtaagaaaatgactgtaaatctcaagaaaaatctcagcagctaatagcaactcatttatttcattttggtcttaatgctttgtaaacaggtcaaaaaatactgtcatactctaagcttctattttccacactggacatacttctagttgtattctccatactattagactgtgtagtgatgtgacttccaagtagaatttaatctccccattgagtgtgtcatggtacaaatcactattcgtttttggtgttttttagggatgtgcaatgtgcattacataatgacagaaatactgagaaggttctgtgtgcccatttgaaaggagtgggaggaatacagcagtttgtttttcaacatgaatctgatattgatttaaactgtgtttcacttacaagttttaaaaaaatgacagggtttaatggagcgtgcataaaaatgtactgttttcaccttttgtttatatgtaaatgtttgtaagtatatgggcctatctgtaagtgggtaagtctgtatgtgtgtatcatacacatcaacctccatgtccttagtcctgggtttttgaaaaagtgctaaaacggacaagtagaataaatgttgctgtggaatgccatgctttagaacaaaccctttttgatcttaatgcttctgaaaactaggtctgactctggggatttttttccagccgaaggaaaatcacttccgttatgtccccctctaatttagccgctcgacattttacacaacccggatatgttgtatattttgacccaaagttacaggtaggtttaagagaatttttagccatgacttttggagcactattccattgtcagttattaataaagaattccattgcttagctaaccaacaggttttttttgtttccaagagagttatttgaaaagttaacagaacaatgagataacagtgacagtttaacaaagataaaattctgaactgcgttttattcatttgtgtactatgtgattttttaaatgtcccctttagtatttaatggaaaattggttcctgcaaaagacaaagggtgagagttagcgtcctgtagatacacacagagactaggccgtatattaactagaagcagctttatgtctagcttgtgtctttttgtttgtttgcttgtttgtttttagattcctgagagatgtctctggaagggaaagttttgagaactaatggctatttttgaggacaaaaattacatcttaagctaattccttaaatacatacagtaggtgaattttcaggacaatattgcctcacaaccctgcttacattgaaaagtctttttcccttagctcttctgactggatttttctacaaaaactatggaaaatatctttgttcttgtttgctgctattttctgtcctattttgagaaatataaatacatagaaatggtgcatcttaacatttgtttgtacatgtataaatgtcttgtattttaattcatttttagcatgaattgtttaagggtaagccacaacatctagaaatcactcatagatattgaacaataaaggagaatggtaccgatgcaggaggaagcaagcgtgtcttcccctgcagcacacagcgacttgcgttgacaaaggaggaggaaacgattactctgtaaacaaagttatccttacttgggagattgccacagcctgctgctgagttgagttaccagacatcctccatgtgagaagcagcgaacattgaatctcagggatggcccacaactgggtccacatgtaatgagccctgtttaataacgaaggggtgggggagagcagtccgtctacaacctggaatcagatttgcaaaatttcctgcactgctgtctgacactgtcctgttgatgccctttctgactgtgttctctgttttctctgtctgctgtctaaccctgtgccttgcctgggataaggacaatgatgaggttactggtttggattgtaagtagaggacttttattaattggtttagaggttcactgctgctttgtcactttctcaatcaaattggccacttaagaaataaagagctggtagaattgcatcctcagatgattattgactgtgtgtgtgtgtgaaaacagacattccagtgccacccaaatatatatctgtaacgtgcccaagaaatcctagctgcgctcttgagagtgcatgccatggagactggtttagacaccgcgtggagcctagttgcctgttgtcacggcatcttgcactttaggagactaagaccgtcctggttcgtctgtgtgtggtgtgaccaatggtgtgcccagagcactactctcaaaatcactagtgttagcaagtcgtcccgggctggggagcgttcgccgtagtctttggaagctttggctttagatttaccaagccccgcctccccgctgccagtgccctgctctcccgttcgcctctttctgtttctgtgtgaactttcccggtaatatcactcgttaaataggttttctttaaacttaattaaagaaaaactatttaaaggtaaaggatattttgttgacatcggtggctcgatcatccttaagcaactgaagttaaaattgttgaaggaaaaggcacttaaattggttactttcatgtccagctgtatataagtccagtgtgttcatctagatgacgcaaagaatctcctggtagagaagcgacatgtaaaaaactggtggaaaaaggttttggattttttttccagtggggtggggggagggcaagctggatttacaggtcacggctggactgaatgggcctttttatcttcccactgtatcatggaagtagctgcttgcttgtactgtccatccttcaggcatccctaaagctcactctgaagatgttagagacaaacacaaactcttcgagttaaagttgatcctgacactgacatgaaggcaagccttgatttcgtatgaacgttgctgaagtggtaattgaggaaaacagttccccagattgttaagagttcactgaagatattgacacaattttaaaaaatcagtaaaggaatgtatataatattgctctcgtgttttacagtaagatttgttgctctcagactgtgtaaaacaaaatttattcatgttttctgcatattaaaaaatcttattgtaccaactggtaaactattaaatgcctata

SEQ ID NO: 300700 - DNA, 5204 bp, Homo sapiens
agggcgttggggcagctcctgtgacagacggagctggagcggcggggcggcggcggagtccggcggccgggagagcgagtgagcgagcggaggagcagcgacacgggagtctagggagcgagaaggagaaggaggggagcgctcgggcgcgagcgagagaaaccgcgagcgccgagcttggactcgagccccggaacggctgaggagcccgcccgctcacctcccctccccctccccgggcccgggcccagcgcgccatcctcccccctccttccctccctccctccttcctccctcccctctccctccccctcccccgccggtggatgggagtgaaggacggaagaggccctgcggaggcggcggtgcagcgctccggtggaatgaatcttacttgttgaatatcttctggttactagttggattcatttgtgaaagaatcattttcccctgtgtggaagacacttagtggcatatttaaattataagtccacggatcaaaaagctttttgatttcccaaaggagggacataccactatatcagataagcttgacattacagccaagatggtgctgtcccagagacaacgagatgaactaaatcgagctatagcagattatcttcgttcaaatggctatgaagaggcatattcagtttttaaaaaggaagctgaattagatgtgaatgaagaattagataaaaagtatgctggtcttttggaaaaaaaatggacatctgttattagattacaaaagaaggttatggaattagaatcaaagctaaatgaagcaaaagaagaatttacgtcaggtggacctcttggtcagaaacgagacccaaaagaatggattccccgtccgccagaaaaatatgcattgagtggtcacaggagtccagtcactcgagtcattttccatcctgtgttcagtgttatggtctctgcttcagaggatgctacaattaaggtgtgggattatgagactggagattttgaacgaactcttaaaggacatacagactctgtacaggacatttcattcgaccacagcggcaagcttctggcttcctgttctgcagatatgaccattaaactatgggattttcagggctttgaatgcatcagaaccatgcacggccatgaccacaatgtttcttcagtagccatcatgcccaatggagatcatatagtgtctgcctcaagggataaaactataaaaatgtgggaagtgcaaactggctactgtgtgaagacattcacaggacacagagaatgggtacgtatggtacggccaaatcaagatggcactctgatagccagctgttccaatgaccagactgtgcgtgtatgggtcgtagcaacaaaggaatgcaaggctgagctccgagagcatgagcatgtggtagaatgcatttcctgggctccagaaagctcatattcctccatctctgaagcaacaggatctgagactaaaaaaagtggtaaacctgggccattcttgctgtctggatccagagacaagactattaagatgtgggatgtcagtactggcatgtgccttatgaccctcgtgggtcatgataactgggtacgtggagttctgttccattctggggggaagtttattttgagttgtgctgatgacaagaccctacgcgtatgggattacaagaacaagcgatgcatgaagaccctcaatgcgcatgaacactttgttacctccttggatttccacaagacggcaccctatgtcgtcactggcagcgtagatcaaacagtaaaagtgtgggagtgccgttgattgtgtctccttcggcccctcctccctcttttcctctggatgcactctgatgataccatggttaccccattgagctctgtttaaataaatattgtcctttcatgtaaattattctggatgtagattgagcttattaaatgttacacacaaagtattcatgcatggtgaatccaaattgtatactgtaaatttacatacgttgtctagaagtaccatagggtttaaaaacctgggctggcattggtcacaccaggcctaagaaggcagaagttgaatcaattgaactagggcactaaactgaatagttgacagtgtcattttatgttggattattaattcctgtttttctttctgctatctgttggtgcctgacttgatggcctcatttggggaaaagtggtggttattagggctttttctgaaatgtgtatctatgtaacatcacttaagtgtgcttaataaatcttctgtaaggattttagatgataaggctacaattcagaatcttctgaaccatctatgtaatgaatggggattatacattggaatttttgtcatgacacatttgccaaatcagtaggatatatttgttttggcagcctatcacgcagaggctagtggtatatttatgtaagaaaatgactgtaaatctcaagaaaaatctcagcagctaatagcaactcatttatttcattttggtcttaatgctttgtaaacaggtcaaaaaatactgtcatactctaagcttctattttccacactggacatacttctagttgtattctccatactattagactgtgtagtgatgtgacttccaagtagaatttaatctccccattgagtgtgtcatggtacaaatcactattcgtttttggtgttttttagggatgtgcaatgtgcattacataatgacagaaatactgagaaggttctgtgtgcccatttgaaaggagtgggaggaatacagcagtttgtttttcaacatgaatctgatattgatttaaactgtgtttcacttacaagttttaaaaaaatgacagggtttaatggagcgtgcataaaaatgtactgttttcaccttttgtttatatgtaaatgtttgtaagtatatgggcctatctgtaagtgggtaagtctgtatgtgtgtatcatacacatcaacctccatgtccttagtcctgggtttttgaaaaagtgctaaaacggacaagtagaataaatgttgctgtggaatgccatgctttagaacaaaccctttttgatcttaatgcttctgaaaactaggtctgactctggggatttttttccagccgaaggaaaatcacttccgttatgtccccctctaatttagccgctcgacattttacacaacccggatatgttgtatattttgacccaaagttacaggtaggtttaagagaatttttagccatgacttttggagcactattccattgtcagttattaataaagaattccattgcttagctaaccaacaggttttttttgtttccaagagagttatttgaaaagttaacagaacaatgagataacagtgacagtttaacaaagataaaattctgaactgcgttttattcatttgtgtactatgtgattttttaaatgtcccctttagtatttaatggaaaattggttcctgcaaaagacaaagggtgagagttagcgtcctgtagatacacacagagactaggccgtatattaactagaagcagctttatgtctagcttgtgtctttttgtttgtttgcttgtttgtttttagattcctgagagatgtctctggaagggaaagttttgagaactaatggctatttttgaggacaaaaattacatcttaagctaattccttaaatacatacagtaggtgaattttcaggacaatattgcctcacaaccctgcttacattgaaaagtctttttcccttagctcttctgactggatttttctacaaaaactatggaaaatatctttgttcttgtttgctgctattttctgtcctattttgagaaatataaatacatagaaatggtgcatcttaacatttgtttgtacatgtataaatgtcttgtattttaattcatttttagcatgaattgtttaagggtaagccacaacatctagaaatcactcatagatattgaacaataaaggagaatggtaccgatgcaggaggaagcaagcgtgtcttcccctgcagcacacagcgacttgcgttgacaaaggaggaggaaacgattactctgtaaacaaagttatccttacttgggagattgccacagcctgctgctgagttgagttaccagacatcctccatgtgagaagcagcgaacattgaatctcagggatggcccacaactgggtccacatgtaatgagccctgtttaataacgaaggggtgggggagagcagtccgtctacaacctggaatcagatttgcaaaatttcctgcactgctgtctgacactgtcctgttgatgccctttctgactgtgttctctgttttctctgtctgctgtctaaccctgtgccttgcctgggataaggacaatgatgaggttactggtttggattgtaagtagaggacttttattaattggtttagaggttcactgctgctttgtcactttctcaatcaaattggccacttaagaaataaagagctggtagaattgcatcctcagatgattattgactgtgtgtgtgtgtgaaaacagacattccagtgccacccaaatatatatctgtaacgtgcccaagaaatcctagctgcgctcttgagagtgcatgccatggagactggtttagacaccgcgtggagcctagttgcctgttgtcacggcatcttgcactttaggagactaagaccgtcctggttcgtctgtgtgtggtgtgaccaatggtgtgcccagagcactactctcaaaatcactagtgttagcaagtcgtcccgggctggggagcgttcgccgtagtctttggaagctttggctttagatttaccaagccccgcctccccgctgccagtgccctgctctcccgttcgcctctttctgtttctgtgtgaactttcccggtaatatcactcgttaaataggttttctttaaacttaattaaagaaaaactatttaaaggtaaaggatattttgttgacatcggtggctcgatcatccttaagcaactgaagttaaaattgttgaaggaaaaggcacttaaattggttactttcatgtccagctgtatataagtccagtgtgttcatctagatgacgcaaagaatctcctggtagagaagcgacatgtaaaaaactggtggaaactttaaatatgcccacagaaccctctaaattcccttgtgaatttaactgttagtccaaagag

SEQ ID NO: 300701 - DNA, 4126 bp, Homo sapiens
cgggcagggtcttgctctgtcacccaggctggagtgcagtggtgcagtcatggctcgctgcagcctcgacttcccagctcaaacagttctgcatcagtctcccgagtagctgggactacaggcacacactaccatgcccggctaattttttttttaattttgtattttgtagagagggggtctcactatgtttgttgtccaggcttacgtgtgagttttaaataaaccatttctttttctttcagatttccacaagacggcaccctatgtcgtcactggcagcgtagatcaaacagtaaaagtgtgggagtgccgttgattgtgtctccttcggcccctcctccctcttttcctctggatgcactctgatgataccatggttaccccattgagctctgtttaaataaatattgtcctttcatgtaaattattctggatgtagattgagcttattaaatgttacacacaaagtattcatgcatggtgaatccaaattgtatactgtaaatttacatacgttgtctagaagtaccatagggtttaaaaacctgggctggcattggtcacaccaggcctaagaaggcagaagttgaatcaattgaactagggcactaaactgaatagttgacagtgtcattttatgttggattattaattcctgtttttctttctgctatctgttggtgcctgacttgatggcctcatttggggaaaagtggtggttattagggctttttctgaaatgtgtatctatgtaacatcacttaagtgtgcttaataaatcttctgtaaggattttagatgataaggctacaattcagaatcttctgaaccatctatgtaatgaatggggattatacattggaatttttgtcatgacacatttgccaaatcagtaggatatatttgttttggcagcctatcacgcagaggctagtggtatatttatgtaagaaaatgactgtaaatctcaagaaaaatctcagcagctaatagcaactcatttatttcattttggtcttaatgctttgtaaacaggtcaaaaaatactgtcatactctaagcttctattttccacactggacatacttctagttgtattctccatactattagactgtgtagtgatgtgacttccaagtagaatttaatctccccattgagtgtgtcatggtacaaatcactattcgtttttggtgttttttagggatgtgcaatgtgcattacataatgacagaaatactgagaaggttctgtgtgcccatttgaaaggagtgggaggaatacagcagtttgtttttcaacatgaatctgatattgatttaaactgtgtttcacttacaagttttaaaaaaatgacagggtttaatggagcgtgcataaaaatgtactgttttcaccttttgtttatatgtaaatgtttgtaagtatatgggcctatctgtaagtgggtaagtctgtatgtgtgtatcatacacatcaacctccatgtccttagtcctgggtttttgaaaaagtgctaaaacggacaagtagaataaatgttgctgtggaatgccatgctttagaacaaaccctttttgatcttaatgcttctgaaaactaggtctgactctggggatttttttccagccgaaggaaaatcacttccgttatgtccccctctaatttagccgctcgacattttacacaacccggatatgttgtatattttgacccaaagttacaggtaggtttaagagaatttttagccatgacttttggagcactattccattgtcagttattaataaagaattccattgcttagctaaccaacaggttttttttgtttccaagagagttatttgaaaagttaacagaacaatgagataacagtgacagtttaacaaagataaaattctgaactgcgttttattcatttgtgtactatgtgattttttaaatgtcccctttagtatttaatggaaaattggttcctgcaaaagacaaagggtgagagttagcgtcctgtagatacacacagagactaggccgtatattaactagaagcagctttatgtctagcttgtgtctttttgtttgtttgcttgtttgtttttagattcctgagagatgtctctggaagggaaagttttgagaactaatggctatttttgaggacaaaaattacatcttaagctaattccttaaatacatacagtaggtgaattttcaggacaatattgcctcacaaccctgcttacattgaaaagtctttttcccttagctcttctgactggatttttctacaaaaactatggaaaatatctttgttcttgtttgctgctattttctgtcctattttgagaaatataaatacatagaaatggtgcatcttaacatttgtttgtacatgtataaatgtcttgtattttaattcatttttagcatgaattgtttaagggtaagccacaacatctagaaatcactcatagatattgaacaataaaggagaatggtaccgatgcaggaggaagcaagcgtgtcttcccctgcagcacacagcgacttgcgttgacaaaggaggaggaaacgattactctgtaaacaaagttatccttacttgggagattgccacagcctgctgctgagttgagttaccagacatcctccatgtgagaagcagcgaacattgaatctcagggatggcccacaactgggtccacatgtaatgagccctgtttaataacgaaggggtgggggagagcagtccgtctacaacctggaatcagatttgcaaaatttcctgcactgctgtctgacactgtcctgttgatgccctttctgactgtgttctctgttttctctgtctgctgtctaaccctgtgccttgcctgggataaggacaatgatgaggttactggtttggattgtaagtagaggacttttattaattggtttagaggttcactgctgctttgtcactttctcaatcaaattggccacttaagaaataaagagctggtagaattgcatcctcagatgattattgactgtgtgtgtgtgtgaaaacagacattccagtgccacccaaatatatatctgtaacgtgcccaagaaatcctagctgcgctcttgagagtgcatgccatggagactggtttagacaccgcgtggagcctagttgcctgttgtcacggcatcttgcactttaggagactaagaccgtcctggttcgtctgtgtgtggtgtgaccaatggtgtgcccagagcactactctcaaaatcactagtgttagcaagtcgtcccgggctggggagcgttcgccgtagtctttggaagctttggctttagatttaccaagccccgcctccccgctgccagtgccctgctctcccgttcgcctctttctgtttctgtgtgaactttcccggtaatatcactcgttaaataggttttctttaaacttaattaaagaaaaactatttaaaggtaaaggatattttgttgacatcggtggctcgatcatccttaagcaactgaagttaaaattgttgaaggaaaaggcacttaaattggttactttcatgtccagctgtatataagtccagtgtgttcatctagatgacgcaaagaatctcctggtagagaagcgacatgtaaaaaactggtggaaaaaggttttggattttttttccagtggggtggggggagggcaagctggatttacaggtcacggctggactgaatgggcctttttatcttcccactgtatcatggaagtagctgcttgcttgtactgtccatccttcaggcatccctaaagctcactctgaagatgttagagacaaacacaaactcttcgagttaaagttgatcctgacactgacatgaaggcaagccttgatttcgtatgaacgttgctgaagtggtaattgaggaaaacagttccccagattgttaagagttcactgaagatattgacacaattttaaaaaatcagtaaaggaatgtatataatattgctctcgtgttttacagtaagatttgttgctctcagactgtgtaaaacaaaatttattcatgttttctgcatattaaaaaatcttattgtaccaactggtaaactattaaatgcctata

SEQ ID NO: 300702 - DNA, 3950 bp, Homo sapiens
  misc_feature (19)..(19): n is a, c, g, or t
cggccgcaccgaggccacnacatccccgtaccacctcccccatatcctcccctttctcaccctttcaccatttccacaagacggcaccctatgtcgtcactggcagcgtagatcaaacagtaaaagtgtgggagtgccgttgattgtgtctccttcggcccctcctccctcttttcctctggatgcactctgatgataccatggttaccccattgagctctgtttaaataaatattgtcctttcatgtaaattattctggatgtagattgagcttattaaatgttacacacaaagtattcatgcatggtgaatccaaattgtatactgtaaatttacatacgttgtctagaagtaccatagggtttaaaaacctgggctggcattggtcacaccaggcctaagaaggcagaagttgaatcaattgaactagggcactaaactgaatagttgacagtgtcattttatgttggattattaattcctgtttttctttctgctatctgttggtgcctgacttgatggcctcatttggggaaaagtggtggttattagggctttttctgaaatgtgtatctatgtaacatcacttaagtgtgcttaataaatcttctgtaaggattttagatgataaggctacaattcagaatcttctgaaccatctatgtaatgaatggggattatacattggaatttttgtcatgacacatttgccaaatcagtaggatatatttgttttggcagcctatcacgcagaggctagtggtatatttatgtaagaaaatgactgtaaatctcaagaaaaatctcagcagctaatagcaactcatttatttcattttggtcttaatgctttgtaaacaggtcaaaaaatactgtcatactctaagcttctattttccacactggacatacttctagttgtattctccatactattagactgtgtagtgatgtgacttccaagtagaatttaatctccccattgagtgtgtcatggtacaaatcactattcgtttttggtgttttttagggatgtgcaatgtgcattacataatgacagaaatactgagaaggttctgtgtgcccatttgaaaggagtgggaggaatacagcagtttgtttttcaacatgaatctgatattgatttaaactgtgtttcacttacaagttttaaaaaaatgacagggtttaatggagcgtgcataaaaatgtactgttttcaccttttgtttatatgtaaatgtttgtaagtatatgggcctatctgtaagtgggtaagtctgtatgtgtgtatcatacacatcaacctccatgtccttagtcctgggtttttgaaaaagtgctaaaacggacaagtagaataaatgttgctgtggaatgccatgctttagaacaaaccctttttgatcttaatgcttctgaaaactaggtctgactctggggatttttttccagccgaaggaaaatcacttccgttatgtccccctctaatttagccgctcgacattttacacaacccggatatgttgtatattttgacccaaagttacaggtaggtttaagagaatttttagccatgacttttggagcactattccattgtcagttattaataaagaattccattgcttagctaaccaacaggttttttttgtttccaagagagttatttgaaaagttaacagaacaatgagataacagtgacagtttaacaaagataaaattctgaactgcgttttattcatttgtgtactatgtgattttttaaatgtcccctttagtatttaatggaaaattggttcctgcaaaagacaaagggtgagagttagcgtcctgtagatacacacagagactaggccgtatattaactagaagcagctttatgtctagcttgtgtctttttgtttgtttgcttgtttgtttttagattcctgagagatgtctctggaagggaaagttttgagaactaatggctatttttgaggacaaaaattacatcttaagctaattccttaaatacatacagtaggtgaattttcaggacaatattgcctcacaaccctgcttacattgaaaagtctttttcccttagctcttctgactggatttttctacaaaaactatggaaaatatctttgttcttgtttgctgctattttctgtcctattttgagaaatataaatacatagaaatggtgcatcttaacatttgtttgtacatgtataaatgtcttgtattttaattcatttttagcatgaattgtttaagggtaagccacaacatctagaaatcactcatagatattgaacaataaaggagaatggtaccgatgcaggaggaagcaagcgtgtcttcccctgcagcacacagcgacttgcgttgacaaaggaggaggaaacgattactctgtaaacaaagttatccttacttgggagattgccacagcctgctgctgagttgagttaccagacatcctccatgtgagaagcagcgaacattgaatctcagggatggcccacaactgggtccacatgtaatgagccctgtttaataacgaaggggtgggggagagcagtccgtctacaacctggaatcagatttgcaaaatttcctgcactgctgtctgacactgtcctgttgatgccctttctgactgtgttctctgttttctctgtctgctgtctaaccctgtgccttgcctgggataaggacaatgatgaggttactggtttggattgtaagtagaggacttttattaattggtttagaggttcactgctgctttgtcactttctcaatcaaattggccacttaagaaataaagagctggtagaattgcatcctcagatgattattgactgtgtgtgtgtgtgaaaacagacattccagtgccacccaaatatatatctgtaacgtgcccaagaaatcctagctgcgctcttgagagtgcatgccatggagactggtttagacaccgcgtggagcctagttgcctgttgtcacggcatcttgcactttaggagactaagaccgtcctggttcgtctgtgtgtggtgtgaccaatggtgtgcccagagcactactctcaaaatcactagtgttagcaagtcgtcccgggctggggagcgttcgccgtagtctttggaagctttggctttagatttaccaagccccgcctccccgctgccagtgccctgctctcccgttcgcctctttctgtttctgtgtgaactttcccggtaatatcactcgttaaataggttttctttaaacttaattaaagaaaaactatttaaaggtaaaggatattttgttgacatcggtggctcgatcatccttaagcaactgaagttaaaattgttgaaggaaaaggcacttaaattggttactttcatgtccagctgtatataagtccagtgtgttcatctagatgacgcaaagaatctcctggtagagaagcgacatgtaaaaaactggtggaaaaaggttttggattttttttccagtggggtggggggagggcaagctggatttacaggtcacggctggactgaatgggcctttttatcttcccactgtatcatggaagtagctgcttgcttgtactgtccatccttcaggcatccctaaagctcactctgaagatgttagagacaaacacaaactcttcgagttaaagttgatcctgacactgacatgaaggcaagccttgatttcgtatgaacgttgctgaagtggtaattgaggaaaacagttccccagattgttaagagttcactgaagatattgacacaattttaaaaaatcagtaaaggaatgtatataatattgctctcgtgttttacagtaagatttgttgctctcagactgtgtaaaacaaaatttattcatgttttctgcatattaaaaaatcttattgtaccaactggtaaactattaaatgcctata

SEQ ID NO: 300703 - DNA, 4926 bp, Homo sapiens
agggcgttggggcagctcctgtgacagacggagctggagcggcggggcggcggcggagtccggcggccgggagagcgagtgagcgagcggaggagcagcgacacgggagtctagggagcgagaaggagaaggaggggagcgctcgggcgcgagcgagagaaaccgcgagcgccgagcttggactcgagccccggaacggctgaggagcccgcccgctcacctcccctccccctccccgggcccgggcccagcgcgccatcctcccccctccttccctccctccctccttcctccctcccctctccctccccctcccccgccggtggatgggagtgaaggacggaagaggccctgcggaggcggcggtgcagcgctccggtggaatgaatcttacttgttgaatatcttctggttactagttggattcatttgtgaaagaatcattttcccctgtgtggaagacacttagtggcatatttaaattataagtccacggatcaaaaagctttttgatttcccaaaggagggacataccactatatcagataagcttgacattacagccaagatggtgctgtcccagagacaacgagatgaactaaatcgagctatagcagattatcttcgttcaaatggctatgaagaggcatattcagtttttaaaaaggaagctgaattagatgtgaatgaagaattagataaaaagtatgctggtcttttggaaaaaaaatggacatctgttattagattacaaaagaaggttatggaattagaatcaaagctaaatgaagcaaaagaagaatttacgtcaggtggacctcttggtcagaaacgagacccaaaagaatggattccccgtccgccagaaaaatatgcattgagtggtcacaggagtccagtcactcgagtcattttccatcctgtgttcagtgttatggtctctgcttcagaggatgctacaattaaggtgtgggattatgagactggagattttgaacgaactcttaaaggacatacagactctgtacaggacatttcattcgaccacagcggcaagcttctggcttcctgttctgcagatatgaccattaaactatgggattttcagggctttgaatgcatcagaaccatgcacggccatgaccacaatgtttcttcagtagccatcatgcccaatggagatcatatagtgtctgcctcaagggataaaactataaaaatgtgggaagtgcaaactggctactgtgtgaagacattcacaggacacagagaatgggtacgtatggtacggccaaatcaagatggcactctgatagccagctgttccaatgaccagactgtgcgtgtatgggtcgtagcaacaaaggaatgcaaggctgagctccgagagcatgagcatgtggtagaatgcatttcctgggctccagaaagctcatattcctccatctctgaagcaacaggatctgagactaaaaaaagtggtaaacctgggccattcttgctgtctggatccagagacaagactattaagatgtgggatgtcagtactggcatgtgccttatgaccctcgtgggtcatgataactgggtacgtggagttctgttccattctggggggaagtttattttgagttgtgctgatgacaagaccctacgcgtatgggattacaagaacaagcgatgcatgaagaccctcaatgcgcatgaacactttgttacctccttggatttccacaagacggcaccctatgtcgtcactggcagcgtagatcaaacagtaaaagtgtgggagtgccgttgattgtgtctccttcggcccctcctccctcttttcctctggatgcactctgatgataccatggttaccccattgagctctgtttaaataaatattgtcctttcatgtaaattattctggatgtagattgagcttattaaatgttacacacaaagtattcatgcatggtgaatccaaattgtatactgtaaatttacatacgttgtctagaagtaccatagggtttaaaaacctgggctggcattggtcacaccaggcctaagaaggcagaagttgaatcaattgaactagggcactaaactgaatagttgacagtgtcattttatgttggattattaattcctgtttttctttctgctatctgttggtgcctgacttgatggcctcatttggggaaaagtggtggttattagggctttttctgaaatgtgtatctatgtaacatcacttaagtgtgcttaataaatcttctgtaaggattttagatgataaggctacaattcagaatcttctgaaccatctatgtaatgaatggggattatacattggaatttttgtcatgacacatttgccaaatcagtaggatatatttgttttggcagcctatcacgcagaggctagtggtatatttatgtaagaaaatgactgtaaatctcaagaaaaatctcagcagctaatagcaactcatttatttcattttggtcttaatgctttgtaaacaggtcaaaaaatactgtcatactctaagcttctattttccacactggacatacttctagttgtattctccatactattagactgtgtagtgatgtgacttccaagtagaatttaatctccccattgagtgtgtcatggtacaaatcactattcgtttttggtgttttttagggatgtgcaatgtgcattacataatgacagaaatactgagaaggttctgtgtgcccatttgaaaggagtgggaggaatacagcagtttgtttttcaacatgaatctgatattgatttaaactgtgtttcacttacaagttttaaaaaaatgacagggtttaatggagcgtgcataaaaatgtactgttttcaccttttgtttatatgtaaatgtttgtaagtatatgggcctatctgtaagtgggtaagtctgtatgtgtgtatcatacacatcaacctccatgtccttagtcctgggtttttgaaaaagtgctaaaacggacaagtagaataaatgttgctgtggaatgccatgctttagaacaaaccctttttgatcttaatgcttctgaaaactaggtctgactctggggatttttttccagccgaaggaaaatcacttccgttatgtccccctctaatttagccgctcgacattttacacaacccggatatgttgtatattttgacccaaagttacaggtaggtttaagagaatttttagccatgacttttggagcactattccattgtcagttattaataaagaattccattgcttagctaaccaacaggttttttttgtttccaagagagttatttgaaaagttaacagaacaatgagataacagtgacagtttaacaaagataaaattctgaactgcgttttattcatttgtgtactatgtgattttttaaatgtcccctttagtatttaatggaaaattggttcctgcaaaagacaaagggtgagagttagcgtcctgtagatacacacagagactaggccgtatattaactagaagcagctttatgtctagcttgtgtctttttgtttgtttgcttgtttgtttttagattcctgagagatgtctctggaagggaaagttttgagaactaatggctatttttgaggacaaaaattacatcttaagctaattccttaaatacatacagtaggtgaattttcaggacaatattgcctcacaaccctgcttacattgaaaagtctttttcccttagctcttctgactggatttttctacaaaaactatggaaaatatctttgttcttgtttgctgctattttctgtcctattttgagaaatataaatacatagaaatggtgcatcttaacatttgtttgtacatgtataaatgtcttgtattttaattcatttttagcatgaattgtttaagggtaagccacaacatctagaaatcactcatagatattgaacaataaaggagaatggtaccgatgcaggaggaagcaagcgtgtcttcccctgcagcacacagcgacttgcgttgacaaaggaggaggaaacgattactctgtaaacaaagttatccttacttgggagattgccacagcctgctgctgagttgagttaccagacatcctccatgtgagaagcagcgaacattgaatctcagggatggcccacaactgggtccacatgtaatgagccctgtttaataacgaaggggtgggggagagcagtccgtctacaacctggaatcagatttgcaaaatttcctgcactgctgtctgacactgtcctgttgatgccctttctgactgtgttctctgttttctctgtctgctgtctaaccctgtgccttgcctgggataaggacaatgatgaggttactggtttggattgtaagtagaggacttttattaattggtttagaggttcactgctgctttgtcactttctcaatcaaattggccacttaagaaataaagagctggtagaattgcatcctcagatgattattgactgtgtgtgtgtgtgaaaacagacattccagtgccacccaaatatatatctgtaacgtgcccaagaaatcctagctgcgctcttgagagtgcatgccatggagactggtttagacaaacacaaactcttcgagttaaagttgatcctgacactgacatgaaggcaagccttgatttcgtatgaacgttgctgaagtggtaattgaggaaaacagttccccagattgttaagagttcactgaagatattgacacaattttaaaaaatcagtaaaggaatgtatataatattgctctcgtgttttacagtaagatttgttgctctcagactgtgtaaaacaaaatttattcatgttttctgcatattaaaaaatcttattgtaccaactggtaaactattaaatgcctata

SEQ ID NO: 300704 - DNA, 3181 bp, Homo sapiens
gttgaaaagtgctaaaacggacagtagaataaatgttgcgtggaatgccatgctttaaacaaaccctttttggtcttaatgctttgtaaacaggtcaaaaaatactgtcatactctaagcttctattttccacactggacatacttctagttgtattctccatactattagactgtgtagtgatgtgacttccaagtagaatttaatctccccattgagtgtgtcatggtacaaatcactattcgtttttggtgttttttagggatgtgcaatgtgcattacataatgacagaaatactgagaaggttctgtgtgcccatttgaaaggagtgggaggaatacagcagtttgtttttcaacatgaatctgatattgatttaaactgtgtttcacttacaagttttaaaaaaatgacagggtttaatggagcgtgcataaaaatgtactgttttcaccttttgtttatatgtaaatgtttgtaagtatatgggcctatctgtaagtgggtaagtctgtatgtgtgtatcatacacatcaacctccatgtccttagtcctgggtttttgaaaaagtgctaaaacggacaagtagaataaatgttgctgtggaatgccatgctttagaacaaaccctttttgatcttaatgcttctgaaaactaggtctgactctggggatttttttccagccgaaggaaaatcacttccgttatgtccccctctaatttagccgctcgacattttacacaacccggatatgttgtatattttgacccaaagttacaggtaggtttaagagaatttttagccatgacttttggagcactattccattgtcagttattaataaagaattccattgcttagctaaccaacaggttttttttgtttccaagagagttatttgaaaagttaacagaacaatgagataacagtgacagtttaacaaagataaaattctgaactgcgttttattcatttgtgtactatgtgattttttaaatgtcccctttagtatttaatggaaaattggttcctgcaaaagacaaagggtgagagttagcgtcctgtagatacacacagagactaggccgtatattaactagaagcagctttatgtctagcttgtgtctttttgtttgtttgcttgtttgtttttagattcctgagagatgtctctggaagggaaagttttgagaactaatggctatttttgaggacaaaaattacatcttaagctaattccttaaatacatacagtaggtgaattttcaggacaatattgcctcacaaccctgcttacattgaaaagtctttttcccttagctcttctgactggatttttctacaaaaactatggaaaatatctttgttcttgtttgctgctattttctgtcctattttgagaaatataaatacatagaaatggtgcatcttaacatttgtttgtacatgtataaatgtcttgtattttaattcatttttagcatgaattgtttaagggtaagccacaacatctagaaatcactcatagatattgaacaataaaggagaatggtaccgatgcaggaggaagcaagcgtgtcttcccctgcagcacacagcgacttgcgttgacaaaggaggaggaaacgattactctgtaaacaaagttatccttacttgggagattgccacagcctgctgctgagttgagttaccagacatcctccatgtgagaagcagcgaacattgaatctcagggatggcccacaactgggtccacatgtaatgagccctgtttaataacgaaggggtgggggagagcagtccgtctacaacctggaatcagatttgcaaaatttcctgcactgctgtctgacactgtcctgttgatgccctttctgactgtgttctctgttttctctgtctgctgtctaaccctgtgccttgcctgggataaggacaatgatgaggttactggtttggattgtaagtagaggacttttattaattggtttagaggttcactgctgctttgtcactttctcaatcaaattggccacttaagaaataaagagctggtagaattgcatcctcagatgattattgactgtgtgtgtgtgtgaaaacagacattccagtgccacccaaatatatatctgtaacgtgcccaagaaatcctagctgcgctcttgagagtgcatgccatggagactggtttagacaccgcgtggagcctagttgcctgttgtcacggcatcttgcactttaggagactaagaccgtcctggttcgtctgtgtgtggtgtgaccaatggtgtgcccagagcactactctcaaaatcactagtgttagcaagtcgtcccgggctggggagcgttcgccgtagtctttggaagctttggctttagatttaccaagccccgcctccccgctgccagtgccctgctctcccgttcgcctctttctgtttctgtgtgaactttcccggtaatatcactcgttaaataggttttctttaaacttaattaaagaaaaactatttaaaggtaaaggatattttgttgacatcggtggctcgatcatccttaagcaactgaagttaaaattgttgaaggaaaaggcacttaaattggttactttcatgtccagctgtatataagtccagtgtgttcatctagatgacgcaaagaatctcctggtagagaagcgacatgtaaaaaactggtggaaaaaggttttggattttttttccagtggggtggggggagggcaagctggatttacaggtcacggctggactgaatgggcctttttatcttcccactgtatcatggaagtagctgcttgcttgtactgtccatccttcaggcatccctaaagctcactctgaagatgttagagacaaacacaaactcttcgagttaaagttgatcctgacactgacatgaaggcaagccttgatttcgtatgaacgttgctgaagtggtaattgaggaaaacagttccccagattgttaagagttcactgaagatattgacacaattttaaaaaatcagtaaaggaatgtatataatattgctctcgtgttttacagtaagatttgttgctctcagactgtgtaaaacaaaatttattcatgttttctgcatattaaaaaatcttattgtaccaactggtaaactattaaatgcctata

SEQ ID NO: 300705 - DNA, 4589 bp, Homo sapiens
agggcgttggggcagctcctgtgacagacggagctggagcggcggggcggcggcggagtccggcggccgggagagcgagtgagcgagcggaggagcagcgacacgggagtctagggagcgagaaggagaaggaggggagcgctcgggcgcgagcgagagaaaccgcgagcgccgagcttggactcgagccccggaacggctgaggagcccgcccgctcacctcccctccccctccccgggcccgggcccagcgcgccatcctcccccctccttccctccctccctccttcctccctcccctctccctccccctcccccgccggtggatgggagtgaaggacggaagaggccctgcggaggcggcggtgcagcgctccggtggaatgaatcttacttgttgaatatcttctggttactagttggattcatttgtgaaagaatcattttcccctgtgtggaagacacttagtggcatatttaaattataagtccacggatcaaaaagctttttgatttcccaaaggagggacataccactatatcagataagcttgacattacagccaagatggtgctgtcccagagacaacgagatgaactaaatcgagctatagcagattatcttcgttcaaatggctatgaagaggcatattcagtttttaaaaaggaagctgaattagatgtgaatgaagaattagataaaaagtatgctggtcttttggaaaaaaaatggacatctgttattagattacaaaagaaggttatggaattagaatcaaagctaaatgaagcaaaagaagaatttacgtcaggtggacctcttggtcagaaacgagacccaaaagaatggattccccgtccgccagaaaaatatgcattgagtggtcacaggagtccagtcactcgagtcattttccatcctgtgttcagtgttatggtctctgcttcagaggatgctacaattaaggtgtgggattatgagactggagattttgaacgaactcttaaaggacatacagactctgtacaggacatttcattcgaccacagcggcaagcttctggcttcctgttctgcagatatgaccattaaactatgggattttcagggctttgaatgcatcagaaccatgcacggccatgaccacaatgtttcttcagtagccatcatgcccaatggagatcatatagtgtctgcctcaagggataaaactataaaaatgtgggaagtgcaaactggctactgtgtgaagacattcacaggacacagagaatgggtacgtatggtacggccaaatcaagatggcactctgatagccagctgttccaatgaccagactgtgcgtgtatgggtcgtagcaacaaaggaatgcaaggctgagctccgagagcatgagcatgtggtagaatgcatttcctgggctccagaaagctcatattcctccatctctgaagcaacaggatctgagactaaaaaaagtggtaaacctgggccattcttgctgtctggatccagagacaagactattaagatgtgggatgtcagtactggcatgtgccttatgaccctcgtgggtcatgataactgggtacgtggagttctgttccattctggggggaagtttattttgagttgtgctgatgacaagaccctacgcgtatgggattacaagaacaagcgatgcatgaagaccctcaatgcgcatgaacactttgttacctccttggatttccacaagacggcaccctatgtcgtcactggcagcgtagatcaaacagtaaaagtgtgggagtgccgttgattgtgtctccttcggcccctcctccctcttttcctctggatgcactctgatgataccatggttaccccattgagctctgtttaaataaatattgtcctttcatgtaaattattctggatgtagattgagcttattaaatgttacacacaaagtattcatgcatggtgaatccaaattgtatactgtaaatttacatacgttgtctagaagtaccatagggtttaaaaacctgggctggcattggtcacaccaggcctaagaaggcagaagttgaatcaattgaactagggcactaaactgaatagttgacagtgtcattttatgttggattattaattcctgtttttctttctgctatctgttggtgcctgacttgatggcctcatttggggaaaagtggtggttattagggctttttctgaaatgtgtatctatgtaacatcacttaagtgtgcttaataaatcttctgtaaggattttagatgataaggctacaattcagaatcttctgaaccatctatgtaatgaatggggattatacattggaatttttgtcatgacacatttgccaaatcagtaggatatatttgttttggcagcctatcacgcagaggctagtggtatatttatgtaagaaaatgactgtaaatctcaagaaaaatctcagcagctaatagcaactcatttatttcattttggtcttaatgctttgtaaacaggtcaaaaaatactgtcatactctaagcttctattttccacactggacatacttctagttgtattctccatactattagactgtgtagtgatgtgacttccaagtagaatttaatctccccattgagtgtgtcatggtacaaatcactattcgtttttggtgttttttagggatgtgcaatgtgcattacataatgacagaaatactgagaaggttctgtgtgcccatttgaaaggagtgggaggaatacagcagtttgtttttcaacatgaatctgatattgatttaaactgtgtttcacttacaagttttaaaaaaatgacagggtttaatggagcgtgcataaaaatgtactgttttcaccttttgtttatatgtaaatgtttgtaagtatatgggcctatctgtaagtgggtaagtctgtatgtgtgtatcatacacatcaacctccatgtccttagtcctgggtttttgaaaaagtgctaaaacggacaagtagaataaatgttgctgtggaatgccatgctttagaacaaaccctttttgatcttaatgcttctgaaaactaggtctgactctggggatttttttccagccgaaggaaaatcacttccgttatgtccccctctaatttagccgctcgacattttacacaacccggatatgttgtatattttgacccaaagttacaggtaggtttaagagaatttttagccatgacttttggagcactattccattgtcagttattaataaagaattccattgcttagctaaccaacaggttttttttgtttccaagagagttatttgaaaagttaacagaacaatgagataacagtgacagtttaacaaagataaaattctgaactgcgttttattcatttgtgtactatgtgattttttaaatgtcccctttagtatttaatggaaaattggttcctgcaaaagacaaagggtgagagttagcgtcctgtagatacacacagagactaggccgtatattaactagaagcagctttatgtctagcttgtgtctttttgtttgtttgcttgtttgtttttagattcctgagagatgtctctggaagggaaagttttgagaactaatggctatttttgaggacaaaaattacatcttaagctaattccttaaatacatacagtaggtgaattttcaggacaatattgcctcacaaccctgcttacattgaaaagtctttttcccttagctcttctgactggatttttctacaaaaactatggaaaatatctttgttcttgtttgctgctattttctgtcctattttgagaaatataaatacatagaaatggtgcatcttaacatttgtttgtacatgtataaatgtcttgtattttaattcatttttagcatgaattgtttaagggtaagccacaacatctagaaatcactcatagatattgaacaataaaggagaatggtaccgatgcaggaggaagcaagcgtgtcttcccctgcagcacacagcgacttgcgttgacaaaggaggaggaaacgattactctgtaaacaaagttatccttacttgggagattgccacagcctgctgctgagttgagttaccagacatcctccatgtgagaagcagcgaacattgaatctcagggatggcccacaactgggtccacatgtaatgagccctgtttaataacgaaggggtgggggagagcagtccgtctacaacctggaatcagatttgcaaaatttcctgcactgctgtctgacactgtcctgttgatgccctttctgactgtgttctctgttttctctgtctgctgtctaaccctgtgccttgcctgggataaggacaatgatgaggttactggtttggattgtaagtagaggacttttattaattggtttagaggttcactgctgctttgtcactttctcaatcaaattggccacttaagaaataaagagctggtagaattgcatcctcagatgattattgactgtgtgtgtgtgtgaaaacagacattccagtgccaccccgtcgggtggagcggtaccgagctcgatccgta

SEQ ID NO: 300706 - DNA, 5156 bp, Homo sapiens
agggcgttggggcagctcctgtgacagacggagctggagcggcggggcggcggcggagtccggcggccgggagagcgagtgagcgagcggaggagcagcgacacgggagtctagggagcgagaaggagaaggaggggagcgctcgggcgcgagcgagagaaaccgcgagcgccgagcttggactcgagccccggaacggctgaggagcccgcccgctcacctcccctccccctccccgggcccgggcccagcgcgccatcctcccccctccttccctccctccctccttcctccctcccctctccctccccctcccccgccggtggatgggagtgaaggacggaagaggccctgcggaggcggcggtgcagcgctccggtggaatgaatcttacttgttgaatatcttctggttactagttggattcatttgtgaaagaatcattttcccctgtgtggaagacacttagtggcatatttaaattataagtccacggatcaaaaagctttttgatttcccaaaggagggacataccactatatcagataagcttgacattacagccaagatggtgctgtcccagagacaacgagatgaactaaatcgagctatagcagattatcttcgttcaaatggctatgaagaggcatattcagtttttaaaaaggaagctgaattagatgtgaatgaagaattagataaaaagtatgctggtcttttggaaaaaaaatggacatctgttattagattacaaaagaaggttatggaattagaatcaaagctaaatgaagcaaaagaagaatttacgtcaggtggacctcttggtcagaaacgagacccaaaagaatggattccccgtccgccagaaaaatatgcattgagtggtcacaggagtccagtcactcgagtcattttccatcctgtgttcagtgttatggtctctgcttcagaggatgctacaattaaggtgtgggattatgagactggagattttgaacgaactcttaaaggacatacagactctgtacaggacatttcattcgaccacagcggcaagcttctggcttcctgttctgcagatatgaccattaaactatgggattttcagggctttgaatgcatcagaaccatgcacggccatgaccacaatgtttcttcagtagccatcatgcccaatggagatcatatagtgtctgcctcaagggataaaactataaaaatgtgggaagtgcaaactggctactgtgtgaagacattcacaggacacagagaatgggtacgtatggtacggccaaatcaagatggcactctgatagccagctgttccaatgaccagactgtgcgtgtatgggtcgtagcaacaaaggaatgcaaggctgagctccgagagcatgagcatgtggtagaatgcatttcctgggctccagaaagctcatattcctccatctctgaagcaacaggatctgagactaaaaaaagtggtaaacctgggccattcttgctgtctggatccagagacaagactattaagatgtgggatgtcagtactggcatgtgccttatgaccctcgtgggtcatgataactgggtacgtggagttctgttccattctggggggaagtttattttgagttgtgctgatgacaagaccctacgcgtatgggattacaagaacaagcgatgcatgaagaccctcaatgcgcatgaacactttgttacctccttggatttccacaagacggcaccctatgtcgtcactggcagcgtagatcaaacagtaaaagtgtgggagtgccgttgattgtgtctccttcggcccctcctccctcttttcctctggatgcactctgatgataccatggttaccccattgagctctgtttaaataaatattgtcctttcatgtaaattattctggatgtagattgagcttattaaatgttacacacaaagtattcatgcatggtgaatccaaattgtatactgtaaatttacatacgttgtctagaagtaccatagggtttaaaaacctgggctggcattggtcacaccaggcctaagaaggcagaagttgaatcaattgaactagggcactaaactgaatagttgacagtgtcattttatgttggattattaattcctgtttttctttctgctatctgttggtgcctgacttgatggcctcatttggggaaaagtggtggttattagggctttttctgaaatgtgtatctatgtaacatcacttaagtgtgcttaataaatcttctgtaaggattttagatgataaggctacaattcagaatcttctgaaccatctatgtaatgaatggggattatacattggaatttttgtcatgacacatttgccaaatcagtaggatatatttgttttggcagcctatcacgcagaggctagtggtatatttatgtaagaaaatgactgtaaatctcaagaaaaatctcagcagctaatagcaactcatttatttcattttggtcttaatgctttgtaaacaggtcaaaaaatactgtcatactctaagcttctattttccacactggacatacttctagttgtattctccatactattagactgtgtagtgatgtgacttccaagtagaatttaatctccccattgagtgtgtcatggtacaaatcactattcgtttttggtgttttttagggatgtgcaatgtgcattacataatgacagaaatactgagaaggttctgtgtgcccatttgaaaggagtgggaggaatacagcagtttgtttttcaacatgaatctgatattgatttaaactgtgtttcacttacaagttttaaaaaaatgacagggtttaatggagcgtgcataaaaatgtactgttttcaccttttgtttatatgtaaatgtttgtaagtatatgggcctatctgtaagtgggtaagtctgtatgtgtgtatcatacacatcaacctccatgtccttagtcctgggtttttgaaaaagtgctaaaacggacaagtagaataaatgttgctgtggaatgccatgctttagaacaaaccctttttgatcttaatgcttctgaaaactaggtctgactctggggatttttttccagccgaaggaaaatcacttccgttatgtccccctctaatttagccgctcgacattttacacaacccggatatgttgtatattttgacccaaagttacaggtaggtttaagagaatttttagccatgacttttggagcactattccattgtcagttattaataaagaattccattgcttagctaaccaacaggttttttttgtttccaagagagttatttgaaaagttaacagaacaatgagataacagtgacagtttaacaaagataaaattctgaactgcgttttattcatttgtgtactatgtgattttttaaatgtcccctttagtatttaatggaaaattggttcctgcaaaagacaaagggtgagagttagcgtcctgtagatacacacagagactaggccgtatattaactagaagcagctttatgtctagcttgtgtctttttgtttgtttgcttgtttgtttttagattcctgagagatgtctctggaagggaaagttttgagaactaatggctatttttgaggacaaaaattacatcttaagctaattccttaaatacatacagtaggtgaattttcaggacaatattgcctcacaaccctgcttacattgaaaagtctttttcccttagctcttctgactggatttttctacaaaaactatggaaaatatctttgttcttgtttgctgctattttctgtcctattttgagaaatataaatacatagaaatggtgcatcttaacatttgtttgtacatgtataaatgtcttgtattttaattcatttttagcatgaattgtttaagggtaagccacaacatctagaaatcactcatagatattgaacaataaaggagaatggtaccgatgcaggaggaagcaagcgtgtcttcccctgcagcacacagcgacttgcgttgacaaaggaggaggaaacgattactctgtaaacaaagttatccttacttgggagattgccacagcctgctgctgagttgagttaccagacatcctccatgtgagaagcagcgaacattgaatctcagggatggcccacaactgggtccacatgtaatgagccctgtttaataacgaaggggtgggggagagcagtccgtctacaacctggaatcagatttgcaaaatttcctgcactgctgtctgacactgtcctgttgatgccctttctgactgtgttctctgttttctctgtctgctgtctaaccctgtgccttgcctgggataaggacaatgatgaggttactggtttggattgtaagtagaggacttttattaattggtttagaggttcactgctgctttgtcactttctcaatcaaattggccacttaagaaataaagagctggtagaataaaaaaaaaaaaaaaaaaaaaaaaaaaaaaaaaaaaaaaaaaaaaaaaaaaaaaaaaaaaagaacaaaaaaaaaaaaaaggaaaacagaagagatacacgaacgacacaagcaaacaccacactacaaatcacggacggcgggcccacaccacaaaaactaaacactaggaggcggcgcgagcggtcgtaccaacacacaacctcgaccgcggggggcagcacgcaggccgacgccccccgtccgcgtcattatataagcgcgagccagcgcccgcggccttataacacgacaagcgcgaggagaacacgccctatggaccaattcgggacacacaccacttcgtcgggggcatcgtgaacaaaccacacccgctggttggatgttacggaacgcagcaccaaaaacatcaatatggtcatgtaggaataaacaccactatgtgcgtggcgcagaacagccctcgggaggtgtcgaataaactaagcgccaagctacatatacataccctgacgctaagtcacacgagacgacacaacgagacaactcaacacagtgcgaacccactctgcaggtagccatcgcaagcacagtacgcacgggccgccgcggagaagagccgagaccagactcacgaacggacgagaacaggcggcagacgt

SEQ ID NO: 300707 - DNA, 1808 bp, Homo sapiens
cctatttcgagaaatataaatacaagacatttatacatgtagcaaacaaatgttaacgatgcaccatttgtttgtacatgtataaatgtcttgtattttaattcatttttagcatgaattgtttaagggtaagccacaacatctagaaatcactcatagatattgaacaataaaggagaatggtaccgatgcaggaggaagcaagcgtgtcttcccctgcagcacacagcgacttgcgttgacaaaggaggaggaaacgattactctgtaaacaaagttatccttacttgggagattgccacagcctgctgctgagttgagttaccagacatcctccatgtgagaagcagcgaacattgaatctcagggatggcccacaactgggtccacatgtaatgagccctgtttaataacgaaggggtgggggagagcagtccgtctacaacctggaatcagatttgcaaaatttcctgcactgctgtctgacactgtcctgttgatgccctttctgactgtgttctctgttttctctgtctgctgtctaaccctgtgccttgcctgggataaggacaatgatgaggttactggtttggattgtaagtagaggacttttattaattggtttagaggttcactgctgctttgtcactttctcaatcaaattggccacttaagaaataaagagctggtagaattgcatcctcagatgattattgactgtgtgtgtgtgtgaaaacagacattccagtgccacccaaatatatatctgtaacgtgcccaagaaatcctagctgcgctcttgagagtgcatgccatggagactggtttagacaccgcgtggagcctagttgcctgttgtcacggcatcttgcactttaggagactaagaccgtcctggttcgtctgtgtgtggtgtgaccaatggtgtgcccagagcactactctcaaaatcactagtgttagcaagtcgtcccgggctggggagcgttcgccgtagtctttggaagctttggctttagatttaccaagccccgcctccccgctgccagtgccctgctctcccgttcgcctctttctgtttctgtgtgaactttcccggtaatatcactcgttaaataggttttctttaaacttaattaaagaaaaactatttaaaggtaaaggatattttgttgacatcggtggctcgatcatccttaagcaactgaagttaaaattgttgaaggaaaaggcacttaaattggttactttcatgtccagctgtatataagtccagtgtgttcatctagatgacgcaaagaatctcctggtagagaagcgacatgtaaaaaactggtggaaaaaggttttggattttttttccagtggggtggggggagggcaagctggatttacaggtcacggctggactgaatgggcctttttatcttcccactgtatcatggaagtagctgcttgcttgtactgtccatccttcaggcatccctaaagctcactctgaagatgttagagacaaacacaaactcttcgagttaaagttgatcctgacactgacatgaaggcaagccttgatttcgtatgaacgttgctgaagtggtaattgaggaaaacagttccccagattgttaagagttcactgaagatattgacacaattttaaaaaatcagtaaaggaatgtatataatattgctctcgtgttttacagtaagatttgttgctctcagactgtgtaaaacaaaatttattcatgttttctgcatattaaaaaatcttattgtaccaactggtaaactattaaatgcctata

SEQ ID NO: 300708 - DNA, 3181 bp, Homo sapiens
agggcgttggggcagctcctgtgacagacggagctggagcggcggggcggcggcggagtccggcggccgggagagcgagtgagcgagcggaggagcagcgacacgggagtctagggagcgagaaggagaaggaggggagcgctcgggcgcgagcgagagaaaccgcgagcgccgagcttggactcgagccccggaacggctgaggagcccgcccgctcacctcccctccccctccccgggcccgggcccagcgcgccatcctcccccctccttccctccctccctccttcctccctcccctctccctccccctcccccgccggtggatgggagtgaaggacggaagaggccctgcggaggcggcggtgcagcgctccggtggaatgaatcttacttgttgaatatcttctggttactagttggattcatttgtgaaagaatcattttcccctgtgtggaagacacttagtggcatatttaaattataagtccacggatcaaaaagctttttgatttcccaaaggagggacataccactatatcagataagcttgacattacagccaagatggtgctgtcccagagacaacgagatgaactaaatcgagctatagcagattatcttcgttcaaatggctatgaagaggcatattcagtttttaaaaaggaagctgaattagatgtgaatgaagaattagataaaaagtatgctggtcttttggaaaaaaaatggacatctgttattagattacaaaagaaggttatggaattagaatcaaagctaaatgaagcaaaagaagaatttacgtcaggtggacctcttggtcagaaacgagacccaaaagaatggattccccgtccgccagaaaaatatgcattgagtggtcacaggagtccagtcactcgagtcattttccatcctgtgttcagtgttatggtctctgcttcagaggatgctacaattaaggtgtgggattatgagactggagattttgaacgaactcttaaaggacatacagactctgtacaggacatttcattcgaccacagcggcaagcttctggcttcctgttctgcagatatgaccattaaactatgggattttcagggctttgaatgcatcagaaccatgcacggccatgaccacaatgtttcttcagtagccatcatgcccaatggagatcatatagtgtctgcctcaagggataaaactataaaaatgtgggaagtgcaaactggctactgtgtgaagacattcacaggacacagagaatgggtacgtatggtacggccaaatcaagatggcactctgatagccagctgttccaatgaccagactgtgcgtgtatgggtcgtagcaacaaaggaatgcaaggctgagctccgagagcatgagcatgtggtagaatgcatttcctgggctccagaaagctcatattcctccatctctgaagcaacaggatctgagactaaaaaaagtggtaaacctgggccattcttgctgtctggatccagagacaagactattaagatgtgggatgtcagtactggcatgtgccttatgaccctcgtgggtcatgataactgggtacgtggagttctgttccattctggggggaagtttattttgagttgtgctgatgacaagaccctacgcgtatgggattacaagaacaagcgatgcatgaagaccctcaatgcgcatgaacactttgttacctccttggatttccacaagacggcaccctatgtcgtcactggcagcgtagatcaaacagtaaaagtgtgggagtgccgttgattgtgtctccttcggcccctcctccctcttttcctctggatgcactctgatgataccatggttaccccattgagctctgtttaaataaatattgtcctttcatgtaaattattctggatgtagattgagcttattaaatgttacacacaaagtattcatgcatggtgaatccaaattgtatactgtaaatttacatacgttgtctagaagtaccatagggtttaaaaacctgggctggcattggtcacaccaggcctaagaaggcagaagttgaatcaattgaactagggcactaaactgaatagttgacagtgtcattttatgttggattattaattcctgtttttctttctgctatctgttggtgcctgacttgatggcctcatttggggaaaagtggtggttattagggctttttctgaaatgtgtatctatgtaacatcacttaagtgtgcttaataaatcttctgtaaggattttagatgataaggctacaattcagaatcttctgaaccatctatgtaatgaatggggattatacattggaatttttgtcatgacacatttgccaaatcagtaggatatatttgttttggcagcctatcacgcagaggctagtggtatatttatgtaagaaaatgactgtaaatctcaagaaaaatctcagcagctaatagcaactcatttatttcattttggtcttaatgctttgtaaacaggtcaaaaaatactgtcatactctaagcttctattttccacactggacatacttctagttgtattctccatactattagactgtgtagtgatgtgacttccaagtagaatttaatctccccattgagtgtgtcatggtacaaatcactattcgtttttggtgttttttagggatgtgcaatgtgcattacataatgacagaaatactgagaaggttctgtgtgcccatttgaaaggagtgggaggaatacagcagtttgtttttcaacatgaatctgatattgatttaaactgtgtttcacttacaagttttaaaaaaatgacagggtttaatggagcgtgcataaaaatgtactgttttcaccttttgtttatatgtaaatgtttgtaagtatatgggcctatctgtaagtgggtaagtctgtatgtgtgtatcatacacatcaacctccatgtccttagtcctgggtttttgaaaaagtgctaaaacggacaagtagaataaatgttgctgtggaatgccatgctttagaacaaaccctttttgatcttaatgcttctgaaaactaggtctgactctggggatttttttccagccgaaggaaaatcacttccgttatgtccccctctaatttagcctcgtatacggtagggctcgatgta

SEQ ID NO: 300709 - DNA, 2769 bp, Homo sapiens
agggcgttggggcagctcctgtgacagacggagctggagcggcggggcggcggcggagtccggcggccgggagagcgagtgagcgagcggaggagcagcgacacgggagtctagggagcgagaaggagaaggaggggagcgctcgggcgcgagcgagagaaaccgcgagcgccgagcttggactcgagccccggaacggctgaggagcccgcccgctcacctcccctccccctccccgggcccgggcccagcgcgccatcctcccccctccttccctccctccctccttcctccctcccctctccctccccctcccccgccggtggatgggagtgaaggacggaagaggccctgcggaggcggcggtgcagcgctccggtggaatgaatcttacttgttgaatatcttctggttactagttggattcatttgtgaaagaatcattttcccctgtgtggaagacacttagtggcatatttaaattataagtccacggatcaaaaagctttttgatttcccaaaggagggacataccactatatcagataagcttgacattacagccaagatggtgctgtcccagagacaacgagatgaactaaatcgagctatagcagattatcttcgttcaaatggctatgaagaggcatattcagtttttaaaaaggaagctgaattagatgtgaatgaagaattagataaaaagtatgctggtcttttggaaaaaaaatggacatctgttattagattacaaaagaaggttatggaattagaatcaaagctaaatgaagcaaaagaagaatttacgtcaggtggacctcttggtcagaaacgagacccaaaagaatggattccccgtccgccagaaaaatatgcattgagtggtcacaggagtccagtcactcgagtcattttccatcctgtgttcagtgttatggtctctgcttcagaggatgctacaattaaggtgtgggattatgagactggagattttgaacgaactcttaaaggacatacagactctgtacaggacatttcattcgaccacagcggcaagcttctggcttcctgttctgcagatatgaccattaaactatgggattttcagggctttgaatgcatcagaaccatgcacggccatgaccacaatgtttcttcagtagccatcatgcccaatggagatcatatagtgtctgcctcaagggataaaactataaaaatgtgggaagtgcaaactggctactgtgtgaagacattcacaggacacagagaatgggtacgtatggtacggccaaatcaagatggcactctgatagccagctgttccaatgaccagactgtgcgtgtatgggtcgtagcaacaaaggaatgcaaggctgagctccgagagcatgagcatgtggtagaatgcatttcctgggctccagaaagctcatattcctccatctctgaagcaacaggatctgagactaaaaaaagtggtaaacctgggccattcttgctgtctggatccagagacaagactattaagatgtgggatgtcagtactggcatgtgccttatgaccctcgtgggtcatgataactgggtacgtggagttctgttccattctggggggaagtttattttgagttgtgctgatgacaagaccctacgcgtatgggattacaagaacaagcgatgcatgaagaccctcaatgcgcatgaacactttgttacctccttggatttccacaagacggcaccctatgtcgtcactggcagcgtagatcaaacagtaaaagtgtgggagtgccgttgattgtgtctccttcggcccctcctccctcttttcctctggatgcactctgatgataccatggttaccccattgagctctgtttaaataaatattgtcctttcatgtaaattattctggatgtagattgagcttattaaatgttacacacaaagtattcatgcatggtgaatccaaattgtatactgtaaatttacatacgttgtctagaagtaccatagggtttaaaaacctgggctggcattggtcacaccaggcctaagaaggcagaagttgaatcaattgaactagggcactaaactgaatagttgacagtgtcattttatgttggattattaattcctgtttttctttctgctatctgttggtgcctgacttgatggcctcatttggggaaaagtggtggttattagggctttttctgaaatgtgtatctatgtaacagttcctcagacagttttgaaaatttggaagaagaatccaatgaaagtggtagcccttttgaccctgtttttgaagttgaacctaaaatctctaacgataacccagaggaacatgtactgttaattcctgtccagagagctgtctcatctccctcttcagacagggagaacaggcatcttcctccttaccctggaatttccaacagttcccaccaaaaagtgctgaatgaaccagaataggggccgagaaggaaaattaccacctgtttcacctgctcctccttcagagcaagaaattctagcattggttgggctaggggttggggggtagggagaaaaagaaggaagagagttaccaaaagtaaacataagacaaaaccctagtggtatagatggaagactatgttccagtaaaccagagagctggttcctccctcgactctgcacagccactgaaagtttaaagattgcaaaagtggtgtggggcaaggaggtagagtcaatcaatgaaactgtgaaaaggaattc

SEQ ID NO: 300710 - DNA, 407 bp, Homo sapiens
accccatggtaaaatcccatggtcaattgatgtttcattgctcttggtggtatattacttcataatatattgctgttatgtgttttaggccatgaccacaatgtttcttcagtagccatcatgcccaatggagatcatatagtgtctgcctcaagggataaaactataaaaatgtgggaagtgcaaactgggtaagtaagtttagttgaaaaggcatcagcggccaggtgcagtggctcacacctgtcatcccagcgctttgggaggccaaggtgggcagatcacctggtcaggaattgaagaccagcctggccaacatgatgaaaccccatctctactaaaaatacaaaaattagccgggtgtggtggcgcacacctgtattcccagctacttgggaggctgagac

SEQ ID NO: 300711 - DNA, 481 bp, Homo sapiens
ttgacaaatgctttggagattactgaaattttttcaagtatcctacatacatagttgcaaaataaaggcagttttttaaaatgtcacatgctatttttattgaaatctatctgtacgtaactacatgttctttttcaaggttatggaattagaatcaaagctaaatgaagcaaaagaagaatttacgtcaggtggacctcttggtcagaaacgagacccaaaagaatggattccccgtccgccagaaaaatatgcattgagtggtcacaggagtccagtcactcgagtcattttccatcctgtgttcagtgttatggtctctgcttcagaggatgctacaattaaggtaattttttgttaaaagcagacttaacgggaggctgaagcaggagaatggcatgaacccgggaggcggagtttgcagtgagccgagattgcaccactgcactccagcctgggcgacagagccacactctgtctc

SEQ ID NO: 300712 - DNA, 609 bp, Homo sapiens
aagaaatttaccattgatagactacatattgagatttgttcttgttatttccataatgccctgcgggacttctttttaaccctcatccaggacccagtcagggatcgtacgttatattcactcctcatgtcttatgagttttcagtttcctttaatctagaatcccctagacttttattttcttctggtcttttgatgtttttggtatgtatagttttatcgtattatgaaatagatgctatttaaacattttgccttttactgagtcaaataacttttttgtttttaaggtgggtcatgataactgggtacgtggagttctgttccattctggggggaagtttattttgagttgtgctgatgacaagaccctacgcgtatgggattacaagaacaagcgatgcatgaagaccctcaatgcgcatgaacactttgttacctccttgggtatgtacgcctcgcgaggtctctgaacattagattttggagtgccagacaaactgtgttttacataatcgtgtggactttgccaggtaagaaatgactgtgctttcagggcagaatagagaagacatgaaaatcttgtggattcctaccatttgttttaaa

SEQ ID NO: 300713 - DNA, 5822 bp, Homo sapiens
ctcacagacaacagccaagcacagaggaaatattagctggcagagataacgaagagaaaacactcggtgacagatgcaccatctgtcagtttctgaggagcagttttcaagaaagctgaaaatgaattgaagaagagaggggttttgtttgaaaggtacagcacagcctaaggacaattttaaacaaaaaattgaggcaaaagaagcatgtgactggctccgtgctgccgggttcccgcaatacgctcagttatatgaggattcacaatttcccatcaacattgtggctgtcaagaatgatcatgattttcttgaaaaggaccttgtagaacctctttgcagacgactaaatacgttgaacaagtgtgcctcaatgaaacttgatgtgaacttccaaaggaaaaagggtgacgactccgatgaggaagatctttgtatcagcaacaaatggactttccaaagaaccagtcgcaggtggtctcgtgtggacgacctctacacgctgctccctcgaggagacagaaatgggtcaccgggaggcacggggatgaggaacacgaccagcagtgagagcgtcctcacagacctgagcgagcctgaggtctgctccattcacagcgaaagcagtggaggcagcgacagtcgcagccagccgggccagtgctgtacagacaacccggtcatgctggatgccccactcgtcagcagcagcctcccacagccccccagagatgtcctcaaccaccccttccaccccaagaatgagaagcccacgagggctagggccaaatcatttttgaaacgcatggaaacactccgagggaagggagcccacgggaggcataaggggtctgggcggacaggtggcctggtgatcagtgggcccatgttgcagcaggagccagagtcctttaaggctatgcagtgcatccaaataccaaatggagatctccagaattcgccgccacctgcctgcagaaaagggctcccatgctctggcaagtcgagtggcgagagcagcccgtcggagcacagcagcagcggggtgagcacgccctgcctgaaggaacgcaagtgccacgaggccaacaagcgcgggggcatgtacttggaggacctagatgtgctggcggggacagcactgccggatgcaggggaccaaagccgtatgcatgagtttcactcccaagagaatttggtggtgcatattcccaaggatcacaaaccaggaacattccccaaggcactttctattgaaagcctctctcccacagatagtagcaatggggttaattggaggaccggtagcatctccctgggcagagagcaggtccctggtgccagggagccccggctcatggcgtcctgccacagagccagccgagtcagtatctatgacaatgtccctggctcccatctgtatgccagcacaggagatcttttggacttggagaaagatgaccttttccctcacttggatgacattctgcagcatgtcaatgggctccaagaggtagtcgatgactggtccaaagatgtcttgcctgaactgcaaactcatgatacattggttggggaacctggcttatccacctttccatctcctaatcagatcaccttagattttgaaggtaactctgtctcagaaggtcggacgacacccagtgatgtggaaagagatgtaacatctcttaatgaatctgagcctcctggggtcagagacaggagggattctggtgtaggggcctctctgaccaggccaaacaggcgactccgatggaacagtttccagctgtcgcaccagccccggccggccccagcatcgccccacatcagcagccagacggccagccagctgagcctgctccagcgcttctcactgctccgcctcacggccatcatggagaagcactccatgtccaacaagcacggctggacatggtcagttccaaagttcatgaagaggatgaaagttcccgactacaaagacaaggctgtctttggcgttcctctcatagtccacgtccaaagaacgggacagcccctgcctcaaagtattcagcaagcactgagatatctacgcagcaactgcctcgatcaggtgggtctttttcgcaaatcaggagtgaagtctcgaatccatgcccttcgccaaatgaatgaaaacttccctgagaacgtcaactatgaagaccagtctgcttatgatgtggcggatatggtgaaacagttcttccgggacctccctgagcctcttttcaccaacaagctcagtgagacctttctccatatctatcagtatgtctccaaagagcagcggctgcaggccgtgcaggctgccatcctgctactggccgatgagaacagggaggtcctgcagacgctcttgtgtttcctgaacgacgtcgtcaacttggtggaagagaatcagatgacgcccatgaacctggcagtgtgtctggccccctccctctttcatcttaatttattgaagaaagaaagctctccacgagtcatacagaagaaatatgccactgggaagccagatcaaaaggacctcaacgagaatctggcagcagctcaggggctagcgcacatgatcatggaatgcgacagactttttgaggttccacacgagttggtggcccagtctcgtaactcgtatgtggaggctgagatccacgtgccaaccctggaagaattggggacacagctggaggagagtggggcaactttccacacttacctgaaccatctcatccagggcctccagaaagaagccaaggagaagttcaaaggatgggtcacgtgctccagcacggacaatacagatcttgctttcaaaaaggtgggcgacgggaacccgctgaagctgtggaaggcttctgtggaggtggaagcacccccctcagtggtcctgaaccgcgtgctgagagagcgccacctgtgggacgaggactttgtgcagtggaaggttgtggaaactctagacaggcaaacagagatctaccagtatgtgctgaacagcatggctccccatccttccagagactttgtggttctcaggacctggaaaactgatttgcccaaaggaatgtgtaccctggtgtccctctccgtggagcatgaggaagcccagctcctgggtggtgtgcgagcagtggtgatggactcgcagtacttgatagaaccgtgtggctctggcaagtcaagactgactcacatctgcaggatagacctgaaaggtcactccccagaatggtacagcaaaggctttggacatctgtgtgcagcagaagttgccaggattagaaactctttccagcccctcattgctgagggcccagaaactaaaatctgagttttgcccagtgtgacatcaaactcagggaagaggaagctaaagtgacgagtgtggcagagagtgtgcatgtgagaaagcgagagaaagaggaactgaaggacgcggttaatgcctaaaaatggaaacgttaagaagttggaatgttggagatgcaagaatttccaagaactttcttagccttcctggagatggctacatccctactaatataattttaaaatgagaactttatatatattacttaaaattaaatggactattccttgtgcattgcctaatttgctatttaaaggcttctaagaagcgtatacctaactgtaaataaatgtatgtatagcatatgtacatatgtgtgtatatctccatctttactgtatatatgtaaaataccaattttatatagaattgtgtgttttgaaaatgacggtgtctgactcagtgagtcccttcctcacacagttctttccaagtggctctgggccccatctctccactgtcctgtaagctgtgcagaacctgctgctaacaccaaggtgtgaacatgccctgatgcctaaccaaagatgagttaaccaaaggaaaataacattaaaggagacttatgtgttaacgctttgtttctgctattcaaaaactgagagtggagatctgggataaagcaaggaaataataattactcctccttaaagcaaatgggggggtgagaagtcattaccaaatttaaagctagatgaggagttgccactgggcccagtaagatggaatttcagtgagatatggaccaccggagtcagcgagagtgactgaaacagaagcgatacctctcgctcccatgcccatcactacagaccccaagtcaagatgaatatcatagcctttacttcttcacagccaaagggagcccctgtgttgtctcaagtttttataaatacatttcataatgttattaaatgtcattctatttgaccagtggcctatttggtcacagttaattggtgttttcttattgcactgaattcaactccagacaccatacaaagggagatgatggccattccgttcaaatcctagatcgttacagcttcagggaattcatattttgttatgtgtaggatactcttaaaatgtaattcattaaacttttacaatctgaaagacagggtttttaactaacatgagaccaaaactatgttctttgattagttttagatagtataatcgggtttattaattcttctgtgtttcttcactagccagtccaagctacctatgcatttgacccaaccttatttattattgtacagatgaagcgaattgactccctttagccaactgctaatggatcgaatgtgctttttattgtaattcaacagctatagagagaaagataacttattgtgtgtttgatttcagggagagagattttctttggtcatccataatagagattgataagatttagcaactggtgttggagaaaaaaagaaaagcaaatgagtgttttcaggtttttttgcattatatgcatttatgtaatgtttctgttatcagcaatgtgcaattattttattgagaggaataaaaaagctttctatgagtttggtatggtgcgaggaaaatcttacagtttgaattatgacctagaaatttttcattcccatgtctacctaagaaggaagcagtaaatccataatttaccttttgggcaatgctttgtgagcaaaacaaagtcacttctgccataacatcttgaatttaaccatatatgccagattactttatatgcatcaacaagatcaccagtgaagtttaatctagctaaacactggtcctgctcctgagatgggatcctatgtgtttggaaaacgtgataggcacacgaggatgagtggctttgtatcgcccagagaggtgcttgtccagatttcacatgcacatgaattgcctggggatcttgtgaaactgcagactctgctccaagtaatctgggctgggcctgagattctgcatttctaaggagtctcagggatgcctatgctgctggcctaaaaccacactcagaaacgaggacctagaagatccctaaaacagaataagaacaaatgtgattgtatttctgattctccctctcttcgaattatctgacttttttgtttttgtgcacatagtaatcatatcaccgctgcataacaacacagtgcatctttttaaaacaaggaaaagggaaaaaaaggagaaaaaacgatgcatcaagcttgtttgtcaaataccacagtattttattcattgttatcttgccaatggaaataaagtatgatattgcatttaaatattatatttatacctcatgtatatttttacctcaattgttgatatcaatcatcaattgtaaataaataattgccaaggcaaataaatttatatatattaaatatttcctattttctataaaatagat

SEQ ID NO: 300714 - DNA, 3789 bp, Homo sapiens
ggtgcccctttctaaaccctgcttggccatcgagagcgtgggatccaaagttcaattgcaagggttgggactcagctctgcctcccatgagctgcgaggcctcagcaattactgacttctttgtgcctttcctgctgttctggttgtttttgttgatgatgactctgggtgcgtgttcacacgaggaatgtggagcttacacagtgcttcccagctggctctttctatgtctgctcctccaatgacctggcatccacttttcctcagatgtctccaaagagcagcggctgcaggccgtgcaggctgccatcctgctactggccgatgagaacagggaggtcctgcagacgctcttgtgtttcctgaacgacgtcgtcaacttggtggaagagaatcagatgacgcccatgaacctggcagtgtgtctggccccctccctctttcatcttaatttattgaagaaagaaagctctccacgagtcatacagaagaaatatgccactgggaagccagatcaaaaggacctcaacgagaatctggcagcagctcaggggctagcgcacatgatcatggaatgcgacagactttttgaggttccacacgagttggtggcccagtctcgtaactcgtatgtggaggctgagatccacgtgccaaccctggaagaattggggacacagctggaggagagtggggcaactttccacacttacctgaaccatctcatccagggcctccagaaagaagccaaggagaagttcaaaggatgggtcacgtgctccagcacggacaatacagatcttgctttcaaaaaggtgggcgacgggaacccgctgaagctgtggaaggcttctgtggaggtggaagcacccccctcagtggtcctgaaccgcgtgctgagagagcgccacctgtgggacgaggactttgtgcagtggaaggttgtggaaactctagacaggcaaacagagatctaccagtatgtgctgaacagcatggctccccatccttccagagactttgtggttctcaggacctggaaaactgatttgcccaaaggaatgtgtaccctggtgtccctctccgtggagcatgaggaagcccagctcctgggtggtgtgcgagcagtggtgatggactcgcagtacttgatagaaccgtgtggctctggcaagtcaagactgactcacatctgcaggatagacctgaaaggtcactccccagaatggtacagcaaaggctttggacatctgtgtgcagcagaagttgccaggattagaaactctttccagcccctcattgctgagggcccagaaactaaaatctgagttttgcccagtgtgacatcaaactcagggaagaggaagctaaagtgacgagtgtggcagagagtgtgcatgtgagaaagcgagagaaagaggaactgaaggacgcggttaatgcctaaaaatggaaacgttaagaagttggaatgttggagatgcaagaatttccaagaactttcttagccttcctggagatggctacatccctactaatataattttaaaatgagaactttatatatattacttaaaattaaatggactattccttgtgcattgcctaatttgctatttaaaggcttctaagaagcgtatacctaactgtaaataaatgtatgtatagcatatgtacatatgtgtgtatatctccatctttactgtatatatgtaaaataccaattttatatagaattgtgtgttttgaaaatgacggtgtctgactcagtgagtcccttcctcacacagttctttccaagtggctctgggccccatctctccactgtcctgtaagctgtgcagaacctgctgctaacaccaaggtgtgaacatgccctgatgcctaaccaaagatgagttaaccaaaggaaaataacattaaaggagacttatgtgttaacgctttgtttctgctattcaaaaactgagagtggagatctgggataaagcaaggaaataataattactcctccttaaagcaaatgggggggtgagaagtcattaccaaatttaaagctagatgaggagttgccactgggcccagtaagatggaatttcagtgagatatggaccaccggagtcagcgagagtgactgaaacagaagcgatacctctcgctcccatgcccatcactacagaccccaagtcaagatgaatatcatagcctttacttcttcacagccaaagggagcccctgtgttgtctcaagtttttataaatacatttcataatgttattaaatgtcattctatttgaccagtggcctatttggtcacagttaattggtgttttcttattgcactgaattcaactccagacaccatacaaagggagatgatggccattccgttcaaatcctagatcgttacagcttcagggaattcatattttgttatgtgtaggatactcttaaaatgtaattcattaaacttttacaatctgaaagacagggtttttaactaacatgagaccaaaactatgttctttgattagttttagatagtataatcgggtttattaattcttctgtgtttcttcactagccagtccaagctacctatgcatttgacccaaccttatttattattgtacagatgaagcgaattgactccctttagccaactgctaatggatcgaatgtgctttttattgtaattcaacagctatagagagaaagataacttattgtgtgtttgatttcagggagagagattttctttggtcatccataatagagattgataagatttagcaactggtgttggagaaaaaaagaaaagcaaatgagtgttttcaggtttttttgcattatatgcatttatgtaatgtttctgttatcagcaatgtgcaattattttattgagaggaataaaaaagctttctatgagtttggtatggtgcgaggaaaatcttacagtttgaattatgacctagaaatttttcattcccatgtctacctaagaaggaagcagtaaatccataatttaccttttgggcaatgctttgtgagcaaaacaaagtcacttctgccataacatcttgaatttaaccatatatgccagattactttatatgcatcaacaagatcaccagtgaagtttaatctagctaaacactggtcctgctcctgagatgggatcctatgtgtttggaaaacgtgataggcacacgaggatgagtggctttgtatcgcccagagaggtgcttgtccagatttcacatgcacatgaattgcctggggatcttgtgaaactgcagactctgctccaagtaatctgggctgggcctgagattctgcatttctaaggagtctcagggatgcctatgctgctggcctaaaaccacactcagaaacgaggacctagaagatccctaaaacagaataagaacaaatgtgattgtatttctgattctccctctcttcgaattatctgacttttttgtttttgtgcacatagtaatcatatcaccgctgcataacaacacagtgcatctttttaaaacaaggaaaagggaaaaaaaggagaaaaaacgatgcatcaagcttgtttgtcaaataccacagtattttattcattgttatcttgccaatggaaataaagtatgatattgcatttaaatattatatttatacctcatgtatatttttacctcaattgttgatatcaatcatcaattgtaaataaataattgccaaggcaaataaatttatatatattaaatatttcctattttctataaaatagat

SEQ ID NO: 300715 - DNA, 841 bp, Homo sapiens
ctcacagacaacagccaagcacagaggaaatattagctggcagagataacgaagagaaaacactcggtgacagatgcaccatctgtcagtttctgaggagcagttttcaagaaagctgaaaatgaattgaagaagagaggggttttgtttgaaaggtacagcacagcctaaggacaattttaaacaaaaaattgaggcaaaagaagcatgtgactggctccgtgctgccgggttcccgcaatacgctcagttatatgaggattcacaatttcccatcaacattgtggctgtcaagaatgatcatgattttcttgaaaaggaccttgtagaacctctttgcagacgactaaatacgttgaacaagtgtgcctcaatgaaacttgatgtgaacttccaaaggaaaaagaagagaaaagggaccctttaaggattcgagatgaccttccctgcctctgtaagagtcaggtggaggagtattctcgagcttagctgcacgcctcactggaagactaacaacccagccaagagcatttcaggagacaggacaccagcacttctgccgcctgcagctcgggctctccactcccgcggcattcccagcggcccattcctgcttccaaacaggcaggcccggccacgtagctccagttaacgtctaaatttctatgtgactatggatgcgttgccttttgcagctgtggattcgtgtgggttcctgtttccagtgtaaagatatggccaaattccgtcttttgaaaaaagcccttctttatggaatgtctggttggcatctgtctctgaggaatatataatttcagtgaagaatgttctcatttttaga

SEQ ID NO: 300716 - DNA, 439 bp, Homo sapiens
ggtaatctggcactggactgatcctcctcacctttcagagatattcagagacaaactggagtctgggtgagcctctagcccttggcctgacacctgcaagggtctcatgtttcctcagcaatacactcaattcactgtgtatattgtttttataagaggcatggttcttgccatctgtactaaagtccacaatttatttattgtcttcatggcaattgtgtttaatcctgtagattttggtgggctgacacaaggaagaatgtgaaaagtccacaaataggtgatgatggtgatgaaggctttttcatgcctggttagccatacacctttcttatacatgaaatgccacttccaaagcactgggagaaatgacaacaccgctaccctcccacaatacagtttctaactgttttgcagaagagaaaagggaccctttaag

SEQ ID NO: 300717 - DNA, 477 bp, Homo sapiens
caggttgttggcaggaaaatataaacacaaaccttagctctgtgttcaggttcttcttcctccctcagtcatgactctgatgtgcggattgttttgctacaggacctggaaaactgatttgcccaaaggaatgtgtaccctggtgtccctctccgtggagcatgaggaagcccagctcctgggtggtgtgcgagcagtggtgatggactcgcagtacttgatagaaccgtgtggctctggcaagtcaagactgactcacatctgcaggatagacctgaagtaagtgctgactcccttaatggcaggctcagatcttgggagtctcagcttgtacagcacatccagcagggatgtcaccctgatttcttatttcactgtatttgtttcctcattgccattagtgtgctttcataggtggatatgtatgcctcccctctgtctttccccctttcctgaaattctgacatttctcctgca

SEQ ID NO: 300718 - DNA, 8091 bp, Homo sapiens
  misc_feature (2)..(2): n is a, c, g, or t
  misc_feature (5)..(5): n is a, c, g, or t
  misc_feature (7)..(7): n is a, c, g, or t
  misc_feature (9)..(9): n is a, c, g, or t
  misc_feature (57)..(57): n is a, c, g, or t
cngcngnanccggcgaaagaggcaaagtcccgcacgccggaggacatgcgcctcggntagcggccccgggccccaccaccgtgcggctttctccagattattcctctctcgctgtctctgactgtctctctctgtctctgtctctgtctctctctctctcacacacacacacacacacacaaacacacatacgcacgcacgatctcacttcgatctatacactggaggattaaaacaaacaaacaaaaaaaacatttccttcgctccccctccctctccactctgagaagcagaggagccgcacggcgaggggccgcagaccgtctggaaatgcgaatcctaaagcgtttcctcgcttgcattcagctcctctgtgtttgccgcctggattgggctaatggatactacagacaacagagaaaacttgttgaagagattggctggtcctatacaggagcactgaatcaaaaaaattggggaaagaaatatccaacatgtaatagcccaaaacaatctcctatcaatattgatgaagatcttacacaagtaaatgtgaatcttaagaaacttaaatttcagggttgggataaaacatcattggaaaacacattcattcataacactgggaaaacagtggaaattaatctcactaatgactaccgtgtcagcggaggagtttcagaaatggtgtttaaagcaagcaagataacttttcactggggaaaatgcaatatgtcatctgatggatcagagcatagtttagaaggacaaaaatttccacttgagatgcaaatctactgctttgatgcggaccgattttcaagttttgaggaagcagtcaaaggaaaagggaagttaagagctttatccattttgtttgaggttgggacagaagaaaatttggatttcaaagcgattattgatggagtcgaaagtgttagtcgttttgggaagcaggctgctttagatccattcatactgttgaaccttctgccaaactcaactgacaagtattacatttacaatggctcattgacatctcctccctgcacagacacagttgactggattgtttttaaagatacagttagcatctctgaaagccagttggctgttttttgtgaagttcttacaatgcaacaatctggttatgtcatgctgatggactacttacaaaacaattttcgagagcaacagtacaagttctctagacaggtgttttcctcatacactggaaaggaagagattcatgaagcagtttgtagttcagaaccagaaaatgttcaggctgacccagagaattataccagccttcttgttacatgggaaagacctcgagtcgtttatgataccatgattgagaagtttgcagttttgtaccagcagttggatggagaggaccaaaccaagcatgaatttttgacagatggctatcaagacttgggtgctattctcaataatttgctacccaatatgagttatgttcttcagatagtagccatatgcactaatggcttatatggaaaatacagcgaccaactgattgtcgacatgcctactgataatcctgaacttgatcttttccctgaattaattggaactgaagaaataatcaaggaggaggaagagggaaaagacattgaagaaggcgctattgtgaatcctggtagagacagtgctacaaaccaaatcaggaaaaaggaaccccagatttctaccacaacacactacaatcgcatagggacgaaatacaatgaagccaagactaaccgatccccaacaagaggaagtgaattctctggaaagggtgatgttcccaatacatctttaaattccacttcccaaccagtcactaaattagccacagaaaaagatatttccttgacttctcagactgtgactgaactgccacctcacactgtggaaggtacttcagcctctttaaatgatggctctaaaactgttcttagatctccacatatgaacttgtcggggactgcagaatccttaaatacagtttctataacagaatatgaggaggagagtttattgaccagtttcaagcttgatactggagctgaagattcttcaggctccagtcccgcaacttctgctatcccattcatctctgagaacatatcccaagggtatatattttcctccgaaaacccagagacaataacatatgatgtccttataccagaatctgctagaaatgcttccgaagattcaacttcatcaggttcagaagaatcactaaaggatccttctatggagggaaatgtgtggtttcctagctctacagacataacagcacagcccgatgttggatcaggcagagagagctttctccagactaattacactgagatacgtgttgatgaatctgagaagacaaccaagtccttttctgcaggcccagtgatgtcacagggtccctcagttacagatctggaaatgccacattattctacctttgcctacttcccaactgaggtaacacctcatgcttttaccccatcctccagacaacaggatttggtctccacggtcaacgtggtatactcgcagacaacccaaccggtatacaatggtgagacacctcttcaaccttcctacagtagtgaagtctttcctctagtcacccctttgttgcttgacaatcagatcctcaacactacccctgctgcttcaagtagtgattcggccttgcatgctacgcctgtatttcccagtgtcgatgtgtcatttgaatccatcctgtcttcctatgatggtgcacctttgcttccattttcctctgcttccttcagtagtgaattgtttcgccatctgcatacagtttctcaaatccttccacaagttacttcagctaccgagagtgataaggtgcccttgcatgcttctctgccagtggctgggggtgatttgctattagagcccagccttgctcagtattctgatgtgctgtccactactcatgctgcttcagagacgctggaatttggtagtgaatctggtgttctttataaaacgcttatgttttctcaagttgaaccacccagcagtgatgccatgatgcatgcacgttcttcagggcctgaaccttcttatgccttgtctgataatgagggctcccaacacatcttcactgtttcttacagttctgcaatacctgtgcatgattctgtgggtgtaacttatcagggttccttatttagcggccctagccatataccaatacctaagtcttcgttaataaccccaactgcatcattactgcagcctactcatgccctctctggtgatggggaatggtctggagcctcttctgatagtgaatttcttttacctgacacagatgggctgacagcccttaacatttcttcacctgtttctgtagctgaatttacatatacaacatctgtgtttggtgatgataataaggcgctttctaaaagtgaaataatatatggaaatgagactgaactgcaaattccttctttcaatgagatggtttacccttctgaaagcacagtcatgcccaacatgtatgataatgtaaataagttgaatgcgtctttacaagaaacctctgtttccatttctagcaccaagggcatgtttccagggtcccttgctcataccaccactaaggtttttgatcatgagattagtcaagttccagaaaataacttttcagttcaacctacacatactgtctctcaagcatctggtgacacttcgcttaaacctgtgcttagtgcaaactcagagccagcatcctctgaccctgcttctagtgaaatgttatctccttcaactcagctcttattttatgagacctcagcttcttttagtactgaagtattgctacaaccttcctttcaggcttctgatgttgacaccttgcttaaaactgttcttccagctgtgcccagtgatccaatattggttgaaacccccaaagttgataaaattagttctacaatgttgcatctcattgtatcaaattctgcttcaagtgaaaacatgctgcactctacatctgtaccagtttttgatgtgtcgcctacttctcatatgcactctgcttcacttcaaggtttgaccatttcctatgcaagtgagaaatatgaaccagttttgttaaaaagtgaaagttcccaccaagtggtaccttctttgtacagtaatgatgagttgttccaaacggccaatttggagattaaccaggcccatcccccaaaaggaaggcatgtatttgctacacctgttttatcaattgatgaaccattaaatacactaataaataagcttatacattccgatgaaattttaacctccaccaaaagttctgttactggtaaggtatttgctggtattccaacagttgcttctgatacatttgtatctactgatcattctgttcctataggaaatgggcatgttgccattacagctgtttctccccacagagatggttctgtaacctcaacaaagttgctgtttccttctaaggcaacttctgagctgagtcatagtgccaaatctgatgccggtttagtgggtggtggtgaagatggtgacactgatgatgatggtgatgatgatgatgacagagatagtgatggcttatccattcataagtgtatgtcatgctcatcctatagagaatcacaggaaaaggtaatgaatgattcagacacccacgaaaacagtcttatggatcagaataatccaatctcatactcactatctgagaattctgaagaagataatagagtcacaagtgtatcctcagacagtcaaactggtatggacagaagtcctggtaaatcaccatcagcaaatgggctatcccaaaagcacaatgatggaaaagaggaaaatgacattcagactggtagtgctctgcttcctctcagccctgaatctaaagcatgggcagttctgacaagtgatgaagaaagtggatcagggcaaggtacctcagatagccttaatgagaatgagacttccacagatttcagttttgcagacactaatgaaaaagatgctgatgggatcctggcagcaggtgactcagaaataactcctggattcccacagtccccaacatcatctgttactagcgagaactcagaagtgttccacgtttcagaggcagaggccagtaatagtagccatgagtctcgtattggtctagctgaggggttggaatccgagaagaaggcagttataccccttgtgatcgtgtcagccctgacttttatctgtctagtggttcttgtgggtattctcatctactggaggaaatgcttccagactgcacacttttacttagaggacagtacatcccctagagttatatccacacctccaacacctatctttccaatttcagatgatgtcggagcaattccaataaagcactttccaaagcatgttgcagatttacatgcaagtagtgggtttactgaagaatttgagacactgaaagagttttaccaggaagtgcagagctgtactgttgacttaggtattacagcagacagctccaaccacccagacaacaagcacaagaatcgatacataaatatcgttgcctatgatcatagcagggttaagctagcacagcttgctgaaaaggatggcaaactgactgattatatcaatgccaattatgttgatggctacaacagaccaaaagcttatattgctgcccaaggcccactgaaatccacagctgaagatttctggagaatgatatgggaacataatgtggaagttattgtcatgataacaaacctcgtggagaaaggaaggagaaaatgtgatcagtactggcctgccgatgggagtgaggagtacgggaactttctggtcactcagaagagtgtgcaagtgcttgcctattatactgtgaggaattttactctaagaaacacaaaaataaaaaagggctcccagaaaggaagacccagtggacgtgtggtcacacagtatcactacacgcagtggcctgacatgggagtaccagagtactccctgccagtgctgacctttgtgagaaaggcagcctatgccaagcgccatgcagtggggcctgttgtcgtccactgcagtgctggagttggaagaacaggcacatatattgtgctagacagtatgttgcagcagattcaacacgaaggaactgtcaacatatttggcttcttaaaacacatccgttcacaaagaaattatttggtacaaactgaggagcaatatgtcttcattcatgatacactggttgaggccatacttagtaaagaaactgaggtgctggacagtcatattcatgcctatgttaatgcactcctcattcctggaccagcaggcaaaacaaagctagagaaacaattccagctcctgagccagtcaaatatacagcagagtgactattctgcagccctaaagcaatgcaacagggaaaagaatcgaacttcttctatcatccctgtggaaagatcaagggttggcatttcatccctgagtggagaaggcacagactacatcaatgcctcctatatcatgggctattaccagagcaatgaattcatcattacccagcaccctctccttcataccatcaaggatttctggaggatgatatgggaccataatgcccaactggtggttatgattcctgatggccaaaacatggcagaagatgaatttgtttactggccaaataaagatgagcctataaattgtgagagctttaaggtcactcttatggctgaagaacacaaatgtctatctaatgaggaaaaacttataattcaggactttatcttagaagctacacaggatgattatgtacttgaagtgaggcactttcagtgtcctaaatggccaaatccagatagccccattagtaaaacttttgaacttataagtgttataaaagaagaagctgccaatagggatgggcctatgattgttcatgatgagcatggaggagtgacggcaggaactttctgtgctctgacaacccttatgcaccaactagaaaaagaaaattccgtggatgtttaccaggtagccaagatgatcaatctgatgaggccaggagtctttgctgacattgagcagtatcagtttctctacaaagtgatcctcagccttgtgagcacaaggcaggaagagaatccatccacctctctggacagtaatggtgcagcattgcctgatggaaatatagctgagagcttagagtctttagtttaacacagaaaggggtgggggaactcacatctgagcattgttttcctcttcctaaaattaggcaggaaaatcagtctagttctgttatctgttgatttcccatcacctgacagtaactttcatgacataggattctgccgccaaatttatatcattaacaatgtgtgcctttttgcaagacttgtaatttacttattatgtttgaactaaaatgattgaattttacagtatttctaagaatggaattgtggtatttttttctgtattgattttaacagaaaatttcaatttatagaggttaggaattccaaactacagaaaatgtttgtttttagtgtcaaatttttagctgtatttgtagcaattatcaggtttgctagaaatataacttttaatacagtagcctgtaaataaaacactcttccatatgatattcaacattttacaactgcagtattcacctaaagtagaaataatctgttacttattgtaaatactgccctagtgtctccatggaccaaatttatatttataattgtagatttttatattttactactgagtcaagttttctagttctgtgtaattgtttagtttaatgacgtagttcattagctggtcttactctaccagttttctgacattgtattgtgttacctaagtcattaactttgtttcagcatgtaattttaacttttgtggaaaatagaaataccttcattttgaaagaagtttttatgagaataacaccttaccaaacattgttcaaatggtttttatccaaggaattgcaaaaataaatataaatattgccattaa

SEQ ID NO: 300719 - DNA, 8034 bp, Homo sapiens
  misc_feature (2)..(2): n is a, c, g, or t
  misc_feature (5)..(5): n is a, c, g, or t
  misc_feature (7)..(7): n is a, c, g, or t
  misc_feature (9)..(9): n is a, c, g, or t
  misc_feature (57)..(57): n is a, c, g, or t
cngcngnanccggcgaaagaggcaaagtcccgcacgccggaggacatgcgcctcggntagcggccccgggccccaccaccgtgcggctttctccagattattcctctctcgctgtctctgactgtctctctctgtctctgtctctgtctctctctctctcacacacacacacacacacacaaacacacatacgcacgcacgatctcacttcgatctatacactggaggattaaaacaaacaaacaaaaaaaacatttccttcgctccccctccctctccactctgagaagcagaggagccgcacggcgaggggccgcagaccgtctggaaatgcgaatcctaaagcgtttcctcgcttgcattcagctcctctgtgtttgccgcctggattgggctaatggatactacagacaacagagaaaacttgttgaagagattggctggtcctatacaggagcactgaatcaaaaaaattggggaaagaaatatccaacatgtaatagcccaaaacaatctcctatcaatattgatgaagatcttacacaagtaaatgtgaatcttaagaaacttaaatttcagggttgggataaaacatcattggaaaacacattcattcataacactgggaaaacagtggaaattaatctcactaatgactaccgtgtcagcggaggagtttcagaaatggtgtttaaagcaagcaagataacttttcactggggaaaatgcaatatgtcatctgatggatcagagcatagtttagaaggacaaaaatttccacttgagatgcaaatctactgctttgatgcggaccgattttcaagttttgaggaagcagtcaaaggaaaagggaagttaagagctttatccattttgtttgaggttgggacagaagaaaatttggatttcaaagcgattattgatggagtcgaaagtgttagtcgttttgggaagcaggctgctttagatccattcatactgttgaaccttctgccaaactcaactgacaagtattacatttacaatggctcattgacatctcctccctgcacagacacagttgactggattgtttttaaagatacagttagcatctctgaaagccagttggctgttttttgtgaagttcttacaatgcaacaatctggttatgtcatgctgatggactacttacaaaacaattttcgagagcaacagtacaagttctctagacaggtgttttcctcatacactggaaaggaagagattcatgaagcagtttgtagttcagaaccagaaaatgttcaggctgacccagagaattataccagccttcttgttacatgggaaagacctcgagtcgtttatgataccatgattgagaagtttgcagttttgtaccagcagttggatggagaggaccaaaccaagcatgaatttttgacagatggctatcaagacttgggtgctattctcaataatttgctacccaatatgagttatgttcttcagatagtagccatatgcactaatggcttatatggaaaatacagcgaccaactgattgtcgacatgcctactgataatcctgaacttgatcttttccctgaattaattggaactgaagaaataatcaaggaggaggaagagggaaaagacattgaagaaggcgctattgtgaatcctggtagagacagtgctacaaaccaaatcaggaaaaaggaaccccagatttctaccacaacacactacaatcgcatagggacgaaatacaatgaagccaagactaaccgatccccaacaagaggaagtgaattctctggaaagggtgatgttcccaatacatctttaaattccacttcccaaccagtcactaaattagccacagaaaaagatatttccttgacttctcagactgtgactgaactgccacctcacactgtggaaggtacttcagcctctttaaatgatggctctaaaactgttcttagatctccacatatgaacttgtcggggactgcagaatccttaaatacagtttctataacagaatatgaggaggagagtttattgaccagtttcaagcttgatactggagctgaagattcttcaggctccagtcccgcaacttctgctatcccattcatctctgagaacatatcccaagggtatatattttcctccgaaaacccagagacaataacatatgatgtccttataccagaatctgctagaaatgcttccgaagattcaacttcatcaggttcagaagaatcactaaaggatccttctatggagggaaatgtgtggtttcctagctctacagacataacagcacagcccgatgttggatcaggcagagagagctttctccagactaattacactgagatacgtgttgatgaatctgagaagacaaccaagtccttttctgcaggcccagtgatgtcacagggtccctcagttacagatctggaaatgccacattattctacctttgcctacttcccaactgaggtaacacctcatgcttttaccccatcctccagacaacaggatttggtctccacggtcaacgtggtatactcgcagacaacccaaccggtatacaatggtgagacacctcttcaaccttcctacagtagtgaagtctttcctctagtcacccctttgttgcttgacaatcagatcctcaacactacccctgctgcttcaagtagtgattcggccttgcatgctacgcctgtatttcccagtgtcgatgtgtcatttgaatccatcctgtcttcctatgatggtgcacctttgcttccattttcctctgcttccttcagtagtgaattgtttcgccatctgcatacagtttctcaaatccttccacaagttacttcagctaccgagagtgataaggtgcccttgcatgcttctctgccagtggctgggggtgatttgctattagagcccagccttgctcagtattctgatgtgctgtccactactcatgctgcttcagagacgctggaatttggtagtgaatctggtgttctttataaaacgcttatgttttctcaagttgaaccacccagcagtgatgccatgatgcatgcacgttcttcagggcctgaaccttcttatgccttgtctgataatgagggctcccaacacatcttcactgtttcttacagttctgcaatacctgtgcatgattctgtgggtgtaacttatcagggttccttatttagcggccctagccatataccaatacctaagtcttcgttaataaccccaactgcatcattactgcagcctactcatgccctctctggtgatggggaatggtctggagcctcttctgatagtgaatttcttttacctgacacagatgggctgacagcccttaacatttcttcacctgtttctgtagctgaatttacatatacaacatctgtgtttggtgatgataataaggcgctttctaaaagtgaaataatatatggaaatgagactgaactgcaaattccttctttcaatgagatggtttacccttctgaaagcacagtcatgcccaacatgtatgataatgtaaataagttgaatgcgtctttacaagaaacctctgtttccatttctagcaccaagggcatgtttccagggtcccttgctcataccaccactaaggtttttgatcatgagattagtcaagttccagaaaataacttttcagttcaacctacacatactgtctctcaagcatctggtgacacttcgcttaaacctgtgcttagtgcaaactcagagccagcatcctctgaccctgcttctagtgaaatgttatctccttcaactcagctcttattttatgagacctcagcttcttttagtactgaagtattgctacaaccttcctttcaggcttctgatgttgacaccttgcttaaaactgttcttccagctgtgcccagtgatccaatattggttgaaacccccaaagttgataaaattagttctacaatgttgcatctcattgtatcaaattctgcttcaagtgaaaacatgctgcactctacatctgtaccagtttttgatgtgtcgcctacttctcatatgcactctgcttcacttcaaggtttgaccatttcctatgcaagtgagaaatatgaaccagttttgttaaaaagtgaaagttcccaccaagtggtaccttctttgtacagtaatgatgagttgttccaaacggccaatttggagattaaccaggcccatcccccaaaaggaaggcatgtatttgctacacctgttttatcaattgatgaaccattaaatacactaataaataagcttatacattccgatgaaattttaacctccaccaaaagttctgttactggtaaggtatttgctggtattccaacagttgcttctgatacatttgtatctactgatcattctgttcctataggaaatgggcatgttgccattacagctgtttctccccacagagatggttctgtaacctcaacaaagttgctgtttccttctaaggcaacttctgagctgagtcatagtgccaaatctgatgccggtttagtgggtggtggtgaagatggtgacactgatgatgatggtgatgatgatgatgacagagatagtgatggcttatccattcataagtgtatgtcatgctcatcctatagagaatcacaggaaaaggtaatgaatgattcagacacccacgaaaacagtcttatggatcagaataatccaatctcatactcactatctgagaattctgaagaagataatagagtcacaagtgtatcctcagacagtcaaactggtatggacagaagtcctggtaaatcaccatcagcaaatgggctatcccaaaagcacaatgatggaaaagaggaaaatgacattcagactggtagtgctctgcttcctctcagccctgaatctaaagcatgggcagttctgacaagtgatgaagaaagtggatcagggcaaggtacctcagatagccttaatgagaatgagacttccacagatttcagttttgcagacactaatgaaaaagatgctgatgggatcctggcagcaggtgactcagaaataactcctggattcccacagtccccaacatcatctgttactagcgagaactcagaagtgttccacgtttcagaggcagaggccagtaatagtagccatgagtctcgtattggtctagctgaggggttggaatccgagaagaaggcagttataccccttgtgatcgtgtcagccctgacttttatctgtctagtggttcttgtgggtattctcatctactggaggaaatgcttccagactgcacacttttacttagaggacagtacatcccctagagttatatccacacctccaacacctatctttccaatttcagatgatgtcggagcaattccaataaagcactttccaaagcatgttgcagatttacatgcaagtagtgggtttactgaagaatttgagacactgaaagagttttaccaggaagtgcagagctgtactgttgacttaggtattacagcagacagctccaaccacccagacaacaagcacaagaatcgatacataaatatcgttgcctatgatcatagcagggttaagctagcacagcttgctgaaaaggatggcaaactgactgattatatcaatgccaattatgttgatggctacaacagaccaaaagcttatattgctgcccaaggcccactgaaatccacagctgaagatttctggagaatgatatgggaacataatgtggaagttattgtcatgataacaaacctcgtggagaaaggaaggagaaaatgtgatcagtactggcctgccgatgggagtgaggagtacgggaactttctggtcactcagaagagtgtgcaagtgcttgcctattatactgtgaggaattttactctaagaaacacaaaaataaaaaagggctcccagaaaggaagacccagtggacgtgtggtcacacagtatcactacacgcagtggcctgacatgggagtaccagagtactccctgccagtgctgacctttgtgagaaaggcagcctatgccaagcgccatgcagtggggcctgttgtcgtccactgcagtgctggagttggaagaacaggcacatatattgtgctagacagtatgttgcagcagattcaacacgaaggaactgtcaacatatttggcttcttaaaacacatccgttcacaaagaaattatttggtacaaactgaggagcaatatgtcttcattcatgatacactggttgaggccatacttagtaaagaaactgaggtgctggacagtcatattcatgcctatgttaatgcactcctcattcctggaccagcaggcaaaacaaagctagagaaacaattccagctcctgagccagtcaaatatacagcagagtgactattctgcagccctaaagcaatgcaacagggaaaagaatcgaacttcttctatcatccctgtggaaagatcaagggttggcatttcatccctgagtggagaaggcacagactacatcaatgcctcctatatcatgggctattaccagagcaatgaattcatcattacccagcaccctctccttcataccatcaaggatttctggaggatgatatgggaccataatgcccaactggtggttatgattcctgatggccaaaacatggcagaagatgaatttgtttactggccaaataaagatgagcctataaattgtgagagctttaaggtcactcttatggctgaagaacacaaatgtctatctaatgaggaaaaacttataattcaggactttatcttagaagctacacaggatgattatgtacttgaagtgaggcactttcagtgtcctaaatggccaaatccagatagccccattagtaaaacttttgaacttataagtgttataaaagaagaagctgccaatagggatgggcctatgattgttcatgatgagcatggaggagtgacggcaggaactttctgtgctctgacaacccttatgcaccaactagaaaaagaaaattccgtggatgagcagtatcagtttctctacaaagtgatcctcagccttgtgagcacaaggcaggaagagaatccatccacctctctggacagtaatggtgcagcattgcctgatggaaatatagctgagagcttagagtctttagtttaacacagaaaggggtgggggaactcacatctgagcattgttttcctcttcctaaaattaggcaggaaaatcagtctagttctgttatctgttgatttcccatcacctgacagtaactttcatgacataggattctgccgccaaatttatatcattaacaatgtgtgcctttttgcaagacttgtaatttacttattatgtttgaactaaaatgattgaattttacagtatttctaagaatggaattgtggtatttttttctgtattgattttaacagaaaatttcaatttatagaggttaggaattccaaactacagaaaatgtttgtttttagtgtcaaatttttagctgtatttgtagcaattatcaggtttgctagaaatataacttttaatacagtagcctgtaaataaaacactcttccatatgatattcaacattttacaactgcagtattcacctaaagtagaaataatctgttacttattgtaaatactgccctagtgtctccatggaccaaatttatatttataattgtagatttttatattttactactgagtcaagttttctagttctgtgtaattgtttagtttaatgacgtagttcattagctggtcttactctaccagttttctgacattgtattgtgttacctaagtcattaactttgtttcagcatgtaattttaacttttgtggaaaatagaaataccttcattttgaaagaagtttttatgagaataacaccttaccaaacattgttcaaatggtttttatccaaggaattgcaaaaataaatataaatattgccattaa

SEQ ID NO: 300720 - DNA, 8070 bp, Homo sapiens
  misc_feature (2)..(2): n is a, c, g, or t
  misc_feature (5)..(5): n is a, c, g, or t
  misc_feature (7)..(7): n is a, c, g, or t
  misc_feature (9)..(9): n is a, c, g, or t
  misc_feature (57)..(57): n is a, c, g, or t
cngcngnanccggcgaaagaggcaaagtcccgcacgccggaggacatgcgcctcggntagcggccccgggccccaccaccgtgcggctttctccagattattcctctctcgctgtctctgactgtctctctctgtctctgtctctgtctctctctctctcacacacacacacacacacacaaacacacatacgcacgcacgatctcacttcgatctatacactggaggattaaaacaaacaaacaaaaaaaacatttccttcgctccccctccctctccactctgagaagcagaggagccgcacggcgaggggccgcagaccgtctggaaatgcgaatcctaaagcgtttcctcgcttgcattcagctcctctgtgtttgccgcctggattgggctaatggatactacagacaacagagaaaacttgttgaagagattggctggtcctatacaggagcactgaatcaaaaaaattggggaaagaaatatccaacatgtaatagcccaaaacaatctcctatcaatattgatgaagatcttacacaagtaaatgtgaatcttaagaaacttaaatttcagggttgggataaaacatcattggaaaacacattcattcataacactgggaaaacagtggaaattaatctcactaatgactaccgtgtcagcggaggagtttcagaaatggtgtttaaagcaagcaagataacttttcactggggaaaatgcaatatgtcatctgatggatcagagcatagtttagaaggacaaaaatttccacttgagatgcaaatctactgctttgatgcggaccgattttcaagttttgaggaagcagtcaaaggaaaagggaagttaagagctttatccattttgtttgaggttgggacagaagaaaatttggatttcaaagcgattattgatggagtcgaaagtgttagtcgttttgggaagcaggctgctttagatccattcatactgttgaaccttctgccaaactcaactgacaagtattacatttacaatggctcattgacatctcctccctgcacagacacagttgactggattgtttttaaagatacagttagcatctctgaaagccagttggctgttttttgtgaagttcttacaatgcaacaatctggttatgtcatgctgatggactacttacaaaacaattttcgagagcaacagtacaagttctctagacaggtgttttcctcatacactggaaaggaagagattcatgaagcagtttgtagttcagaaccagaaaatgttcaggctgacccagagaattataccagccttcttgttacatgggaaagacctcgagtcgtttatgataccatgattgagaagtttgcagttttgtaccagcagttggatggagaggaccaaaccaagcatgaatttttgacagatggctatcaagacttgggtgctattctcaataatttgctacccaatatgagttatgttcttcagatagtagccatatgcactaatggcttatatggaaaatacagcgaccaactgattgtcgacatgcctactgataatcctgaacttgatcttttccctgaattaattggaactgaagaaataatcaaggaggaggaagagggaaaagacattgaagaaggcgctattgtgaatcctggtagagacagtgctacaaaccaaatcaggaaaaaggaaccccagatttctaccacaacacactacaatcgcatagggacgaaatacaatgaagccaagactaaccgatccccaacaagaggaagtgaattctctggaaagggtgatgttcccaatacatctttaaattccacttcccaaccagtcactaaattagccacagaaaaagatatttccttgacttctcagactgtgactgaactgccacctcacactgtggaaggtacttcagcctctttaaatgatggctctaaaactgttcttagatctccacatatgaacttgtcggggactgcagaatccttaaatacagtttctataacagaatatgaggaggagagtttattgaccagtttcaagcttgatactggagctgaagattcttcaggctccagtcccgcaacttctgctatcccattcatctctgagaacatatcccaagggtatatattttcctccgaaaacccagagacaataacatatgatgtccttataccagaatctgctagaaatgcttccgaagattcaacttcatcaggttcagaagaatcactaaaggatccttctatggagggaaatgtgtggtttcctagctctacagacataacagcacagcccgatgttggatcaggcagagagagctttctccagactaattacactgagatacgtgttgatgaatctgagaagacaaccaagtccttttctgcaggcccagtgatgtcacagggtccctcagttacagatctggaaatgccacattattctacctttgcctacttcccaactgaggtaacacctcatgcttttaccccatcctccagacaacaggatttggtctccacggtcaacgtggtatactcgcagacaacccaaccggtatacaatggtgagacacctcttcaaccttcctacagtagtgaagtctttcctctagtcacccctttgttgcttgacaatcagatcctcaacactacccctgctgcttcaagtagtgattcggccttgcatgctacgcctgtatttcccagtgtcgatgtgtcatttgaatccatcctgtcttcctatgatggtgcacctttgcttccattttcctctgcttccttcagtagtgaattgtttcgccatctgcatacagtttctcaaatccttccacaagttacttcagctaccgagagtgataaggtgcccttgcatgcttctctgccagtggctgggggtgatttgctattagagcccagccttgctcagtattctgatgtgctgtccactactcatgctgcttcagagacgctggaatttggtagtgaatctggtgttctttataaaacgcttatgttttctcaagttgaaccacccagcagtgatgccatgatgcatgcacgttcttcagggcctgaaccttcttatgccttgtctgataatgagggctcccaacacatcttcactgtttcttacagttctgcaatacctgtgcatgattctgtgggtgtaacttatcagggttccttatttagcggccctagccatataccaatacctaagtcttcgttaataaccccaactgcatcattactgcagcctactcatgccctctctggtgatggggaatggtctggagcctcttctgatagtgaatttcttttacctgacacagatgggctgacagcccttaacatttcttcacctgtttctgtagctgaatttacatatacaacatctgtgtttggtgatgataataaggcgctttctaaaagtgaaataatatatggaaatgagactgaactgcaaattccttctttcaatgagatggtttacccttctgaaagcacagtcatgcccaacatgtatgataatgtaaataagttgaatgcgtctttacaagaaacctctgtttccatttctagcaccaagggcatgtttccagggtcccttgctcataccaccactaaggtttttgatcatgagattagtcaagttccagaaaataacttttcagttcaacctacacatactgtctctcaagcatctggtgacacttcgcttaaacctgtgcttagtgcaaactcagagccagcatcctctgaccctgcttctagtgaaatgttatctccttcaactcagctcttattttatgagacctcagcttcttttagtactgaagtattgctacaaccttcctttcaggcttctgatgttgacaccttgcttaaaactgttcttccagctgtgcccagtgatccaatattggttgaaacccccaaagttgataaaattagttctacaatgttgcatctcattgtatcaaattctgcttcaagtgaaaacatgctgcactctacatctgtaccagtttttgatgtgtcgcctacttctcatatgcactctgcttcacttcaaggtttgaccatttcctatgcaagtgagaaatatgaaccagttttgttaaaaagtgaaagttcccaccaagtggtaccttctttgtacagtaatgatgagttgttccaaacggccaatttggagattaaccaggcccatcccccaaaaggaaggcatgtatttgctacacctgttttatcaattgatgaaccattaaatacactaataaataagcttatacattccgatgaaattttaacctccaccaaaagttctgttactggtaaggtatttgctggtattccaacagttgcttctgatacatttgtatctactgatcattctgttcctataggaaatgggcatgttgccattacagctgtttctccccacagagatggttctgtaacctcaacaaagttgctgtttccttctaaggcaacttctgagctgagtcatagtgccaaatctgatgccggtttagtgggtggtggtgaagatggtgacactgatgatgatggtgatgatgatgatgacagagatagtgatggcttatccattcataagtgtatgtcatgctcatcctatagagaatcacaggaaaaggtaatgaatgattcagacacccacgaaaacagtcttatggatcagaataatccaatctcatactcactatctgagaattctgaagaagataatagagtcacaagtgtatcctcagacagtcaaactggtatggacagaagtcctggtaaatcaccatcagcaaatgggctatcccaaaagcacaatgatggaaaagaggaaaatgacattcagactggtagtgctctgcttcctctcagccctgaatctaaagcatgggcagttctgacaagtgatgaagaaagtggatcagggcaaggtacctcagatagccttaatgagaatgagacttccacagatttcagttttgcagacactaatgaaaaagatgctgatgggatcctggcagcaggtgactcagaaataactcctggattcccacagtccccaacatcatctgttactagcgagaactcagaagtgttccacgtttcagaggcagaggccagtaatagtagccatgagtctcgtattggtctagctgaggggttggaatccgagaagaaggcagttataccccttgtgatcgtgtcagccctgacttttatctgtctagtggttcttgtgggtattctcatctactggaggaaatgcttccagactgcacacttttacttagaggacagtacatcccctagagttatatccacacctccaacacctatctttccaatttcagatgatgtcggagcaattccaataaagcactttccaaagcatgttgcagatttacatgcaagtagtgggtttactgaagaatttgaggaagtgcagagctgtactgttgacttaggtattacagcagacagctccaaccacccagacaacaagcacaagaatcgatacataaatatcgttgcctatgatcatagcagggttaagctagcacagcttgctgaaaaggatggcaaactgactgattatatcaatgccaattatgttgatggctacaacagaccaaaagcttatattgctgcccaaggcccactgaaatccacagctgaagatttctggagaatgatatgggaacataatgtggaagttattgtcatgataacaaacctcgtggagaaaggaaggagaaaatgtgatcagtactggcctgccgatgggagtgaggagtacgggaactttctggtcactcagaagagtgtgcaagtgcttgcctattatactgtgaggaattttactctaagaaacacaaaaataaaaaagggctcccagaaaggaagacccagtggacgtgtggtcacacagtatcactacacgcagtggcctgacatgggagtaccagagtactccctgccagtgctgacctttgtgagaaaggcagcctatgccaagcgccatgcagtggggcctgttgtcgtccactgcagtgctggagttggaagaacaggcacatatattgtgctagacagtatgttgcagcagattcaacacgaaggaactgtcaacatatttggcttcttaaaacacatccgttcacaaagaaattatttggtacaaactgaggagcaatatgtcttcattcatgatacactggttgaggccatacttagtaaagaaactgaggtgctggacagtcatattcatgcctatgttaatgcactcctcattcctggaccagcaggcaaaacaaagctagagaaacaattccagctcctgagccagtcaaatatacagcagagtgactattctgcagccctaaagcaatgcaacagggaaaagaatcgaacttcttctatcatccctgtggaaagatcaagggttggcatttcatccctgagtggagaaggcacagactacatcaatgcctcctatatcatgggctattaccagagcaatgaattcatcattacccagcaccctctccttcataccatcaaggatttctggaggatgatatgggaccataatgcccaactggtggttatgattcctgatggccaaaacatggcagaagatgaatttgtttactggccaaataaagatgagcctataaattgtgagagctttaaggtcactcttatggctgaagaacacaaatgtctatctaatgaggaaaaacttataattcaggactttatcttagaagctacacaggatgattatgtacttgaagtgaggcactttcagtgtcctaaatggccaaatccagatagccccattagtaaaacttttgaacttataagtgttataaaagaagaagctgccaatagggatgggcctatgattgttcatgatgagcatggaggagtgacggcaggaactttctgtgctctgacaacccttatgcaccaactagaaaaagaaaattccgtggatgtttaccaggtagccaagatgatcaatctgatgaggccaggagtctttgctgacattgagcagtatcagtttctctacaaagtgatcctcagccttgtgagcacaaggcaggaagagaatccatccacctctctggacagtaatggtgcagcattgcctgatggaaatatagctgagagcttagagtctttagtttaacacagaaaggggtgggggaactcacatctgagcattgttttcctcttcctaaaattaggcaggaaaatcagtctagttctgttatctgttgatttcccatcacctgacagtaactttcatgacataggattctgccgccaaatttatatcattaacaatgtgtgcctttttgcaagacttgtaatttacttattatgtttgaactaaaatgattgaattttacagtatttctaagaatggaattgtggtatttttttctgtattgattttaacagaaaatttcaatttatagaggttaggaattccaaactacagaaaatgtttgtttttagtgtcaaatttttagctgtatttgtagcaattatcaggtttgctagaaatataacttttaatacagtagcctgtaaataaaacactcttccatatgatattcaacattttacaactgcagtattcacctaaagtagaaataatctgttacttattgtaaatactgccctagtgtctccatggaccaaatttatatttataattgtagatttttatattttactactgagtcaagttttctagttctgtgtaattgtttagtttaatgacgtagttcattagctggtcttactctaccagttttctgacattgtattgtgttacctaagtcattaactttgtttcagcatgtaattttaacttttgtggaaaatagaaataccttcattttgaaagaagtttttatgagaataacaccttaccaaacattgttcaaatggtttttatccaaggaattgcaaaaataaatataaatattgccattaa

SEQ ID NO: 300721 - DNA, 7232 bp, Homo sapiens
  misc_feature (2)..(2): n is a, c, g, or t
  misc_feature (5)..(5): n is a, c, g, or t
  misc_feature (7)..(7): n is a, c, g, or t
  misc_feature (9)..(9): n is a, c, g, or t
  misc_feature (57)..(57): n is a, c, g, or t
cngcngnanccggcgaaagaggcaaagtcccgcacgccggaggacatgcgcctcggntagcggccccgggccccaccaccgtgcggctttctccagattattcctctctcgctgtctctgactgtctctctctgtctctgtctctgtctctctctctctcacacacacacacacacacacaaacacacatacgcacgcacgatctcacttcgatctatacactggaggattaaaacaaacaaacaaaaaaaacatttccttcgctccccctccctctccactctgagaagcagaggagccgcacggcgaggggccgcagaccgtctggaaatgcgaatcctaaagcgtttcctcgcttgcattcagctcctctgtgtttgccgcctggattgggctaatggatactacagacaacagagaaaacttgttgaagagattggctggtcctatacaggagcactgaatcaaaaaaattggggaaagaaatatccaacatgtaatagcccaaaacaatctcctatcaatattgatgaagatcttacacaagtaaatgtgaatcttaagaaacttaaatttcagggttgggataaaacatcattggaaaacacattcattcataacactgggaaaacagtggaaattaatctcactaatgactaccgtgtcagcggaggagtttcagaaatggtgtttaaagcaagcaagataacttttcactggggaaaatgcaatatgtcatctgatggatcagagcatagtttagaaggacaaaaatttccacttgagatgcaaatctactgctttgatgcggaccgattttcaagttttgaggaagcagtcaaaggaaaagggaagttaagagctttatccattttgtttgaggttgggacagaagaaaatttggatttcaaagcgattattgatggagtcgaaagtgttagtcgttttgggaagcaggctgctttagatccattcatactgttgaaccttctgccaaactcaactgacaagtattacatttacaatggctcattgacatctcctccctgcacagacacagttgactggattgtttttaaagatacagttagcatctctgaaagccagttggctgttttttgtgaagttcttacaatgcaacaatctggttatgtcatgctgatggactacttacaaaacaattttcgagagcaacagtacaagttctctagacaggtgttttcctcatacactggaaaggaagagattcatgaagcagtttgtagttcagaaccagaaaatgttcaggctgacccagagaattataccagccttcttgttacatgggaaagacctcgagtcgtttatgataccatgattgagaagtttgcagttttgtaccagcagttggatggagaggaccaaaccaagcatgaatttttgacagatggctatcaagacttgggtgctattctcaataatttgctacccaatatgagttatgttcttcagatagtagccatatgcactaatggcttatatggaaaatacagcgaccaactgattgtcgacatgcctactgataatcctgaacttgatcttttccctgaattaattggaactgaagaaataatcaaggaggaggaagagggaaaagacattgaagaaggcgctattgtgaatcctggtagagacagtgctacaaaccaaatcaggaaaaaggaaccccagatttctaccacaacacactacaatcgcatagggacgaaatacaatgaagccaagactaaccgatccccaacaagaggaagtgaattctctggaaagggtgatgttcccaatacatctttaaattccacttcccaaccagtcactaaattagccacagaaaaagatatttccttgacttctcagactgtgactgaactgccacctcacactgtggaaggtacttcagcctctttaaatgatggctctaaaactgttcttagatctccacatatgaacttgtcggggactgcagaatccttaaatacagtttctataacagaatatgaggaggagagtttattgaccagtttcaagcttgatactggagctgaagattcttcaggctccagtcccgcaacttctgctatcccattcatctctgagaacatatcccaagggtatatattttcctccgaaaacccagagacaataacatatgatgtccttataccagaatctgctagaaatgcttccgaagattcaacttcatcaggttcagaagaatcactaaaggatccttctatggagggaaatgtgtggtttcctagctctacagacataacagcacagcccgatgttggatcaggcagagagagctttctccagactaattacactgagatacgtgttgatgaatctgagaagacaaccaagtccttttctgcaggcccagtgatgtcacagggtccctcagttacagatctggaaatgccacattattctacctttgcctacttcccaactgaggtaacacctcatgcttttaccccatcctccagacaacaggatttggtctccacggtcaacgtggtatactcgcagacaacccaaccggtatacaatggtgagacacctcttcaaccttcctacagtagtgaagtctttcctctagtcacccctttgttgcttgacaatcagatcctcaacactacccctgctgcttcaagtagtgattcggccttgcatgctacgcctgtatttcccagtgtcgatgtgtcatttgaatccatcctgtcttcctatgatggtgcacctttgcttccattttcctctgcttccttcagtagtgaattgtttcgccatctgcatacagtttctcaaatccttccacaagttacttcagctaccgagagtgataaggtgcccttgcatgcttctctgccagtggctgggggtgatttgctattagagcccagccttgctcagtattctgatgtgctgtccactactcatgctgcttcagagacgctggaatttggtagtgaatctggtgttctttataaaacgcttatgttttctcaagttgaaccacccagcagtgatgccatgatgcatgcacgttcttcagggcctgaaccttcttatgccttgtctgataatgagggctcccaacacatcttcactgtttcttacagttctgcaatacctgtgcatgattctgtgggtgtaacttatcagggttccttatttagcggccctagccatataccaatacctaagtcttcgttaataaccccaactgcatcattactgcagcctactcatgccctctctggtgatggggaatggtctggagcctcttctgatagtgaatttcttttacctgacacagatgggctgacagcccttaacatttcttcacctgtttctgtagctgaatttacatatacaacatctgtgtttggtgatgataataaggcgctttctaaaagtgaaataatatatggaaatgagactgaactgcaaattccttctttcaatgagatggtttacccttctgaaagcacagtcatgcccaacatgtatgataatgtaaataagttgaatgcgtctttacaagaaacctctgtttccatttctagcaccaagggcatgtttccagggtcccttgctcataccaccactaaggtttttgatcatgagattagtcaagttccagaaaataacttttcagttcaacctacacatactgtctctcaagcatctggtgacacttcgcttaaacctgtgcttagtgcaaactcagagccagcatcctctgaccctgcttctagtgaaatgttatctccttcaactcagctcttattttatgagacctcagcttcttttagtactgaagtattgctacaaccttcctttcaggcttctgatgttgacaccttgcttaaaactgttcttccagctgtgcccagtgatccaatattggttgaaacccccaaagttgataaaattagttctacaatgttgcatctcattgtatcaaattctgcttcaagtgaaaacatgctgcactctacatctgtaccagtttttgatgtgtcgcctacttctcatatgcactctgcttcacttcaaggtttgaccatttcctatgcaagtgagaaatatgaaccagttttgttaaaaagtgaaagttcccaccaagtggtaccttctttgtacagtaatgatgagttgttccaaacggccaatttggagattaaccaggcccatcccccaaaaggaaggcatgtatttgctacacctgttttatcaattgatgaaccattaaatacactaataaataagcttatacattccgatgaaattttaacctccaccaaaagttctgttactggtaaggtatttgctggtattccaacagttgcttctgatacatttgtatctactgatcattctgttcctataggaaatgggcatgttgccattacagctgtttctccccacagagatggttctgtaacctcaacaaagttgctgtttccttctaaggcaacttctgagctgagtcatagtgccaaatctgatgccggtttagtgggtggtggtgaagatggtgacactgatgatgatggtgatgatgatgatgacagagatagtgatggcttatccattcataagtgtatgtcatgctcatcctatagagaatcacaggaaaaggtaatgaatgattcagacacccagacaacaagcacaagaatcgatacataaatatcgttgcctatgatcatagcagggttaagctagcacagcttgctgaaaaggatggcaaactgactgattatatcaatgccaattatgttgatggctacaacagaccaaaagcttatattgctgcccaaggcccactgaaatccacagctgaagatttctggagaatgatatgggaacataatgtggaagttattgtcatgataacaaacctcgtggagaaaggaaggagaaaatgtgatcagtactggcctgccgatgggagtgaggagtacgggaactttctggtcactcagaagagtgtgcaagtgcttgcctattatactgtgaggaattttactctaagaaacacaaaaataaaaaagggctcccagaaaggaagacccagtggacgtgtggtcacacagtatcactacacgcagtggcctgacatgggagtaccagagtactccctgccagtgctgacctttgtgagaaaggcagcctatgccaagcgccatgcagtggggcctgttgtcgtccactgcagtgctggagttggaagaacaggcacatatattgtgctagacagtatgttgcagcagattcaacacgaaggaactgtcaacatatttggcttcttaaaacacatccgttcacaaagaaattatttggtacaaactgaggagcaatatgtcttcattcatgatacactggttgaggccatacttagtaaagaaactgaggtgctggacagtcatattcatgcctatgttaatgcactcctcattcctggaccagcaggcaaaacaaagctagagaaacaattccagctcctgagccagtcaaatatacagcagagtgactattctgcagccctaaagcaatgcaacagggaaaagaatcgaacttcttctatcatccctgtggaaagatcaagggttggcatttcatccctgagtggagaaggcacagactacatcaatgcctcctatatcatgggctattaccagagcaatgaattcatcattacccagcaccctctccttcataccatcaaggatttctggaggatgatatgggaccataatgcccaactggtggttatgattcctgatggccaaaacatggcagaagatgaatttgtttactggccaaataaagatgagcctataaattgtgagagctttaaggtcactcttatggctgaagaacacaaatgtctatctaatgaggaaaaacttataattcaggactttatcttagaagctacacaggatgattatgtacttgaagtgaggcactttcagtgtcctaaatggccaaatccagatagccccattagtaaaacttttgaacttataagtgttataaaagaagaagctgccaatagggatgggcctatgattgttcatgatgagcatggaggagtgacggcaggaactttctgtgctctgacaacccttatgcaccaactagaaaaagaaaattccgtggatgtttaccaggtagccaagatgatcaatctgatgaggccaggagtctttgctgacattgagcagtatcagtttctctacaaagtgatcctcagccttgtgagcacaaggcaggaagagaatccatccacctctctggacagtaatggtgcagcattgcctgatggaaatatagctgagagcttagagtctttagtttaacacagaaaggggtgggggaactcacatctgagcattgttttcctcttcctaaaattaggcaggaaaatcagtctagttctgttatctgttgatttcccatcacctgacagtaactttcatgacataggattctgccgccaaatttatatcattaacaatgtgtgcctttttgcaagacttgtaatttacttattatgtttgaactaaaatgattgaattttacagtatttctaagaatggaattgtggtatttttttctgtattgattttaacagaaaatttcaatttatagaggttaggaattccaaactacagaaaatgtttgtttttagtgtcaaatttttagctgtatttgtagcaattatcaggtttgctagaaatataacttttaatacagtagcctgtaaataaaacactcttccatatgatattcaacattttacaactgcagtattcacctaaagtagaaataatctgttacttattgtaaatactgccctagtgtctccatggaccaaatttatatttataattgtagatttttatattttactactgagtcaagttttctagttctgtgtaattgtttagtttaatgacgtagttcattagctggtcttactctaccagttttctgacattgtattgtgttacctaagtcattaactttgtttcagcatgtaattttaacttttgtggaaaatagaaataccttcattttgaaagaagtttttatgagaataacaccttaccaaacattgttcaaatggtttttatccaaggaattgcaaaaataaatataaatattgccattaa

SEQ ID NO: 300722 - DNA, 8208 bp, Homo sapiens
  misc_feature (2)..(2): n is a, c, g, or t
  misc_feature (5)..(5): n is a, c, g, or t
  misc_feature (7)..(7): n is a, c, g, or t
  misc_feature (9)..(9): n is a, c, g, or t
  misc_feature (57)..(57): n is a, c, g, or t
cngcngnanccggcgaaagaggcaaagtcccgcacgccggaggacatgcgcctcggntagcggccccgggccccaccaccgtgcggctttctccagattattcctctctcgctgtctctgactgtctctctctgtctctgtctctgtctctctctctctcacacacacacacacacacacaaacacacatacgcacgcacgatctcacttcgatctatacactggaggattaaaacaaacaaacaaaaaaaacatttccttcgctccccctccctctccactctgagaagcagaggagccgcacggcgaggggccgcagaccgtctggaaatgcgaatcctaaagcgtttcctcgcttgcattcagctcctctgtgtttgccgcctggattgggctaatggatactacagacaacagagaaaacttgttgaagagattggctggtcctatacaggagcactgaatcaaaaaaattggggaaagaaatatccaacatgtaatagcccaaaacaatctcctatcaatattgatgaagatcttacacaagtaaatgtgaatcttaagaaacttaaatttcagggttgggataaaacatcattggaaaacacattcattcataacactgggaaaacagtggaaattaatctcactaatgactaccgtgtcagcggaggagtttcagaaatggtgtttaaagcaagcaagataacttttcactggggaaaatgcaatatgtcatctgatggatcagagcatagtttagaaggacaaaaatttccacttgagatgcaaatctactgctttgatgcggaccgattttcaagttttgaggaagcagtcaaaggaaaagggaagttaagagctttatccattttgtttgaggttgggacagaagaaaatttggatttcaaagcgattattgatggagtcgaaagtgttagtcgttttgggaagcaggctgctttagatccattcatactgttgaaccttctgccaaactcaactgacaagtattacatttacaatggctcattgacatctcctccctgcacagacacagttgactggattgtttttaaagatacagttagcatctctgaaagccagttggctgttttttgtgaagttcttacaatgcaacaatctggttatgtcatgctgatggactacttacaaaacaattttcgagagcaacagtacaagttctctagacaggtgttttcctcatacactggaaaggaagagattcatgaagcagtttgtagttcagaaccagaaaatgttcaggctgacccagagaattataccagccttcttgttacatgggaaagacctcgagtcgtttatgataccatgattgagaagtttgcagttttgtaccagcagttggatggagaggaccaaaccaagcatgaatttttgacagatggctatcaagacttgggtgctattctcaataatttgctacccaatatgagttatgttcttcagatagtagccatatgcactaatggcttatatggaaaatacagcgaccaactgattgtcgacatgcctactgataatcctgaacttgatcttttccctgaattaattggaactgaagaaataatcaaggaggaggaagagggaaaagacattgaagaaggcgctattgtgaatcctggtagagacagtgctacaaaccaaatcaggaaaaaggaaccccagatttctaccacaacacactacaatcgcatagggacgaaatacaatgaagccaagactaaccgatccccaacaagaggaagtgaattctctggaaagggtgatgttcccaatacatctttaaattccacttcccaaccagtcactaaattagccacagaaaaagatatttccttgacttctcagactgtgactgaactgccacctcacactgtggaaggtacttcagcctctttaaatgatggctctaaaactgttcttagatctccacatatgaacttgtcggggactgcagaatccttaaatacagtttctataacagaatatgaggaggagagtttattgaccagtttcaagcttgatactggagctgaagattcttcaggctccagtcccgcaacttctgctatcccattcatctctgagaacatatcccaagggtatatattttcctccgaaaacccagagacaataacatatgatgtccttataccagaatctgctagaaatgcttccgaagattcaacttcatcaggttcagaagaatcactaaaggatccttctatggagggaaatgtgtggtttcctagctctacagacataacagcacagcccgatgttggatcaggcagagagagctttctccagactaattacactgagatacgtgttgatgaatctgagaagacaaccaagtccttttctgcaggcccagtgatgtcacagggtccctcagttacagatctggaaatgccacattattctacctttgcctacttcccaactgaggtaacacctcatgcttttaccccatcctccagacaacaggatttggtctccacggtcaacgtggtatactcgcagacaacccaaccggtatacaatggtgagacacctcttcaaccttcctacagtagtgaagtctttcctctagtcacccctttgttgcttgacaatcagatcctcaacactacccctgctgcttcaagtagtgattcggccttgcatgctacgcctgtatttcccagtgtcgatgtgtcatttgaatccatcctgtcttcctatgatggtgcacctttgcttccattttcctctgcttccttcagtagtgaattgtttcgccatctgcatacagtttctcaaatccttccacaagttacttcagctaccgagagtgataaggtgcccttgcatgcttctctgccagtggctgggggtgatttgctattagagcccagccttgctcagtattctgatgtgctgtccactactcatgctgcttcagagacgctggaatttggtagtgaatctggtgttctttataaaacgcttatgttttctcaagttgaaccacccagcagtgatgccatgatgcatgcacgttcttcagggcctgaaccttcttatgccttgtctgataatgagggctcccaacacatcttcactgtttcttacagttctgcaatacctgtgcatgattctgtgggtgtaacttatcagggttccttatttagcggccctagccatataccaatacctaagtcttcgttaataaccccaactgcatcattactgcagcctactcatgccctctctggtgatggggaatggtctggagcctcttctgatagtgaatttcttttacctgacacagatgggctgacagcccttaacatttcttcacctgtttctgtagctgaatttacatatacaacatctgtgtttggtgatgataataaggcgctttctaaaagtgaaataatatatggaaatgagactgaactgcaaattccttctttcaatgagatggtttacccttctgaaagcacagtcatgcccaacatgtatgataatgtaaataagttgaatgcgtctttacaagaaacctctgtttccatttctagcaccaagggcatgtttccagggtcccttgctcataccaccactaaggtttttgatcatgagattagtcaagttccagaaaataacttttcagttcaacctacacatactgtctctcaagcatctggtgacacttcgcttaaacctgtgcttagtgcaaactcagagccagcatcctctgaccctgcttctagtgaaatgttatctccttcaactcagctcttattttatgagacctcagcttcttttagtactgaagtattgctacaaccttcctttcaggcttctgatgttgacaccttgcttaaaactgttcttccagctgtgcccagtgatccaatattggttgaaacccccaaagttgataaaattagttctacaatgttgcatctcattgtatcaaattctgcttcaagtgaaaacatgctgcactctacatctgtaccagtttttgatgtgtcgcctacttctcatatgcactctgcttcacttcaaggtttgaccatttcctatgcaagtgagaaatatgaaccagttttgttaaaaagtgaaagttcccaccaagtggtaccttctttgtacagtaatgatgagttgttccaaacggccaatttggagattaaccaggcccatcccccaaaaggaaggcatgtatttgctacacctgttttatcaattgatgaaccattaaatacactaataaataagcttatacattccgatgaaattttaacctccaccaaaagttctgttactggtaaggtatttgctggtattccaacagttgcttctgatacatttgtatctactgatcattctgttcctataggaaatgggcatgttgccattacagctgtttctccccacagagatggttctgtaacctcaacaaagttgctgtttccttctaaggcaacttctgagctgagtcatagtgccaaatctgatgccggtttagtgggtggtggtgaagatggtgacactgatgatgatggtgatgatgatgatgacagagatagtgatggcttatccattcataagtgtatgtcatgctcatcctatagagaatcacaggaaaaggtaatgaatgattcagacacccacgaaaacagtcttatggatcagaataatccaatctcatactcactatctgagaattctgaagaagataatagagtcacaagtgtatcctcagacagtcaaactggtatggacagaagtcctggtaaatcaccatcagcaaatgggctatcccaaaagcacaatgatggaaaagaggaaaatgacattcagactggtagtgctctgcttcctctcagccctgaatctaaagcatgggcagttctgacaagtgatgaagaaagtggatcagggcaaggtacctcagatagccttaatgagaatgagacttccacagatttcagttttgcagacactaatgaaaaagatgctgatgggatcctggcagcaggtgactcagaaataactcctggattcccacagtccccaacatcatctgttactagcgagaactcagaagtgttccacgtttcagaggcagaggccagtaatagtagccatgagtctcgtattggtctagctgaggggttggaatccgagaagaaggcagttataccccttgtgatcgtgtcagccctgacttttatctgtctagtggttcttgtgggtattctcatctactggaggaaatgcttccagactgcacacttttacttagaggacagtacatcccctagagttatatccacacctccaacacctatctttccaatttcagatgatgtcggagcaattccaataaagcactttccaaagcatgttgcagatttacatgcaagtagtgggtttactgaagaatttgagacactgaaagagttttaccaggaagtgcagagctgtactgttgacttaggtattacagcagacagctccaaccacccagacaacaagcacaagaatcgatacataaatatcgttgcctatgatcatagcagggttaagctagcacagcttgctgaaaaggatggcaaactgactgattatatcaatgccaattatgttgatggctacaacagaccaaaagcttatattgctgcccaaggcccactgaaatccacagctgaagatttctggagaatgatatgggaacataatgtggaagttattgtcatgataacaaacctcgtggagaaaggaaggagaaaatgtgatcagtactggcctgccgatgggagtgaggagtacgggaactttctggtcactcagaagagtgtgcaagtgcttgcctattatactgtgaggaattttactctaagaaacacaaaaataaaaaagggctcccagaaaggaagacccagtggacgtgtggtcacacagtatcactacacgcagtggcctgacatgggagtaccagagtactccctgccagtgctgacctttgtgagaaaggcagcctatgccaagcgccatgcagtggggcctgttgtcgtccactgcagtgctggagttggaagaacaggcacatatattgtgctagacagtatgttgcagcagattcaacacgaaggaactgtcaacatatttggcttcttaaaacacatccgttcacaaagaaattatttggtacaaactgaggagcaatatgtcttcattcatgatacactggttgaggccatacttagtaaagaaactgaggtgctggacagtcatattcatgcctatgttaatgcactcctcattcctggaccagcaggcaaaacaaagctagagaaacaattccagggtctcactctgtcacccaggctggagtgcagaggcacaatctcggctcactgcaaccttcctctccctggcttaactgatcctcctacctcagcctcccgagtggctaggactatactcctgagccagtcaaatatacagcagagtgactattctgcagccctaaagcaatgcaacagggaaaagaatcgaacttcttctatcatccctgtggaaagatcaagggttggcatttcatccctgagtggagaaggcacagactacatcaatgcctcctatatcatgggctattaccagagcaatgaattcatcattacccagcaccctctccttcataccatcaaggatttctggaggatgatatgggaccataatgcccaactggtggttatgattcctgatggccaaaacatggcagaagatgaatttgtttactggccaaataaagatgagcctataaattgtgagagctttaaggtcactcttatggctgaagaacacaaatgtctatctaatgaggaaaaacttataattcaggactttatcttagaagctacacaggatgattatgtacttgaagtgaggcactttcagtgtcctaaatggccaaatccagatagccccattagtaaaacttttgaacttataagtgttataaaagaagaagctgccaatagggatgggcctatgattgttcatgatgagcatggaggagtgacggcaggaactttctgtgctctgacaacccttatgcaccaactagaaaaagaaaattccgtggatgtttaccaggtagccaagatgatcaatctgatgaggccaggagtctttgctgacattgagcagtatcagtttctctacaaagtgatcctcagccttgtgagcacaaggcaggaagagaatccatccacctctctggacagtaatggtgcagcattgcctgatggaaatatagctgagagcttagagtctttagtttaacacagaaaggggtgggggaactcacatctgagcattgttttcctcttcctaaaattaggcaggaaaatcagtctagttctgttatctgttgatttcccatcacctgacagtaactttcatgacataggattctgccgccaaatttatatcattaacaatgtgtgcctttttgcaagacttgtaatttacttattatgtttgaactaaaatgattgaattttacagtatttctaagaatggaattgtggtatttttttctgtattgattttaacagaaaatttcaatttatagaggttaggaattccaaactacagaaaatgtttgtttttagtgtcaaatttttagctgtatttgtagcaattatcaggtttgctagaaatataacttttaatacagtagcctgtaaataaaacactcttccatatgatattcaacattttacaactgcagtattcacctaaagtagaaataatctgttacttattgtaaatactgccctagtgtctccatggaccaaatttatatttataattgtagatttttatattttactactgagtcaagttttctagttctgtgtaattgtttagtttaatgacgtagttcattagctggtcttactctaccagttttctgacattgtattgtgttacctaagtcattaactttgtttcagcatgtaattttaacttttgtggaaaatagaaataccttcattttgaaagaagtttttatgagaataacaccttaccaaacattgttcaaatggtttttatccaaggaattgcaaaaataaatataaatattgccattaa

SEQ ID NO: 300723 - DNA, 7994 bp, Homo sapiens
  misc_feature (2)..(2): n is a, c, g, or t
  misc_feature (5)..(5): n is a, c, g, or t
  misc_feature (7)..(7): n is a, c, g, or t
  misc_feature (9)..(9): n is a, c, g, or t
  misc_feature (57)..(57): n is a, c, g, or t
cngcngnanccggcgaaagaggcaaagtcccgcacgccggaggacatgcgcctcggntagcggccccgggccccaccaccgtgcggctttctccagattattcctctctcgctgtctctgactgtctctctctgtctctgtctctgtctctctctctctcacacacacacacacacacacaaacacacatacgcacgcacgatctcacttcgatctatacactggaggattaaaacaaacaaacaaaaaaaacatttccttcgctccccctccctctccactctgagaagcagaggagccgcacggcgaggggccgcagaccgtctggaaatgcgaatcctaaagcgtttcctcgcttgcattcagctcctctgtgtttgccgcctggattgggctaatggatactacagacaacagagaaaacttgttgaagagattggctggtcctatacaggagcactgaatcaaaaaaattggggaaagaaatatccaacatgtaatagcccaaaacaatctcctatcaatattgatgaagatcttacacaagtaaatgtgaatcttaagaaacttaaatttcagggttgggataaaacatcattggaaaacacattcattcataacactgggaaaacagtggaaattaatctcactaatgactaccgtgtcagcggaggagtttcagaaatggtgtttaaagcaagcaagataacttttcactggggaaaatgcaatatgtcatctgatggatcagagcatagtttagaaggacaaaaatttccacttgagatgcaaatctactgctttgatgcggaccgattttcaagttttgaggaagcagtcaaaggaaaagggaagttaagagctttatccattttgtttgaggttgggacagaagaaaatttggatttcaaagcgattattgatggagtcgaaagtgttagtcgttttgggaagcaggctgctttagatccattcatactgttgaaccttctgccaaactcaactgacaagtattacatttacaatggctcattgacatctcctccctgcacagacacagttgactggattgtttttaaagatacagttagcatctctgaaagccagttggctgttttttgtgaagttcttacaatgcaacaatctggttatgtcatgctgatggactacttacaaaacaattttcgagagcaacagtacaagttctctagacaggtgttttcctcatacactggaaaggaagagattcatgaagcagtttgtagttcagaaccagaaaatgttcaggctgacccagagaattataccagccttcttgttacatgggaaagacctcgagtcgtttatgataccatgattgagaagtttgcagttttgtaccagcagttggatggagaggaccaaaccaagcatgaatttttgacagatggctatcaagacttgggtgctattctcaataatttgctacccaatatgagttatgttcttcagatagtagccatatgcactaatggcttatatggaaaatacagcgaccaactgattgtcgacatgcctactgataatcctgaacttgatcttttccctgaattaattggaactgaagaaataatcaaggaggaggaagagggaaaagacattgaagaaggcgctattgtgaatcctggtagagacagtgctacaaaccaaatcaggaaaaaggaaccccagatttctaccacaacacactacaatcgcatagggacgaaatacaatgaagccaagactaaccgatccccaacaagaggaagtgaattctctggaaagggtgatgttcccaatacatctttaaattccacttcccaaccagtcactaaattagccacagaaaaagatatttccttgacttctcagactgtgactgaactgccacctcacactgtggaaggtacttcagcctctttaaatgatggctctaaaactgttcttagatctccacatatgaacttgtcggggactgcagaatccttaaatacagtttctataacagaatatgaggaggagagtttattgaccagtttcaagcttgatactggagctgaagattcttcaggctccagtcccgcaacttctgctatcccattcatctctgagaacatatcccaagggtatatattttcctccgaaaacccagagacaataacatatgatgtccttataccagaatctgctagaaatgcttccgaagattcaacttcatcaggttcagaagaatcactaaaggatccttctatggagggaaatgtgtggtttcctagctctacagacataacagcacagcccgatgttggatcaggcagagagagctttctccagactaattacactgagatacgtgttgatgaatctgagaagacaaccaagtccttttctgcaggcccagtgatgtcacagggtccctcagttacagatctggaaatgccacattattctacctttgcctacttcccaactgaggtaacacctcatgcttttaccccatcctccagacaacaggatttggtctccacggtcaacgtggtatactcgcagacaacccaaccggtatacaatggtgagacacctcttcaaccttcctacagtagtgaagtctttcctctagtcacccctttgttgcttgacaatcagatcctcaacactacccctgctgcttcaagtagtgattcggccttgcatgctacgcctgtatttcccagtgtcgatgtgtcatttgaatccatcctgtcttcctatgatggtgcacctttgcttccattttcctctgcttccttcagtagtgaattgtttcgccatctgcatacagtttctcaaatccttccacaagttacttcagctaccgagagtgataaggtgcccttgcatgcttctctgccagtggctgggggtgatttgctattagagcccagccttgctcagtattctgatgtgctgtccactactcatgctgcttcagagacgctggaatttggtagtgaatctggtgttctttataaaacgcttatgttttctcaagttgaaccacccagcagtgatgccatgatgcatgcacgttcttcagggcctgaaccttcttatgccttgtctgataatgagggctcccaacacatcttcactgtttcttacagttctgcaatacctgtgcatgattctgtgggtgtaacttatcagggttccttatttagcggccctagccatataccaatacctaagtcttcgttaataaccccaactgcatcattactgcagcctactcatgccctctctggtgatggggaatggtctggagcctcttctgatagtgaatttcttttacctgacacagatgggctgacagcccttaacatttcttcacctgtttctgtagctgaatttacatatacaacatctgtgtttggtgatgataataaggcgctttctaaaagtgaaataatatatggaaatgagactgaactgcaaattccttctttcaatgagatggtttacccttctgaaagcacagtcatgcccaacatgtatgataatgtaaataagttgaatgcgtctttacaagaaacctctgtttccatttctagcaccaagggcatgtttccagggtcccttgctcataccaccactaaggtttttgatcatgagattagtcaagttccagaaaataacttttcagttcaacctacacatactgtctctcaagcatctggtgacacttcgcttaaacctgtgcttagtgcaaactcagagccagcatcctctgaccctgcttctagtgaaatgttatctccttcaactcagctcttattttatgagacctcagcttcttttagtactgaagtattgctacaaccttcctttcaggcttctgatgttgacaccttgcttaaaactgttcttccagctgtgcccagtgatccaatattggttgaaacccccaaagttgataaaattagttctacaatgttgcatctcattgtatcaaattctgcttcaagtgaaaacatgctgcactctacatctgtaccagtttttgatgtgtcgcctacttctcatatgcactctgcttcacttcaaggtttgaccatttcctatgcaagtgagaaatatgaaccagttttgttaaaaagtgaaagttcccaccaagtggtaccttctttgtacagtaatgatgagttgttccaaacggccaatttggagattaaccaggcccatcccccaaaaggaaggcatgtatttgctacacctgttttatcaattgatgaaccattaaatacactaataaataagcttatacattccgatgaaattttaacctccaccaaaagttctgttactggtaaggtatttgctggtattccaacagttgcttctgatacatttgtatctactgatcattctgttcctataggaaatgggcatgttgccattacagctgtttctccccacagagatggttctgtaacctcaacaaagttgctgtttccttctaaggcaacttctgagctgagtcatagtgccaaatctgatgccggtttagtgggtggtggtgaagatggtgacactgatgatgatggtgatgatgatgatgacagagatagtgatggcttatccattcataagtgtatgtcatgctcatcctatagagaatcacaggaaaaggtaatgaatgattcagacacccacgaaaacagtcttatggatcagaataatccaatctcatactcactatctgagaattctgaagaagataatagagtcacaagtgtatcctcagacagtcaaactggtatggacagaagtcctggtaaatcaccatcagcaaatgggctatcccaaaagcacaatgatggaaaagaggaaaatgacattcagactggtagtgctctgcttcctctcagccctgaatctaaagcatgggcagttctgacaagtgatgaagaaagtggatcagggcaaggtacctcagatagccttaatgagaatgagacttccacagatttcagttttgcagacactaatgaaaaagatgctgatgggatcctggcagcaggtgactcagaaataactcctggattcccacagtccccaacatcatctgttactagcgagaactcagaagtgttccacgtttcagaggcagaggccagtaatagtagccatgagtctcgtattggtctagctgaggggttggaatccgagaagaaggcagttataccccttgtgatcgtgtcagccctgacttttatctgtctagtggttcttgtgggtattctcatctactggaggaaatgcttccagactgcacacttttacttagaggacagtacatcccctagagttatatccacacctccaacacctatctttccaatttcagatgatgtcggagcaattccaataaagcactttccaaagcatgttgcagatttacatgcaagtagtgggtttactgaagaatttgagacactgaaagagttttaccaggaagtgcagagctgtactgttgacttaggtattacagcagacagctccaaccacccagacaacaagcacaagaatcgatacataaatatcgttgcctatgatcatagcagggttaagctagcacagcttgctgaaaaggatggcaaactgactgattatatcaatgccaattatgttgatggctacaacagaccaaaagcttatattgctgcccaaggcccactgaaatccacagctgaagatttctggagaatgatatgggaacataatgtggaagttattgtcatgataacaaacctcgtggagaaaggaaggagaaaatgtgatcagtactggcctgccgatgggagtgaggagtacgggaactttctggtcactcagaagagtgtgcaagtgcttgcctattatactgtgaggaattttactctaagaaacacaaaaataaaaaagggctcccagaaaggaagacccagtggacgtgtggtcacacagtatcactacacgcagtggcctgacatgggagtaccagagtactccctgccagtgctgacctttgtgagaaaggcagcctatgccaagcgccatgcagtggggcctgttgtcgtccactgcagtgctggagttggaagaacaggcacatatattgtgctagacagtatgttgcagcagattcaacacgaaggaactgtcaacatatttggcttcttaaaacacatccgttcacaaagaaattatttggtacaaactgagtcctcattcctggaccagcaggcaaaacaaagctagagaaacaattccagctcctgagccagtcaaatatacagcagagtgactattctgcagccctaaagcaatgcaacagggaaaagaatcgaacttcttctatcatccctgtggaaagatcaagggttggcatttcatccctgagtggagaaggcacagactacatcaatgcctcctatatcatgggctattaccagagcaatgaattcatcattacccagcaccctctccttcataccatcaaggatttctggaggatgatatgggaccataatgcccaactggtggttatgattcctgatggccaaaacatggcagaagatgaatttgtttactggccaaataaagatgagcctataaattgtgagagctttaaggtcactcttatggctgaagaacacaaatgtctatctaatgaggaaaaacttataattcaggactttatcttagaagctacacaggatgattatgtacttgaagtgaggcactttcagtgtcctaaatggccaaatccagatagccccattagtaaaacttttgaacttataagtgttataaaagaagaagctgccaatagggatgggcctatgattgttcatgatgagcatggaggagtgacggcaggaactttctgtgctctgacaacccttatgcaccaactagaaaaagaaaattccgtggatgtttaccaggtagccaagatgatcaatctgatgaggccaggagtctttgctgacattgagcagtatcagtttctctacaaagtgatcctcagccttgtgagcacaaggcaggaagagaatccatccacctctctggacagtaatggtgcagcattgcctgatggaaatatagctgagagcttagagtctttagtttaacacagaaaggggtgggggaactcacatctgagcattgttttcctcttcctaaaattaggcaggaaaatcagtctagttctgttatctgttgatttcccatcacctgacagtaactttcatgacataggattctgccgccaaatttatatcattaacaatgtgtgcctttttgcaagacttgtaatttacttattatgtttgaactaaaatgattgaattttacagtatttctaagaatggaattgtggtatttttttctgtattgattttaacagaaaatttcaatttatagaggttaggaattccaaactacagaaaatgtttgtttttagtgtcaaatttttagctgtatttgtagcaattatcaggtttgctagaaatataacttttaatacagtagcctgtaaataaaacactcttccatatgatattcaacattttacaactgcagtattcacctaaagtagaaataatctgttacttattgtaaatactgccctagtgtctccatggaccaaatttatatttataattgtagatttttatattttactactgagtcaagttttctagttctgtgtaattgtttagtttaatgacgtagttcattagctggtcttactctaccagttttctgacattgtattgtgttacctaagtcattaactttgtttcagcatgtaattttaacttttgtggaaaatagaaataccttcattttgaaagaagtttttatgagaataacaccttaccaaacattgttcaaatggtttttatccaaggaattgcaaaaataaatataaatattgccattaa

SEQ ID NO: 300724 - DNA, 5236 bp, Homo sapiens
  misc_feature (79)..(79): n is a, c, g, or t
  misc_feature (106)..(106): n is a, c, g, or t
  misc_feature (181)..(181): n is a, c, g, or t
  misc_feature (219)..(219): n is a, c, g, or t
  misc_feature (255)..(255): n is a, c, g, or t
  misc_feature (303)..(303): n is a, c, g, or t
  misc_feature (310)..(310): n is a, c, g, or t
gaatactcttatgaaacttacttaagttgtctctttccccaagctctgaactttacaaacccattttatgtaactccanagaacaggctgacttcagtgtgaaaanttctctgatctaaaatctgattttttcaccctgcatttgcattccccttccacctcctttctaatcttgtttgtncctccctaggaaaggaagcctttgtctgcctgaacttngcaattcttaaagaccttgtagttggtacttctgtngcaatatttctttggaagtcaaaatttttatgtaaattcaaccttgtnttatttncaaagtctataaactgcctcaaaacaagaacaacttcatcttcagtaagaccctcccaatcccctccatataccaatacctaagtcttcgttaataaccccaactgcatcattactgcagcctactcatgccctctctggtgatggggaatggtctggagcctcttctgatagtgaatttcttttacctgacacagatgggctgacagcccttaacatttcttcacctgtttctgtagctgaatttacatatacaacatctgtgtttggtgatgataataaggcgctttctaaaagtgaaataatatatggaaatgagactgaactgcaaattccttctttcaatgagatggtttacccttctgaaagcacagtcatgcccaacatgtatgataatgtaaataagttgaatgcgtctttacaagaaacctctgtttccatttctagcaccaagggcatgtttccagggtcccttgctcataccaccactaaggtttttgatcatgagattagtcaagttccagaaaataacttttcagttcaacctacacatactgtctctcaagcatctggtgacacttcgcttaaacctgtgcttagtgcaaactcagagccagcatcctctgaccctgcttctagtgaaatgttatctccttcaactcagctcttattttatgagacctcagcttcttttagtactgaagtattgctacaaccttcctttcaggcttctgatgttgacaccttgcttaaaactgttcttccagctgtgcccagtgatccaatattggttgaaacccccaaagttgataaaattagttctacaatgttgcatctcattgtatcaaattctgcttcaagtgaaaacatgctgcactctacatctgtaccagtttttgatgtgtcgcctacttctcatatgcactctgcttcacttcaaggtttgaccatttcctatgcaagtgagaaatatgaaccagttttgttaaaaagtgaaagttcccaccaagtggtaccttctttgtacagtaatgatgagttgttccaaacggccaatttggagattaaccaggcccatcccccaaaaggaaggcatgtatttgctacacctgttttatcaattgatgaaccattaaatacactaataaataagcttatacattccgatgaaattttaacctccaccaaaagttctgttactggtaaggtatttgctggtattccaacagttgcttctgatacatttgtatctactgatcattctgttcctataggaaatgggcatgttgccattacagctgtttctccccacagagatggttctgtaacctcaacaaagttgctgtttccttctaaggcaacttctgagctgagtcatagtgccaaatctgatgccggtttagtgggtggtggtgaagatggtgacactgatgatgatggtgatgatgatgatgacagagatagtgatggcttatccattcataagtgtatgtcatgctcatcctatagagaatcacaggaaaaggtaatgaatgattcagacacccacgaaaacagtcttatggatcagaataatccaatctcatactcactatctgagaattctgaagaagataatagagtcacaagtgtatcctcagacagtcaaactggtatggacagaagtcctggtaaatcaccatcagcaaatgggctatcccaaaagcacaatgatggaaaagaggaaaatgacattcagactggtagtgctctgcttcctctcagccctgaatctaaagcatgggcagttctgacaagtgatgaagaaagtggatcagggcaaggtacctcagatagccttaatgagaatgagacttccacagatttcagttttgcagacactaatgaaaaagatgctgatgggatcctggcagcaggtgactcagaaataactcctggattcccacagtccccaacatcatctgttactagcgagaactcagaagtgttccacgtttcagaggcagaggccagtaatagtagccatgagtctcgtattggtctagctgaggggttggaatccgagaagaaggcagttataccccttgtgatcgtgtcagccctgacttttatctgtctagtggttcttgtgggtattctcatctactggaggaaatgcttccagactgcacacttttacttagaggacagtacatcccctagagttatatccacacctccaacacctatctttccaatttcagatgatgtcggagcaattccaataaagcactttccaaagcatgttgcagatttacatgcaagtagtgggtttactgaagaatttgagacactgaaagagttttaccaggaagtgcagagctgtactgttgacttaggtattacagcagacagctccaaccacccagacaacaagcacaagaatcgatacataaatatcgttgcctatgatcatagcagggttaagctagcacagcttgctgaaaaggatggcaaactgactgattatatcaatgccaattatgttgatggctacaacagaccaaaagcttatattgctgcccaaggcccactgaaatccacagctgaagatttctggagaatgatatgggaacataatgtggaagttattgtcatgataacaaacctcgtggagaaaggaaggagaaaatgtgatcagtactggcctgccgatgggagtgaggagtacgggaactttctggtcactcagaagagtgtgcaagtgcttgcctattatactgtgaggaattttactctaagaaacacaaaaataaaaaagggctcccagaaaggaagacccagtggacgtgtggtcacacagtatcactacacgcagtggcctgacatgggagtaccagagtactccctgccagtgctgacctttgtgagaaaggcagcctatgccaagcgccatgcagtggggcctgttgtcgtccactgcagtgctggagttggaagaacaggcacatatattgtgctagacagtatgttgcagcagattcaacacgaaggaactgtcaacatatttggcttcttaaaacacatccgttcacaaagaaattatttggtacaaactgaggagcaatatgtcttcattcatgatacactggttgaggccatacttagtaaagaaactgaggtgctggacagtcatattcatgcctatgttaatgcactcctcattcctggaccagcaggcaaaacaaagctagagaaacaattccagctcctgagccagtcaaatatacagcagagtgactattctgcagccctaaagcaatgcaacagggaaaagaatcgaacttcttctatcatccctgtggaaagatcaagggttggcatttcatccctgagtggagaaggcacagactacatcaatgcctcctatatcatgggctattaccagagcaatgaattcatcattacccagcaccctctccttcataccatcaaggatttctggaggatgatatgggaccataatgcccaactggtggttatgattcctgatggccaaaacatggcagaagatgaatttgtttactggccaaataaagatgagcctataaattgtgagagctttaaggtcactcttatggctgaagaacacaaatgtctatctaatgaggaaaaacttataattcaggactttatcttagaagctacacaggatgattatgtacttgaagtgaggcactttcagtgtcctaaatggccaaatccagatagccccattagtaaaacttttgaacttataagtgttataaaagaagaagctgccaatagggatgggcctatgattgttcatgatgagcatggaggagtgacggcaggaactttctgtgctctgacaacccttatgcaccaactagaaaaagaaaattccgtggatgtttaccaggtagccaagatgatcaatctgatgaggccaggagtctttgctgacattgagcagtatcagtttctctacaaagtgatcctcagccttgtgagcacaaggcaggaagagaatccatccacctctctggacagtaatggtgcagcattgcctgatggaaatatagctgagagcttagagtctttagtttaacacagaaaggggtgggggaactcacatctgagcattgttttcctcttcctaaaattaggcaggaaaatcagtctagttctgttatctgttgatttcccatcacctgacagtaactttcatgacataggattctgccgccaaatttatatcattaacaatgtgtgcctttttgcaagacttgtaatttacttattatgtttgaactaaaatgattgaattttacagtatttctaagaatggaattgtggtatttttttctgtattgattttaacagaaaatttcaatttatagaggttaggaattccaaactacagaaaatgtttgtttttagtgtcaaatttttagctgtatttgtagcaattatcaggtttgctagaaatataacttttaatacagtagcctgtaaataaaacactcttccatatgatattcaacattttacaactgcagtattcacctaaagtagaaataatctgttacttattgtaaatactgccctagtgtctccatggaccaaatttatatttataattgtagatttttatattttactactgagtcaagttttctagttctgtgtaattgtttagtttaatgacgtagttcattagctggtcttactctaccagttttctgacattgtattgtgttacctaagtcattaactttgtttcagcatgtaattttaacttttgtggaaaatagaaataccttcattttgaaagaagtttttatgagaataacaccttaccaaacattgttcaaatggtttttatccaaggaattgcaaaaataaatataaatattgccattaa

SEQ ID NO: 300725 - DNA, 4474 bp, Homo sapiens
tctggaacttgactaatctcatgatcaaaaaccttagtggtggtatgagcaagggattagtcaagttccagaaaataacttttcagttcaacctacacatactgtctctcaagcatctggtgacacttcgcttaaacctgtgcttagtgcaaactcagagccagcatcctctgaccctgcttctagtgaaatgttatctccttcaactcagctcttattttatgagacctcagcttcttttagtactgaagtattgctacaaccttcctttcaggcttctgatgttgacaccttgcttaaaactgttcttccagctgtgcccagtgatccaatattggttgaaacccccaaagttgataaaattagttctacaatgttgcatctcattgtatcaaattctgcttcaagtgaaaacatgctgcactctacatctgtaccagtttttgatgtgtcgcctacttctcatatgcactctgcttcacttcaaggtttgaccatttcctatgcaagtgagaaatatgaaccagttttgttaaaaagtgaaagttcccaccaagtggtaccttctttgtacagtaatgatgagttgttccaaacggccaatttggagattaaccaggcccatcccccaaaaggaaggcatgtatttgctacacctgttttatcaattgatgaaccattaaatacactaataaataagcttatacattccgatgaaattttaacctccaccaaaagttctgttactggtaaggtatttgctggtattccaacagttgcttctgatacatttgtatctactgatcattctgttcctataggaaatgggcatgttgccattacagctgtttctccccacagagatggttctgtaacctcaacaaagttgctgtttccttctaaggcaacttctgagctgagtcatagtgccaaatctgatgccggtttagtgggtggtggtgaagatggtgacactgatgatgatggtgatgatgatgatgacagagatagtgatggcttatccattcataagtgtatgtcatgctcatcctatagagaatcacaggaaaaggtaatgaatgattcagacacccacgaaaacagtcttatggatcagaataatccaatctcatactcactatctgagaattctgaagaagataatagagtcacaagtgtatcctcagacagtcaaactggtatggacagaagtcctggtaaatcaccatcagcaaatgggctatcccaaaagcacaatgatggaaaagaggaaaatgacattcagactggtagtgctctgcttcctctcagccctgaatctaaagcatgggcagttctgacaagtgatgaagaaagtggatcagggcaaggtacctcagatagccttaatgagaatgagacttccacagatttcagttttgcagacactaatgaaaaagatgctgatgggatcctggcagcaggtgactcagaaataactcctggattcccacagtccccaacatcatctgttactagcgagaactcagaagtgttccacgtttcagaggcagaggccagtaatagtagccatgagtctcgtattggtctagctgaggggttggaatccgagaagaaggcagttataccccttgtgatcgtgtcagccctgacttttatctgtctagtggttcttgtgggtattctcatctactggaggaaatgcttccagactgcacacttttacttagaggacagtacatcccctagagttatatccacacctccaacacctatctttccaatttcagatgatgtcggagcaattccaataaagcactttccaaagcatgttgcagatttacatgcaagtagtgggtttactgaagaatttgagacactgaaagagttttaccaggaagtgcagagctgtactgttgacttaggtattacagcagacagctccaaccacccagacaacaagcacaagaatcgatacataaatatcgttgcctatgatcatagcagggttaagctagcacagcttgctgaaaaggatggcaaactgactgattatatcaatgccaattatgttgatggctacaacagaccaaaagcttatattgctgcccaaggcccactgaaatccacagctgaagatttctggagaatgatatgggaacataatgtggaagttattgtcatgataacaaacctcgtggagaaaggaaggagaaaatgtgatcagtactggcctgccgatgggagtgaggagtacgggaactttctggtcactcagaagagtgtgcaagtgcttgcctattatactgtgaggaattttactctaagaaacacaaaaataaaaaagggctcccagaaaggaagacccagtggacgtgtggtcacacagtatcactacacgcagtggcctgacatgggagtaccagagtactccctgccagtgctgacctttgtgagaaaggcagcctatgccaagcgccatgcagtggggcctgttgtcgtccactgcagtgctggagttggaagaacaggcacatatattgtgctagacagtatgttgcagcagattcaacacgaaggaactgtcaacatatttggcttcttaaaacacatccgttcacaaagaaattatttggtacaaactgaggagcaatatgtcttcattcatgatacactggttgaggccatacttagtaaagaaactgaggtgctggacagtcatattcatgcctatgttaatgcactcctcattcctggaccagcaggcaaaacaaagctagagaaacaattccagctcctgagccagtcaaatatacagcagagtgactattctgcagccctaaagcaatgcaacagggaaaagaatcgaacttcttctatcatccctgtggaaagatcaagggttggcatttcatccctgagtggagaaggcacagactacatcaatgcctcctatatcatgggctattaccagagcaatgaattcatcattacccagcaccctctccttcataccatcaaggatttctggaggatgatatgggaccataatgcccaactggtggttatgattcctgatggccaaaacatggcagaagatgaatttgtttactggccaaataaagatgagcctataaattgtgagagctttaaggtcactcttatggctgaagaacacaaatgtctatctaatgaggaaaaacttataattcaggactttatcttagaagctacacaggatgattatgtacttgaagtgaggcactttcagtgtcctaaatggccaaatccagatagccccattagtaaaacttttgaacttataagtgttataaaagaagaagctgccaatagggatgggcctatgattgttcatgatgagcatggaggagtgacggcaggaactttctgtgctctgacaacccttatgcaccaactagaaaaagaaaattccgtggatgtttaccaggtagccaagatgatcaatctgatgaggccaggagtctttgctgacattgagcagtatcagtttctctacaaagtgatcctcagccttgtgagcacaaggcaggaagagaatccatccacctctctggacagtaatggtgcagcattgcctgatggaaatatagctgagagcttagagtctttagtttaacacagaaaggggtgggggaactcacatctgagcattgttttcctcttcctaaaattaggcaggaaaatcagtctagttctgttatctgttgatttcccatcacctgacagtaactttcatgacataggattctgccgccaaatttatatcattaacaatgtgtgcctttttgcaagacttgtaatttacttattatgtttgaactaaaatgattgaattttacagtatttctaagaatggaattgtggtatttttttctgtattgattttaacagaaaatttcaatttatagaggttaggaattccaaactacagaaaatgtttgtttttagtgtcaaatttttagctgtatttgtagcaattatcaggtttgctagaaatataacttttaatacagtagcctgtaaataaaacactcttccatatgatattcaacattttacaactgcagtattcacctaaagtagaaataatctgttacttattgtaaatactgccctagtgtctccatggaccaaatttatatttataattgtagatttttatattttactactgagtcaagttttctagttctgtgtaattgtttagtttaatgacgtagttcattagctggtcttactctaccagttttctgacattgtattgtgttacctaagtcattaactttgtttcagcatgtaattttaacttttgtggaaaatagaaataccttcattttgaaagaagtttttatgagaataacaccttaccaaacattgttcaaatggtttttatccaaggaattgcaaaaataaatataaatattgccattaa

SEQ ID NO: 300726 - DNA, 4783 bp, Homo sapiens
tacgctgcgggaccggccccgggaggggggggcggagcccgcgaagggggcccaccgacacagagggcgacagcccgtaacaggcacaccgccagagcgaagcacatatacaacatctgtgtttggtgatgataataaggcgctttctaaaagtgaaataatatatggaaatgagactgaactgcaaattccttctttcaatgagatggtttacccttctgaaagcacagtcatgcccaacatgtatgataatgtaaataagttgaatgcgtctttacaagaaacctctgtttccatttctagcaccaagggcatgtttccagggtcccttgctcataccaccactaaggtttttgatcatgagattagtcaagttccagaaaataacttttcagttcaacctacacatactgtctctcaagcatctggtgacacttcgcttaaacctgtgcttagtgcaaactcagagccagcatcctctgaccctgcttctagtgaaatgttatctccttcaactcagctcttattttatgagacctcagcttcttttagtactgaagtattgctacaaccttcctttcaggcttctgatgttgacaccttgcttaaaactgttcttccagctgtgcccagtgatccaatattggttgaaacccccaaagttgataaaattagttctacaatgttgcatctcattgtatcaaattctgcttcaagtgaaaacatgctgcactctacatctgtaccagtttttgatgtgtcgcctacttctcatatgcactctgcttcacttcaaggtttgaccatttcctatgcaagtgagaaatatgaaccagttttgttaaaaagtgaaagttcccaccaagtggtaccttctttgtacagtaatgatgagttgttccaaacggccaatttggagattaaccaggcccatcccccaaaaggaaggcatgtatttgctacacctgttttatcaattgatgaaccattaaatacactaataaataagcttatacattccgatgaaattttaacctccaccaaaagttctgttactggtaaggtatttgctggtattccaacagttgcttctgatacatttgtatctactgatcattctgttcctataggaaatgggcatgttgccattacagctgtttctccccacagagatggttctgtaacctcaacaaagttgctgtttccttctaaggcaacttctgagctgagtcatagtgccaaatctgatgccggtttagtgggtggtggtgaagatggtgacactgatgatgatggtgatgatgatgatgacagagatagtgatggcttatccattcataagtgtatgtcatgctcatcctatagagaatcacaggaaaaggtaatgaatgattcagacacccacgaaaacagtcttatggatcagaataatccaatctcatactcactatctgagaattctgaagaagataatagagtcacaagtgtatcctcagacagtcaaactggtatggacagaagtcctggtaaatcaccatcagcaaatgggctatcccaaaagcacaatgatggaaaagaggaaaatgacattcagactggtagtgctctgcttcctctcagccctgaatctaaagcatgggcagttctgacaagtgatgaagaaagtggatcagggcaaggtacctcagatagccttaatgagaatgagacttccacagatttcagttttgcagacactaatgaaaaagatgctgatgggatcctggcagcaggtgactcagaaataactcctggattcccacagtccccaacatcatctgttactagcgagaactcagaagtgttccacgtttcagaggcagaggccagtaatagtagccatgagtctcgtattggtctagctgaggggttggaatccgagaagaaggcagttataccccttgtgatcgtgtcagccctgacttttatctgtctagtggttcttgtgggtattctcatctactggaggaaatgcttccagactgcacacttttacttagaggacagtacatcccctagagttatatccacacctccaacacctatctttccaatttcagatgatgtcggagcaattccaataaagcactttccaaagcatgttgcagatttacatgcaagtagtgggtttactgaagaatttgagacactgaaagagttttaccaggaagtgcagagctgtactgttgacttaggtattacagcagacagctccaaccacccagacaacaagcacaagaatcgatacataaatatcgttgcctatgatcatagcagggttaagctagcacagcttgctgaaaaggatggcaaactgactgattatatcaatgccaattatgttgatggctacaacagaccaaaagcttatattgctgcccaaggcccactgaaatccacagctgaagatttctggagaatgatatgggaacataatgtggaagttattgtcatgataacaaacctcgtggagaaaggaaggagaaaatgtgatcagtactggcctgccgatgggagtgaggagtacgggaactttctggtcactcagaagagtgtgcaagtgcttgcctattatactgtgaggaattttactctaagaaacacaaaaataaaaaagggctcccagaaaggaagacccagtggacgtgtggtcacacagtatcactacacgcagtggcctgacatgggagtaccagagtactccctgccagtgctgacctttgtgagaaaggcagcctatgccaagcgccatgcagtggggcctgttgtcgtccactgcagtgctggagttggaagaacaggcacatatattgtgctagacagtatgttgcagcagattcaacacgaaggaactgtcaacatatttggcttcttaaaacacatccgttcacaaagaaattatttggtacaaactgaggagcaatatgtcttcattcatgatacactggttgaggccatacttagtaaagaaactgaggtgctggacagtcatattcatgcctatgttaatgcactcctcattcctggaccagcaggcaaaacaaagctagagaaacaattccagctcctgagccagtcaaatatacagcagagtgactattctgcagccctaaagcaatgcaacagggaaaagaatcgaacttcttctatcatccctgtggaaagatcaagggttggcatttcatccctgagtggagaaggcacagactacatcaatgcctcctatatcatgggctattaccagagcaatgaattcatcattacccagcaccctctccttcataccatcaaggatttctggaggatgatatgggaccataatgcccaactggtggttatgattcctgatggccaaaacatggcagaagatgaatttgtttactggccaaataaagatgagcctataaattgtgagagctttaaggtcactcttatggctgaagaacacaaatgtctatctaatgaggaaaaacttataattcaggactttatcttagaagctacacaggatgattatgtacttgaagtgaggcactttcagtgtcctaaatggccaaatccagatagccccattagtaaaacttttgaacttataagtgttataaaagaagaagctgccaatagggatgggcctatgattgttcatgatgagcatggaggagtgacggcaggaactttctgtgctctgacaacccttatgcaccaactagaaaaagaaaattccgtggatgtttaccaggtagccaagatgatcaatctgatgaggccaggagtctttgctgacattgagcagtatcagtttctctacaaagtgatcctcagccttgtgagcacaaggcaggaagagaatccatccacctctctggacagtaatggtgcagcattgcctgatggaaatatagctgagagcttagagtctttagtttaacacagaaaggggtgggggaactcacatctgagcattgttttcctcttcctaaaattaggcaggaaaatcagtctagttctgttatctgttgatttcccatcacctgacagtaactttcatgacataggattctgccgccaaatttatatcattaacaatgtgtgcctttttgcaagacttgtaatttacttattatgtttgaactaaaatgattgaattttacagtatttctaagaatggaattgtggtatttttttctgtattgattttaacagaaaatttcaatttatagaggttaggaattccaaactacagaaaatgtttgtttttagtgtcaaatttttagctgtatttgtagcaattatcaggtttgctagaaatataacttttaatacagtagcctgtaaataaaacactcttccatatgatattcaacattttacaactgcagtattcacctaaagtagaaataatctgttacttattgtaaatactgccctagtgtctccatggaccaaatttatatttataattgtagatttttatattttactactgagtcaagttttctagttctgtgtaattgtttagtttaatgacgtagttcattagctggtcttactctaccagttttctgacattgtattgtgttacctaagtcattaactttgtttcagcatgtaattttaacttttgtggaaaatagaaataccttcattttgaaagaagtttttatgagaataacaccttaccaaacattgttcaaatggtttttatccaaggaattgcaaaaataaatataaatattgccattaa

SEQ ID NO: 300727 - DNA, 5514 bp, Homo sapiens
  misc_feature (2)..(2): n is a, c, g, or t
  misc_feature (5)..(5): n is a, c, g, or t
  misc_feature (7)..(7): n is a, c, g, or t
  misc_feature (9)..(9): n is a, c, g, or t
  misc_feature (57)..(57): n is a, c, g, or t
cngcngnanccggcgaaagaggcaaagtcccgcacgccggaggacatgcgcctcggntagcggccccgggccccaccaccgtgcggctttctccagattattcctctctcgctgtctctgactgtctctctctgtctctgtctctgtctctctctctctcacacacacacacacacacacaaacacacatacgcacgcacgatctcacttcgatctatacactggaggattaaaacaaacaaacaaaaaaaacatttccttcgctccccctccctctccactctgagaagcagaggagccgcacggcgaggggccgcagaccgtctggaaatgcgaatcctaaagcgtttcctcgcttgcattcagctcctctgtgtttgccgcctggattgggctaatggatactacagacaacagagaaaacttgttgaagagattggctggtcctatacaggagcactgaatcaaaaaaattggggaaagaaatatccaacatgtaatagcccaaaacaatctcctatcaatattgatgaagatcttacacaagtaaatgtgaatcttaagaaacttaaatttcagggttgggataaaacatcattggaaaacacattcattcataacactgggaaaacagtggaaattaatctcactaatgactaccgtgtcagcggaggagtttcagaaatggtgtttaaagcaagcaagataacttttcactggggaaaatgcaatatgtcatctgatggatcagagcatagtttagaaggacaaaaatttccacttgagatgcaaatctactgctttgatgcggaccgattttcaagttttgaggaagcagtcaaaggaaaagggaagttaagagctttatccattttgtttgaggttgggacagaagaaaatttggatttcaaagcgattattgatggagtcgaaagtgttagtcgttttgggaagcaggctgctttagatccattcatactgttgaaccttctgccaaactcaactgacaagtattacatttacaatggctcattgacatctcctccctgcacagacacagttgactggattgtttttaaagatacagttagcatctctgaaagccagttggctgttttttgtgaagttcttacaatgcaacaatctggttatgtcatgctgatggactacttacaaaacaattttcgagagcaacagtacaagttctctagacaggtgttttcctcatacactggaaaggaagagattcatgaagcagtttgtagttcagaaccagaaaatgttcaggctgacccagagaattataccagccttcttgttacatgggaaagacctcgagtcgtttatgataccatgattgagaagtttgcagttttgtaccagcagttggatggagaggaccaaaccaagcatgaatttttgacagatggctatcaagacttgggtgctattctcaataatttgctacccaatatgagttatgttcttcagatagtagccatatgcactaatggcttatatggaaaatacagcgaccaactgattgtcgacatgcctactgataatcctgaacttgatcttttccctgaattaattggaactgaagaaataatcaaggaggaggaagagggaaaagacattgaagaaggcgctattgtgaatcctggtagagacagtgctacaaaccaaatcaggaaaaaggaaccccagatttctaccacaacacactacaatcgcatagggacgaaatacaatgaagccaagactaaccgatccccaacaagaggaagtgaattctctggaaagggtgatgttcccaatacatctttaaattccacttcccaaccagtcactaaattagccacagaaaaagatatttccttgacttctcagactgtgactgaactgccacctcacactgtggaaggtacttcagcctctttaaatgatggctctaaaactgttcttagatctccacatatgaacttgtcggggactgcagaatccttaaatacagtttctataacagaatatgaggaggagagtttattgaccagtttcaagcttgatactggagctgaagattcttcaggctccagtcccgcaacttctgctatcccattcatctctgagaacatatcccaagggtatatattttcctccgaaaacccagagacaataacatatgatgtccttataccagaatctgctagaaatgcttccgaagattcaacttcatcaggttcagaagaatcactaaaggatccttctatggagggaaatgtgtggtttcctagctctacagacataacagcacagcccgatgttggatcaggcagagagagctttctccagactaattacactgagatacgtgttgatgaatctgagaagacaaccaagtccttttctgcaggcccagtgatgtcacagggtccctcagttacagatctggaaatgccacattattctacctttgcctacttcccaactgaggtaacacctcatgcttttaccccatcctccagacaacaggatttggtctccacggtcaacgtggtatactcgcagacaacccaaccggtatacaatgaggccagtaatagtagccatgagtctcgtattggtctagctgaggggttggaatccgagaagaaggcagttataccccttgtgatcgtgtcagccctgacttttatctgtctagtggttcttgtgggtattctcatctactggaggaaatgcttccagactgcacacttttacttagaggacagtacatcccctagagttatatccacacctccaacacctatctttccaatttcagatgatgtcggagcaattccaataaagcactttccaaagcatgttgcagatttacatgcaagtagtgggtttactgaagaatttgagacactgaaagagttttaccaggaagtgcagagctgtactgttgacttaggtattacagcagacagctccaaccacccagacaacaagcacaagaatcgatacataaatatcgttgcctatgatcatagcagggttaagctagcacagcttgctgaaaaggatggcaaactgactgattatatcaatgccaattatgttgatggctacaacagaccaaaagcttatattgctgcccaaggcccactgaaatccacagctgaagatttctggagaatgatatgggaacataatgtggaagttattgtcatgataacaaacctcgtggagaaaggaaggagaaaatgtgatcagtactggcctgccgatgggagtgaggagtacgggaactttctggtcactcagaagagtgtgcaagtgcttgcctattatactgtgaggaattttactctaagaaacacaaaaataaaaaagggctcccagaaaggaagacccagtggacgtgtggtcacacagtatcactacacgcagtggcctgacatgggagtaccagagtactccctgccagtgctgacctttgtgagaaaggcagcctatgccaagcgccatgcagtggggcctgttgtcgtccactgcagtgctggagttggaagaacaggcacatatattgtgctagacagtatgttgcagcagattcaacacgaaggaactgtcaacatatttggcttcttaaaacacatccgttcacaaagaaattatttggtacaaactgaggagcaatatgtcttcattcatgatacactggttgaggccatacttagtaaagaaactgaggtgctggacagtcatattcatgcctatgttaatgcactcctcattcctggaccagcaggcaaaacaaagctagagaaacaattccagctcctgagccagtcaaatatacagcagagtgactattctgcagccctaaagcaatgcaacagggaaaagaatcgaacttcttctatcatccctgtggaaagatcaagggttggcatttcatccctgagtggagaaggcacagactacatcaatgcctcctatatcatgggctattaccagagcaatgaattcatcattacccagcaccctctccttcataccatcaaggatttctggaggatgatatgggaccataatgcccaactggtggttatgattcctgatggccaaaacatggcagaagatgaatttgtttactggccaaataaagatgagcctataaattgtgagagctttaaggtcactcttatggctgaagaacacaaatgtctatctaatgaggaaaaacttataattcaggactttatcttagaagctacacaggatgattatgtacttgaagtgaggcactttcagtgtcctaaatggccaaatccagatagccccattagtaaaacttttgaacttataagtgttataaaagaagaagctgccaatagggatgggcctatgattgttcatgatgagcatggaggagtgacggcaggaactttctgtgctctgacaacccttatgcaccaactagaaaaagaaaattccgtggatgtttaccaggtagccaagatgatcaatctgatgaggccaggagtctttgctgacattgagcagtatcagtttctctacaaagtgatcctcagccttgtgagcacaaggcaggaagagaatccatccacctctctggacagtaatggtgcagcattgcctgatggaaatatagctgagagcttagagtctttagtttaacacagaaaggggtgggggaactcacatctgagcattgttttcctcttcctaaaattaggcaggaaaatcagtctagttctgttatctgttgatttcccatcacctgacagtaactttcatgacataggattctgccgccaaatttatatcattaacaatgtgtgcctttttgcaagacttgtaatttacttattatgtttgaactaaaatgattgaattttacagtatttctaagaatggaattgtggtatttttttctgtattgattttaacagaaaatttcaatttatagaggttaggaattccaaactacagaaaatgtttgtttttagtgtcaaatttttagctgtatttgtagcaattatcaggtttgctagaaatataacttttaatacagtagcctgtaaataaaacactcttccatatgatattcaacattttacaactgcagtattcacctaaagtagaaataatctgttacttattgtaaatactgccctagtgtctccatggaccaaatttatatttataattgtagatttttatattttactactgagtcaagttttctagttctgtgtaattgtttagtttaatgacgtagttcattagctggtcttactctaccagttttctgacattgtattgtgttacctaagtcattaactttgtttcagcatgtaattttaacttttgtggaaaatagaaataccttcattttgaaagaagtttttatgagaataacaccttaccaaacattgttcaaatggtttttatccaaggaattgcaaaaataaatataaatattgccattaa

SEQ ID NO: 300728 - DNA, 3132 bp, Homo sapiens
gcaggacattttggatattctggagcacagtggaagaatatgtagggcattgaggtttcctatattaacaaagtatcactttgaacccagctacaacttcaaattctgtctgtgcttttagcatgcctgatatctacttgctcttctgcatctgctacaggtaaaactgagataaattttataatttaacatcttgtgacttgttaaaatggatgtagatccagcaatccctcttctgggtatatacctgcttttgttttaattctggagatttctatcaaaattttcaagcagctcagaaattgtcttattttccatagcaactagtagtataaattgtgttcttttatttccaggaaatgcttccagactgcacacttttacttagaggacagtacatcccctagagttatatccacacctccaacacctatctttccaatttcagatgatgtcggagcaattccaataaagcactttccaaagcatgttgcagatttacatgcaagtagtgggtttactgaagaatttgagacactgaaagagttttaccaggaagtgcagagctgtactgttgacttaggtattacagcagacagctccaaccacccagacaacaagcacaagaatcgatacataaatatcgttgcctatgatcatagcagggttaagctagcacagcttgctgaaaaggatggcaaactgactgattatatcaatgccaattatgttgatggctacaacagaccaaaagcttatattgctgcccaaggcccactgaaatccacagctgaagatttctggagaatgatatgggaacataatgtggaagttattgtcatgataacaaacctcgtggagaaaggaaggagaaaatgtgatcagtactggcctgccgatgggagtgaggagtacgggaactttctggtcactcagaagagtgtgcaagtgcttgcctattatactgtgaggaattttactctaagaaacacaaaaataaaaaagggctcccagaaaggaagacccagtggacgtgtggtcacacagtatcactacacgcagtggcctgacatgggagtaccagagtactccctgccagtgctgacctttgtgagaaaggcagcctatgccaagcgccatgcagtggggcctgttgtcgtccactgcagtgctggagttggaagaacaggcacatatattgtgctagacagtatgttgcagcagattcaacacgaaggaactgtcaacatatttggcttcttaaaacacatccgttcacaaagaaattatttggtacaaactgaggagcaatatgtcttcattcatgatacactggttgaggccatacttagtaaagaaactgaggtgctggacagtcatattcatgcctatgttaatgcactcctcattcctggaccagcaggcaaaacaaagctagagaaacaattccagctcctgagccagtcaaatatacagcagagtgactattctgcagccctaaagcaatgcaacagggaaaagaatcgaacttcttctatcatccctgtggaaagatcaagggttggcatttcatccctgagtggagaaggcacagactacatcaatgcctcctatatcatgggctattaccagagcaatgaattcatcattacccagcaccctctccttcataccatcaaggatttctggaggatgatatgggaccataatgcccaactggtggttatgattcctgatggccaaaacatggcagaagatgaatttgtttactggccaaataaagatgagcctataaattgtgagagctttaaggtcactcttatggctgaagaacacaaatgtctatctaatgaggaaaaacttataattcaggactttatcttagaagctacacaggatgattatgtacttgaagtgaggcactttcagtgtcctaaatggccaaatccagatagccccattagtaaaacttttgaacttataagtgttataaaagaagaagctgccaatagggatgggcctatgattgttcatgatgagcatggaggagtgacggcaggaactttctgtgctctgacaacccttatgcaccaactagaaaaagaaaattccgtggatgtttaccaggtagccaagatgatcaatctgatgaggccaggagtctttgctgacattgagcagtatcagtttctctacaaagtgatcctcagccttgtgagcacaaggcaggaagagaatccatccacctctctggacagtaatggtgcagcattgcctgatggaaatatagctgagagcttagagtctttagtttaacacagaaaggggtgggggaactcacatctgagcattgttttcctcttcctaaaattaggcaggaaaatcagtctagttctgttatctgttgatttcccatcacctgacagtaactttcatgacataggattctgccgccaaatttatatcattaacaatgtgtgcctttttgcaagacttgtaatttacttattatgtttgaactaaaatgattgaattttacagtatttctaagaatggaattgtggtatttttttctgtattgattttaacagaaaatttcaatttatagaggttaggaattccaaactacagaaaatgtttgtttttagtgtcaaatttttagctgtatttgtagcaattatcaggtttgctagaaatataacttttaatacagtagcctgtaaataaaacactcttccatatgatattcaacattttacaactgcagtattcacctaaagtagaaataatctgttacttattgtaaatactgccctagtgtctccatggaccaaatttatatttataattgtagatttttatattttactactgagtcaagttttctagttctgtgtaattgtttagtttaatgacgtagttcattagctggtcttactctaccagttttctgacattgtattgtgttacctaagtcattaactttgtttcagcatgtaattttaacttttgtggaaaatagaaataccttcattttgaaagaagtttttatgagaataacaccttaccaaacattgttcaaatggtttttatccaaggaattgcaaaaataaatataaatattgccattaa

SEQ ID NO: 300729 - DNA, 3111 bp, Homo sapiens
gcaggacattttggatattctggagcacagtggaagaatatgtagggcattgaggtttcctatattaacaaagtatcactttgaacccagctacaacttcaaattctgtctgtgcttttagcatgcctgatatctacttgctcttctgcatctgctacaggtaaaactgagataaattttataatttaacatcttgtgacttgttaaaatggatgtagatccagcaatccctcttctgggtatatacctgcttttgttttaattctggagatttctatcaaaattttcaagcagctcagaaattgtcttattttccatagcaactagtagtataaattgtgttcttttatttccaggaaatgcttccagactgcacacttttacttagaggacagtacatcccctagagttatatccacacctccaacacctatctttccaatttcagatgatgtcggagcaattccaataaagcactttccaaagcatgttgcagatttacatgcaagtagtgggtttactgaagaatttgaggaagtgcagagctgtactgttgacttaggtattacagcagacagctccaaccacccagacaacaagcacaagaatcgatacataaatatcgttgcctatgatcatagcagggttaagctagcacagcttgctgaaaaggatggcaaactgactgattatatcaatgccaattatgttgatggctacaacagaccaaaagcttatattgctgcccaaggcccactgaaatccacagctgaagatttctggagaatgatatgggaacataatgtggaagttattgtcatgataacaaacctcgtggagaaaggaaggagaaaatgtgatcagtactggcctgccgatgggagtgaggagtacgggaactttctggtcactcagaagagtgtgcaagtgcttgcctattatactgtgaggaattttactctaagaaacacaaaaataaaaaagggctcccagaaaggaagacccagtggacgtgtggtcacacagtatcactacacgcagtggcctgacatgggagtaccagagtactccctgccagtgctgacctttgtgagaaaggcagcctatgccaagcgccatgcagtggggcctgttgtcgtccactgcagtgctggagttggaagaacaggcacatatattgtgctagacagtatgttgcagcagattcaacacgaaggaactgtcaacatatttggcttcttaaaacacatccgttcacaaagaaattatttggtacaaactgaggagcaatatgtcttcattcatgatacactggttgaggccatacttagtaaagaaactgaggtgctggacagtcatattcatgcctatgttaatgcactcctcattcctggaccagcaggcaaaacaaagctagagaaacaattccagctcctgagccagtcaaatatacagcagagtgactattctgcagccctaaagcaatgcaacagggaaaagaatcgaacttcttctatcatccctgtggaaagatcaagggttggcatttcatccctgagtggagaaggcacagactacatcaatgcctcctatatcatgggctattaccagagcaatgaattcatcattacccagcaccctctccttcataccatcaaggatttctggaggatgatatgggaccataatgcccaactggtggttatgattcctgatggccaaaacatggcagaagatgaatttgtttactggccaaataaagatgagcctataaattgtgagagctttaaggtcactcttatggctgaagaacacaaatgtctatctaatgaggaaaaacttataattcaggactttatcttagaagctacacaggatgattatgtacttgaagtgaggcactttcagtgtcctaaatggccaaatccagatagccccattagtaaaacttttgaacttataagtgttataaaagaagaagctgccaatagggatgggcctatgattgttcatgatgagcatggaggagtgacggcaggaactttctgtgctctgacaacccttatgcaccaactagaaaaagaaaattccgtggatgtttaccaggtagccaagatgatcaatctgatgaggccaggagtctttgctgacattgagcagtatcagtttctctacaaagtgatcctcagccttgtgagcacaaggcaggaagagaatccatccacctctctggacagtaatggtgcagcattgcctgatggaaatatagctgagagcttagagtctttagtttaacacagaaaggggtgggggaactcacatctgagcattgttttcctcttcctaaaattaggcaggaaaatcagtctagttctgttatctgttgatttcccatcacctgacagtaactttcatgacataggattctgccgccaaatttatatcattaacaatgtgtgcctttttgcaagacttgtaatttacttattatgtttgaactaaaatgattgaattttacagtatttctaagaatggaattgtggtatttttttctgtattgattttaacagaaaatttcaatttatagaggttaggaattccaaactacagaaaatgtttgtttttagtgtcaaatttttagctgtatttgtagcaattatcaggtttgctagaaatataacttttaatacagtagcctgtaaataaaacactcttccatatgatattcaacattttacaactgcagtattcacctaaagtagaaataatctgttacttattgtaaatactgccctagtgtctccatggaccaaatttatatttataattgtagatttttatattttactactgagtcaagttttctagttctgtgtaattgtttagtttaatgacgtagttcattagctggtcttactctaccagttttctgacattgtattgtgttacctaagtcattaactttgtttcagcatgtaattttaacttttgtggaaaatagaaataccttcattttgaaagaagtttttatgagaataacaccttaccaaacattgttcaaatggtttttatccaaggaattgcaaaaataaatataaatattgccattaa

SEQ ID NO: 300730 - DNA, 2737 bp, Homo sapiens
tatttcactgcattttcttttagccaagaagtagttgtaacttttaaaaaatttcatttgatagattattttgtttgttttgtcttcgttattatattttaaggcacgttgtttgaaagaatgtgtgttaaaatgatttacactgaaagagttttaccaggaagtgcagagctgtactgttgacttaggtattacagcagacagctccaaccacccagacaacaagcacaagaatcgatacataaatatcgttgcctatgatcatagcagggttaagctagcacagcttgctgaaaaggatggcaaactgactgattatatcaatgccaattatgttgatggctacaacagaccaaaagcttatattgctgcccaaggcccactgaaatccacagctgaagatttctggagaatgatatgggaacataatgtggaagttattgtcatgataacaaacctcgtggagaaaggaaggagaaaatgtgatcagtactggcctgccgatgggagtgaggagtacgggaactttctggtcactcagaagagtgtgcaagtgcttgcctattatactgtgaggaattttactctaagaaacacaaaaataaaaaagggctcccagaaaggaagacccagtggacgtgtggtcacacagtatcactacacgcagtggcctgacatgggagtaccagagtactccctgccagtgctgacctttgtgagaaaggcagcctatgccaagcgccatgcagtggggcctgttgtcgtccactgcagtgctggagttggaagaacaggcacatatattgtgctagacagtatgttgcagcagattcaacacgaaggaactgtcaacatatttggcttcttaaaacacatccgttcacaaagaaattatttggtacaaactgaggagcaatatgtcttcattcatgatacactggttgaggccatacttagtaaagaaactgaggtgctggacagtcatattcatgcctatgttaatgcactcctcattcctggaccagcaggcaaaacaaagctagagaaacaattccagctcctgagccagtcaaatatacagcagagtgactattctgcagccctaaagcaatgcaacagggaaaagaatcgaacttcttctatcatccctgtggaaagatcaagggttggcatttcatccctgagtggagaaggcacagactacatcaatgcctcctatatcatgggctattaccagagcaatgaattcatcattacccagcaccctctccttcataccatcaaggatttctggaggatgatatgggaccataatgcccaactggtggttatgattcctgatggccaaaacatggcagaagatgaatttgtttactggccaaataaagatgagcctataaattgtgagagctttaaggtcactcttatggctgaagaacacaaatgtctatctaatgaggaaaaacttataattcaggactttatcttagaagctacacaggatgattatgtacttgaagtgaggcactttcagtgtcctaaatggccaaatccagatagccccattagtaaaacttttgaacttataagtgttataaaagaagaagctgccaatagggatgggcctatgattgttcatgatgagcatggaggagtgacggcaggaactttctgtgctctgacaacccttatgcaccaactagaaaaagaaaattccgtggatgtttaccaggtagccaagatgatcaatctgatgaggccaggagtctttgctgacattgagcagtatcagtttctctacaaagtgatcctcagccttgtgagcacaaggcaggaagagaatccatccacctctctggacagtaatggtgcagcattgcctgatggaaatatagctgagagcttagagtctttagtttaacacagaaaggggtgggggaactcacatctgagcattgttttcctcttcctaaaattaggcaggaaaatcagtctagttctgttatctgttgatttcccatcacctgacagtaactttcatgacataggattctgccgccaaatttatatcattaacaatgtgtgcctttttgcaagacttgtaatttacttattatgtttgaactaaaatgattgaattttacagtatttctaagaatggaattgtggtatttttttctgtattgattttaacagaaaatttcaatttatagaggttaggaattccaaactacagaaaatgtttgtttttagtgtcaaatttttagctgtatttgtagcaattatcaggtttgctagaaatataacttttaatacagtagcctgtaaataaaacactcttccatatgatattcaacattttacaactgcagtattcacctaaagtagaaataatctgttacttattgtaaatactgccctagtgtctccatggaccaaatttatatttataattgtagatttttatattttactactgagtcaagttttctagttctgtgtaattgtttagtttaatgacgtagttcattagctggtcttactctaccagttttctgacattgtattgtgttacctaagtcattaactttgtttcagcatgtaattttaacttttgtggaaaatagaaataccttcattttgaaagaagtttttatgagaataacaccttaccaaacattgttcaaatggtttttatccaaggaattgcaaaaataaatataaatattgccattaa

SEQ ID NO: 300731 - DNA, 917 bp, Homo sapiens
tcagctatatttccatcaggcaatgctgcaccattactgtccagagaggtggagcattgcctgatggaaatatagctgagagcttagagtctttagtttaacacagaaaggggtgggggaactcacatctgagcattgttttcctcttcctaaaattaggcaggaaaatcagtctagttctgttatctgttgatttcccatcacctgacagtaactttcatgacataggattctgccgccaaatttatatcattaacaatgtgtgcctttttgcaagacttgtaatttacttattatgtttgaactaaaatgattgaattttacagtatttctaagaatggaattgtggtatttttttctgtattgattttaacagaaaatttcaatttatagaggttaggaattccaaactacagaaaatgtttgtttttagtgtcaaatttttagctgtatttgtagcaattatcaggtttgctagaaatataacttttaatacagtagcctgtaaataaaacactcttccatatgatattcaacattttacaactgcagtattcacctaaagtagaaataatctgttacttattgtaaatactgccctagtgtctccatggaccaaatttatatttataattgtagatttttatattttactactgagtcaagttttctagttctgtgtaattgtttagtttaatgacgtagttcattagctggtcttactctaccagttttctgacattgtattgtgttacctaagtcattaactttgtttcagcatgtaattttaacttttgtggaaaatagaaataccttcattttgaaagaagtttttatgagaataacaccttaccaaacattgttcaaatggtttttatccaaggaattgcaaaaataaatataaatattgccattaa

SEQ ID NO: 300732 - DNA, 312 bp, Homo sapiens
tacgaaaaattatgctgaccttaaaaacttaggcattgtacagttaaagatgacatataaatcagttagtaggaaacatttgtcatttaattcttcagggctacaacagaccaaaagcttatattgctgcccaaggcccactgaaatccacagctgaagatttctggagaatgatatgggaacataatgtggaagttattgtcatgataacaaacctcgtggagaaaggaagggtatgtagataatctgttatgtcacccccaaaaaagtaattagaggtactttaaattagttttaatagagtcagcatta

SEQ ID NO: 300733 - DNA, 516 bp, Homo sapiens
ctgaacttatgttataaatatataaaatacagtttgttatatatgtatttatacattatattatatgtgtattatacatgtctttatatgatactctcaggttttttttattattgccaactcctttcatagtatacaaataataaaccataagcaaatactaaacttctgtaaagtattccactattgatatcatgaacacttggcaatatttcagattaaatcatagttctttgtgcaaaaagcgaagagagacaattcattaaaagtttcagtgttttcactgcaaagttgtcaaggctatatgctttgtgagttctaaatgtgagtggtgcatctcaatggagtctttgttccttttcttttttttttttacaaggcatggaggagtgacggcaggaactttctgtgctctgacaacccttatgcaccaactagaaaaagaaaattccgtggatgtttaccaggtagccaagatgatcaatctgatgaggccaggagtctttgctgacattg

SEQ ID NO: 300734 - DNA, 516 bp, Homo sapiens
caaaaagcgaagagagacaattcattaaaagtttcagtgttttcactgcaaagttgtcaaggctatatgctttgtgagttctaaatgtgagtggtgcatctcaatggagtctttgttccttttcttttttttttttacaaggcatggaggagtgacggcaggaactttctgtgctctgacaacccttatgcaccaactagaaaaagaaaattccgtggatgtttaccaggtagccaagatgatcaatctgatgaggccaggagtctttgctgacattgtaagtaacaaggcagtgaacgaaatttttcactgatagagtacaactaacttcctagaggctgctgaaatcttatgtatcaagaaagatcttattaactgataacattagtatgtagttttcaagctgaattacaagtccacaatccatagaacaacaacatttaaaatttatacttcagaaaatttatggataaaaacttttaaatctcatgtttgcctttgtgcacaatagtaaac

SEQ ID NO: 300735 - DNA, 165 bp, Homo sapiens
tacctaagtcattaactttgtttcagcatgtaattttaacttttgtggaaaatagaaataccttcattttgaaagaagtttttatgagaataacaccttaccaaacattgttcaaatggtttttatccaaggaattgcaaaaataaatataaatattgccattaa

SEQ ID NO: 300736 - DNA, 867 bp, Homo sapiens
ctgagccggtaccgcacgagttcggagttggctcttgttgcccaggcgaatgcaatggcgtgatctcggctcactgcaacctctgcctcccaggttcaagcaattctcctgcctcagcctcccgagtagctgggattacaggcatgagccaccgcgcccggctaattttctatttttagtagagacttggggggtctccctatgttgcttaggctggtctcaacctcctgggctcaagtgatcgtcctgccttggcctcccaaagtgctgggattacaggcttgaaccaccctgccccagacccaggggaaggagaaggggaagagtcagagctgacacagcagttttgcagcttggacacagcaagtgctttttaaggcctgttttaagcttcttcagttcccatttggagaatccggcccaaggtttcacatcccatttctgtgatgaaccctaaaccccttgtccagcattgcttgggcatcacgtgttcctggctgctcagctccactggccagttcctctcagtgtgcgcctcacattgggatcactcaagctcgggccataatctcttaaactctggagcaaagacctcagtgagccccccggttgccatgcaagttgcatagcaatagcgtcaatgtgcccatataaagggcctaataattccaactgcctcccagaattgaggcttttttcttttttgagacagagtcttactctgttgcccaagctggagcacagtggcgccatctcagctcaccgcaacttccgtgaggcagacatgttttttgtttgagatgggagttccactctttttgcccaggctggagtgcaatgacgccatctcagctcactgcaacctcc

SEQ ID NO: 300737 - DNA, 5600 bp, Homo sapiens
cttaattctagaagggagcgcccgtagccagcgcccccgtaaagaaataaggaggcgcccggcttcccgcccaggcccagggccccagtgcagcctggacacagtattcaaagttttggcgtctgagcattgttatgcgttattttcaagctttgctaacggtttttaaacctttgagatgtttccattaattggaaaaacaatcatctttgataactttcctgatccttctgatacatgggaaatcactgagacaattggcaaaggaacttatgggaaagtttttaaagtattgaataagaaaaatggccaaaaagcagcagtcaaaattcttgatccaattcacgatattgacgaagagattgaagcagaatataacatcttaaaagcactttctgaccaccctaatgtggtcagattctatgggatatactttaagaaggataaagtaaatggagacaagctgtggttggttcttgagctctgcagtggaggatcagtgactgaccttgtgaaaggatttctgaagaggggtgaaagaatgagtgagcctctaattgcctatattttacatgaagcactaatgggacttcaacatttgcataacaacaaaactatccacagagatgtgaaaggcaataacattctattgaccacggaaggtggagtgaaactagtagattttggtgtgtctgcacagctcaccagtacccggcaccgtcggaacacatccgtaggaacaccgttttggatggctcctgaggtgattgcatgtgaacagcaattggataccacttatgacgccagatgtgacacttggtccctgggtatcacggccattgagctgggtgatggagatcctccactagctgaccttcatcccatgagagcactcttcaaaataccaaggaatccacccccaaaactaaggcagcctgagctatggtcagcagaattcaatgacttcataagcaagtgcttgactaaagattatgaaaagcgtccaacagtgtcagaacttttacagcataaattcattactcaaattgagggcaaagatgtgatgctacaaaaacaactaacggaattcattggcatccatcaatgcatgggaggcacagaaaaggccagacgtgaacgtattcacacgaagaaagggaacttcaaccgacctctaatatccaatctgaaggatgtagatgatttagcaaccctagaaattttggatgagaatacagtctcagagcaacttgagaagtgttattccagagatcagatctacgtctatgtgggagacatactcattgctcttaacccttttcagagtctgggtctttactccacaaagcattccaaactatatattggatcaaagagaactgccagtcctcctcacatttttgcaatggctgacttaggatatcaatctataataacatataattcagatcagtgcattgttatttctggagaaagtggtgctggaaagactgaaaatgctcatcttttagttcagcagctgacagtgcttggaaaggctaataacagaaccttgcaagagaagattttacaagtgaacaatttggtagaagcctttggcaatgcctgcactattataaatgacaattctagcagatttggaaaatacttagaaatgaaattcacctcttctggagcggtagtgggagcacagatttctgaatatctcctggaaaaatcccgagttatccaccaagctattggagaaaaaaattttcatattttttactacatttatgctggtttggctgaaaagaagaaactagcccattacaaactgcctgaaaataagcctcccaggtacctacaaaatgaccacctcagaacagtacaagacatcatgaataatagtttctataaatcccagtatgaattaattgagcaatgtttcaaagtcataggttttacaatggagcaacttggtagtatatacagcatactcgctgcaatcttgaatgttggcaacattgaattttcttctgtggcaactgaacaccagattgacaagagccacatttctaatcatacagccctggagaactgtgtttctttgctttgcattcgggcagatgagctacaagaagctctcacctcccactgtgtggtcactagaggagaaacaattatacgacccaatactgtagaaaaagctaccgatgtcagggatgccatggctaaaactttatatggacgtctctttagttggatagtcaattgcattaacagtttgttgaagcatgactcatcaccaagtgggaatggtgatgagctgagcattggcattcttgatatatttggttttgaaaatttcaaaaaaaattccttcgagcagctgtgcattaacattgcaaatgaacaaattcagtattattataatcaacatgtgtttgcatgggaacagaatgaatacctaaatgaagatgtggatgctagagttattgaatatgaggataactggcccctcttagatatgtttctgcaaaagccaatgggtttactttccctacttgatgaagaaagtagatttcccaaggccactgaccagactcttgtagaaaaatttgaaggtaacctgaaatcacaatacttctggagacccaaaagaatggaacttagttttggaattcaccattatgcaggaaaggtcctctataatgcaagtggattcttagccaaaaacaagacactagttcctactgacattgtgctacttttgaggtcatccgacaacagtgtaattaggcaactagtcaaccaccctctgaccaaaacaggtaatctgccacattctaaactaaaaatgttaaactatcaaatgaggacttcagaaaaattaatcaacctggcaaagggcgacactggagaagccacacgtcatgccagagagacaaccaacatgaaaacacaaacggttgcatcatattttagatattccctgatggatttgttgtctaaaatggtggtgggccaacctcattttgtccgttgcatcaaaccaaatagtgagcgtcaggcaagaaaatatgacaaagagaaagttctgctacagcttcggtacacaggaattctggaaacagcaagaattcgaagactaggattctcccatcggatactttttgctaactttataaagcggtactaccttctctgctacaagtcgagcgaggagccccgcatgagccctgacacctgtgccaccattttggaaaaagctggtctcgataactgggctcttggaaaaacaaaagtgttccttaagtattatcacgtggagcagttaaatctaatgcgaaaggaagctattgacaagcttattttgattcaagcttgtgtcagagcattcttgtgttcaagaagataccaaaaaatacaggagaaaaggaaagaaagcgctataataatacagtcagctgcaagaggacaccttgtcgggaaacaaagaaaagaaattgttgacatgaaaaacacagcagtaacaaccattcaaacttctgatcaggaattcgactacaagaaaaactttgaaaatacaagggaatctttcgtgaagaaacaagcagaaaatgcaatctctgctaatgaaagattcatttcagctccaaataataaaggaagtgtatctgtagtgaagacttccactttcaaacctgaagaggaaaccaccaatgctgtggagagtaacaacagagtgtatcagactccaaaaaaaatgaataatgtgtatgaggaagaggttaagcaagaattttaccttgtagggccagaagtaagccccaaacagaagtttgtcaaagacctggaagagaacagcaatctaaggaaagtggagaaagaggaagctatgatccagagttactatcagaggtacacagaggagaggaattgtgaagagtcaaaagcagcatatctagaaaggaaggccatatcagaaaggccaagctacccagtgccttggttagctgaaaatgagacttcctttaaaaaaactttggaacctacacttagccaaaggtcaatttatcaaaatgcaaacagcatggaaaaagaaaagaagacatctgtagttacccagagtgcaccgatatgcagccaggaggaaggcagaggccgtctgaggcatgagacagtcaaagagaggcaagttgaaccagtgacacaggcccaggaggaagaagataaagcagcggtattcattcagagcaaataccggggttacaagagaaggcagcagttgaggaaggacaagatgtcttcttttaagcatcagaagattgtcacaacaccaacagaagtagcaagaaacactcataatttgtattcctatcccacaaaacatgaggaaatcaataacatcaagaagaaggataacaaagactcgaaagcaacttcagaaagagaagcatgtggtttggcaattttttcaaaacagatatcaaagttatctgaagaatatttcattctgcagaaaaaattgaatgaaatgattttgtcacagcaactgaagtcactttatctgggtgtctcgcaccataagccaattaatagacgagtttcttctcagcagtgcctctcaggtgtctgtaaaggagaggagccaaaaatattgagacccccaagacgaccccggaaacccaaaacattaaataaccctgaagactccacatactattatctacttcataagtcaatccaagaagaaaaacgaagaccaaggaaagacagtcagggaaaattattagatttggaagatttctattataaggaatttttgcccagtcgttctggaccaaaggaacatagccctagtttaagagaacgaagaccacagcaagaactccagaatcaatgtattaaggctaatgaaaggtgctgggcggcggagagccccgagaaggaggaggagagagagccagcagccaacccctacgacttcaggaggctcctgcgcaaaacctcccagcgccggcgcctcgtccagcagtcctaaccgttcaacgaggcagtcaccgccgtcggaaggcgctggagcctgcggggcagcaggggccaagcaggcactctggggctggcaccagcaggcactgaagctgcggccctgatctccgcagaggctgcctgctgcgctcggccctcaagtgcccgggccggccttcgtgctccgaaacaagagacctgggagccctcgggaaacctcccccgacgctctctctcggaactcccgcaccctcctttctcaccagcccgccagttgtggcaaccctgtccttgttcccctaatctatcactttgttctttttttttgtgactcctgtggactccactgcgcctgggatctcgccaacccctctctcatttggggtgactgaattcacagatttttttttttattggaaacggcttttcttggccaacagaacacttgctagcggttgaatcttagagaaaaaagcccgggaggggtggggagaatttcgaagatgtatttcatctcaagcttgctctttctcttcctttggttattaaggtcactaaataaaggaagtgccttggaaaacccgtgg

SEQ ID NO: 300738 - DNA, 5493 bp, Homo sapiens
cttaattctagaagggagcgcccgtagccagcgcccccgtaaagaaataaggaggcgcccggcttcccgcccaggcccagggccccagtgcagcctggacacagtattcaaagttttggcgtctgagcattgttatgcgttattttcaagctttgctaacggtttttaaacctttgagatgtttccattaattggaaaaacaatcatctttgataactttcctgatccttctgatacatgggaaatcactgagacaattggcaaaggaacttatgggaaagtttttaaagtattgaataagaaaaatggccaaaaagcagcagtcaaaattcttgatccaattcacgatattgacgaagagattgaagcagaatataacatcttaaaagcactttctgaccaccctaatgtggtcagattctatgggatatactttaagaaggataaagtaaatggagacaagctgtggttggttcttgagctctgcagtggaggatcagtgactgaccttgtgaaaggatttctgaagaggggtgaaagaatgagtgagcctctaattgcctatattttacatgaagcactaatgggacttcaacatttgcataacaacaaaactatccacagagatgtgaaaggcaataacattctattgaccacggaaggtggagtgaaactagtagattttggtgtgtctgcacagctcaccagtacccggcaccgtcggaacacatccgtaggaacaccgttttggatggctcctgaggtgattgcatgtgaacagcaattggataccacttatgacgccagatgtgacacttggtccctgggtatcacggccattgagctgggtgatggagatcctccactagctgaccttcatcccatgagagcactcttcaaaataccaaggaatccacccccaaaactaaggcagcctgagctatggtcagcagaattcaatgacttcataagcaagtgcttgactaaagattatgaaaagcgtccaacagtgtcagaacttttacagcataaattcattactcaaattgagggcaaagatgtgatgctacaaaaacaactaacggaattcattggcatccatcaatgcatgggaggcacagaaaaggccagacgtgaacgtattcacacgaagaaagggaacttcaaccgacctctaatatccaatctgaaggatgtagatgatttagcaaccctagaaattttggatgagaatacagtctcagagcaacttgagaagtgttattccagagatcagatctacgtctatgtgggagacatactcattgctcttaacccttttcagagtctgggtctttactccacaaagcattccaaactatatattggatcaaagagaactgccagtcctcctcacatttttgcaatggctgacttaggatatcaatctataataacatataattcagatcagtgcattgttatttctggagaaagtggtgctggaaagactgaaaatgctcatcttttagttcagcagctgacagtgcttggaaaggctaataacagaaccttgcaagagaagattttacaagtgaacaatttggtagaagcctttggcaatgcctgcactattataaatgacaattctagcagatttggaaaatacttagaaatgaaattcacctcttctggagcggtagtgggagcacagatttctgaatatctcctggaaaaatcccgagttatccaccaagctattggagaaaaaaattttcatattttttactacatttatgctggtttggctgaaaagaagaaactagcccattacaaactgcctgaaaataagcctcccaggtacctacaaaatgaccacctcagaacagtacaagacatcatgaataatagtttctataaatcccagtatgaattaattgagcaatgtttcaaagtcataggttttacaatggagcaacttggtagtatatacagcatactcgctgcaatcttgaatgttggcaacattgaattttcttctgtggcaactgaacaccagattgacaagagccacatttctaatcatacagccctggagaactgtgtttctttgctttgcattcgggcagatgagctacaagaagctctcacctcccactgtgtggtcactagaggagaaacaattatacgacccaatactgtagaaaaagctaccgatgtcagggatgccatggctaaaactttatatggacgtctctttagttggatagtcaattgcattaacagtttgttgaagcatgactcatcaccaagtgggaatggtgatgagctgagcattggcattcttgatatatttggttttgaaaatttcaaaaaaaattccttcgagcagctgtgcattaacattgcaaatgaacaaattcagtattattataatcaacatgtgtttgcatgggaacagaatgaatacctaaatgaagatgtggatgctagagttattgaatatgaggataactggcccctcttagatatgtttctgcaaaagccaatgggtttactttccctacttgatgaagaaagtagatttcccaaggccactgaccagactcttgtagaaaaatttgaaggtaacctgaaatcacaatacttctggagacccaaaagaatggaacttagttttggaattcaccattatgcaggaaaggtcctctataatgcaagtggattcttagccaaaaacaagacactagttcctactgacattgtgctacttttgaggtcatccgacaacagtgtaattaggcaactagtcaaccaccctctgaccaaaacaggtaatctgccacattctaaactaaaaatgttaaactatcaaatgaggacttcagaaaaattaatcaacctggcaaagggcgacactggagaagccacacgtcatgccagagagacaaccaacatgaaaacacaaacggttgcatcatattttagatattccctgatggatttgttgtctaaaatggtggtgggccaacctcattttgtccgttgcatcaaaccaaatagtgagcgtcaggcaagaaaatatgacaaagagaaagttctgctacagcttcggtacacaggaattctggaaacagcaagaattcgaagactaggattctcccatcggatactttttgctaactttataaagcggtactaccttctctgctacaagtcgagcgaggagccccgcatgagccctgacacctgtgccaccattttggaaaaagctggtctcgataactgggctcttggaaaaacaaaagtgttccttaagtattatcacgtggagcagttaaatctaatgcgaaaggaagctattgacaagcttattttgattcaagcttgtgtcagagcattcttgtgttcaagaagataccaaaaaatacaggagaaaaggaaagaaagcgctataataatacagtcagctgcaagaggacaccttgtcgggaaacaaagaaaagaaattgttgacatgaaaaacacagcagtaacaaccattcaaacttctgatcaggaattcgactacaagaaaaactttgaaaatacaagggaatctttcgtgaagaaacaagcagaaaatgcaatctctgctaatgaaagattcatttcagctccaaataataaaggaagtgtatctgtagtgaagacttccactttcaaacctgaagaggaaaccaccaatgctgtggagagtaacaacagagtgtatcagactccaaaaaaaatgaataatgtgtatgaggaagaggttaagcaagaattttaccttgtagggccagaagtaagccccaaacagaagtttgtcaaagacctggaagagaacagcaatctaaggaaagtggagaaagaggaagctatgatccagagttactatcagaggtacacagaggagaggaattgtgaagagtcaaaagcagcatatctagaaaggaaggccatatcagaaaggccaagctacccagtgccttggttagctgaaaatgagacttcctttaaaaaaactttggaacctacacttagccaaaggtcaatttatcaaaatgcaaacagcatggaaaaagaaaagaagacatctgtagttacccagagtgcaccgatatgcagccaggaggaaggcagaggccgtctgaggcatgagacagtcaaagagaggcaagttgaaccagtgacacaggcccaggaggaagaagataaagcagcggtattcattcagagcaaataccggggttacaagagaaggcagcagttgaggaaggacaagatgtcttcttttaagcatcagaagattgtcacaacaccaacagaagtagcaagaaacactcataatttgtattcctatcccacaaaacatgaggaaatcaataacatcaagaagaaggataacaaagactcgaaagcaacttcagaaagagaagcatgtggtttggcaattttttcaaaacagatatcaaagttatctgaagaatatttcattctgcagaaaaaattgaatgaaatgattttgtcacagcaactgaagtcactttatctgggtgtctcgcaccataagccaattaatagacgagtttcttctcagcagtgcctctcagaagtcaatccaagaagaaaaacgaagaccaaggaaagacagtcagggaaaattattagatttggaagatttctattataaggaatttttgcccagtcgttctggaccaaaggaacatagccctagtttaagagaacgaagaccacagcaagaactccagaatcaatgtattaaggctaatgaaaggtgctgggcggcggagagccccgagaaggaggaggagagagagccagcagccaacccctacgacttcaggaggctcctgcgcaaaacctcccagcgccggcgcctcgtccagcagtcctaaccgttcaacgaggcagtcaccgccgtcggaaggcgctggagcctgcggggcagcaggggccaagcaggcactctggggctggcaccagcaggcactgaagctgcggccctgatctccgcagaggctgcctgctgcgctcggccctcaagtgcccgggccggccttcgtgctccgaaacaagagacctgggagccctcgggaaacctcccccgacgctctctctcggaactcccgcaccctcctttctcaccagcccgccagttgtggcaaccctgtccttgttcccctaatctatcactttgttctttttttttgtgactcctgtggactccactgcgcctgggatctcgccaacccctctctcatttggggtgactgaattcacagatttttttttttattggaaacggcttttcttggccaacagaacacttgctagcggttgaatcttagagaaaaaagcccgggaggggtggggagaatttcgaagatgtatttcatctcaagcttgctctttctcttcctttggttattaaggtcactaaataaaggaagtgccttggaaaacccgtgg

SEQ ID NO: 300739 - DNA, 2544 bp, Homo sapiens
caaaggtgaaaacacaatgctcaaatttatacagactggactgggtttccatcagtttggaatttggtctactccgaagttgttctgaggatgcctaaaggatttctccgcatcaagtctgggcatctcttcctcagcccctgcactaagttgttggggaaccaccaagctacagagatgttggcactttatgcaatactaaccagcccttttttccattccaaggtactaccttctctgctacaagtcgagcgaggagccccgcatgagccctgacacctgtgccaccattttggaaaaagctggtctcgataactgggctcttggaaaaacaaaagtgttccttaagtattatcacgtggagcagttaaatctaatgcgaaaggaagctattgacaagcttattttgattcaagcttgtgtcagagcattcttgtgttcaagaagataccaaaaaatacaggagaaaaggaaagaaagcgctataataatacagtcagctgcaagaggacaccttgtcgggaaacaaagaaaagaaattgttgacatgaaaaacacagcagtaacaaccattcaaacttctgatcaggaattcgactacaagaaaaactttgaaaatacaagggaatctttcgtgaagaaacaagcagaaaatgcaatctctgctaatgaaagattcatttcagctccaaataataaaggaagtgtatctgtagtgaagacttccactttcaaacctgaagaggaaaccaccaatgctgtggagagtaacaacagagtgtatcagactccaaaaaaaatgaataatgtgtatgaggaagaggttaagcaagaattttaccttgtagggccagaagtaagccccaaacagaagtttgtcaaagacctggaagagaacagcaatctaaggaaagtggagaaagaggaagctatgatccagagttactatcagaggtacacagaggagaggaattgtgaagagtcaaaagcagcatatctagaaaggaaggccatatcagaaaggccaagctacccagtgccttggttagctgaaaatgagacttcctttaaaaaaactttggaacctacacttagccaaaggtcaatttatcaaaatgcaaacagcatggaaaaagaaaagaagacatctgtagttacccagagtgcaccgatatgcagccaggaggaaggcagaggccgtctgaggcatgagacagtcaaagagaggcaagttgaaccagtgacacaggcccaggaggaagaagataaagcagcggtattcattcagagcaaataccggggttacaagagaaggcagcagttgaggaaggacaagatgtcttcttttaagcatcagaagattgtcacaacaccaacagaagtagcaagaaacactcataatttgtattcctatcccacaaaacatgaggaaatcaataacatcaagaagaaggataacaaagactcgaaagcaacttcagaaagagaagcatgtggtttggcaattttttcaaaacagatatcaaagttatctgaagaatatttcattctgcagaaaaaattgaatgaaatgattttgtcacagcaactgaagtcactttatctgggtgtctcgcaccataagccaattaatagacgagtttcttctcagcagtgcctctcagaagtcaatccaagaagaaaaacgaagaccaaggaaagacagtcagggaaaattattagatttggaagatttctattataaggaatttttgcccagtcgttctggaccaaaggaacatagccctagtttaagagaacgaagaccacagcaagaactccagaatcaatgtattaaggctaatgaaaggtgctgggcggcggagagccccgagaaggaggaggagagagagccagcagccaacccctacgacttcaggaggctcctgcgcaaaacctcccagcgccggcgcctcgtccagcagtcctaaccgttcaacgaggcagtcaccgccgtcggaaggcgctggagcctgcggggcagcaggggccaagcaggcactctggggctggcaccagcaggcactgaagctgcggccctgatctccgcagaggctgcctgctgcgctcggccctcaagtgcccgggccggccttcgtgctccgaaacaagagacctgggagccctcgggaaacctcccccgacgctctctctcggaactcccgcaccctcctttctcaccagcccgccagttgtggcaaccctgtccttgttcccctaatctatcactttgttctttttttttgtgactcctgtggactccactgcgcctgggatctcgccaacccctctctcatttggggtgactgaattcacagatttttttttttattggaaacggcttttcttggccaacagaacacttgctagcggttgaatcttagagaaaaaagcccgggaggggtggggagaatttcgaagatgtatttcatctcaagcttgctctttctcttcctttggttattaaggtcactaaataaaggaagtgccttggaaaacccgtgg

SEQ ID NO: 300740 - DNA, 5218 bp, Homo sapiens
cttaattctagaagggagcgcccgtagccagcgcccccgtaaagaaataaggaggcgcccggcttcccgcccaggcccagggccccagtgcagcctggacacagtattcaaagttttggcgtctgagcattgttatgcgttattttcaagctttgctaacggtttttaaacctttgagatgtttccattaattggaaaaacaatcatctttgataactttcctgatccttctgatacatgggaaatcactgagacaattggcaaaggaacttatgggaaagtttttaaagtattgaataagaaaaatggccaaaaagcagcagtcaaaattcttgatccaattcacgatattgacgaagagattgaagcagaatataacatcttaaaagcactttctgaccaccctaatgtggtcagattctatgggatatactttaagaaggataaagtaaatggagacaagctgtggttggttcttgagctctgcagtggaggatcagtgactgaccttgtgaaaggatttctgaagaggggtgaaagaatgagtgagcctctaattgcctatattttacatgaagcactaatgggacttcaacatttgcataacaacaaaactatccacagagatgtgaaaggcaataacattctattgaccacggaaggtggagtgaaactagtagattttggtgtgtctgcacagctcaccagtacccggcaccgtcggaacacatccgtaggaacaccgttttggatggctcctgaggtgattgcatgtgaacagcaattggataccacttatgacgccagatgtgacacttggtccctgggtatcacggccattgagctgggtgatggagatcctccactagctgaccttcatcccatgagagcactcttcaaaataccaaggaatccacccccaaaactaaggcagcctgagctatggtcagcagaattcaatgacttcataagcaagtgcttgactaaagattatgaaaagcgtccaacagtgtcagaacttttacagcataaattcattactcaaattgagggcaaagatgtgatgctacaaaaacaactaacggaattcattggcatccatcaatgcatgggaggcacagaaaaggccagacgtgaacgtattcacacgaagaaagggaacttcaaccgacctctaatatccaatctgaaggatgtagatgatttagcaaccctagaaattttggatgagaatacagtctcagagcaacttgagaagtgttattccagagatcagatctacgtctatgtgggagacatactcattgctcttaacccttttcagagtctgggtctttactccacaaagcattccaaactatatattggatcaaagagaactgccagtcctcctcacatttttgcaatggctgacttaggatatcaatctataataacatataattcagatcagtgcattgttatttctggagaaagtggtgctggaaagactgaaaatgctcatcttttagttcagcagctgacagtgcttggaaaggctaataacagaaccttgcaagagaagattttacaagtgaacaatttggtagaagcctttggcaatgcctgcactattataaatgacaattctagcagatttggaaaatacttagaaatgaaattcacctcttctggagcggtagtgggagcacagatttctgaatatctcctggaaaaatcccgagttatccaccaagctattggagaaaaaaattttcatattttttactacatttatgctggtttggctgaaaagaagaaactagcccattacaaactgcctgaaaataagcctcccaggtacctacaaaatgaccacctcagaacagtacaagacatcatgaataatagtttctataaatcccagtatgaattaattgagcaatgtttcaaagtcataggttttacaatggagcaacttggtagtatatacagcatactcgctgcaatcttgaatgttggcaacattgaattttcttctgtggcaactgaacaccagattgacaagagccacatttctaatcatacagccctggagaactgtgtttctttgctttgcattcgggcagatgagctacaagaagctctcacctcccactgtgtggtcactagaggagaaacaattatacgacccaatactgtagaaaaagctaccgatgtcagggatgccatggctaaaactttatatggacgtctctttagttggatagtcaattgcattaacagtttgttgaagcatgactcatcaccaagtgggaatggtgatgagctgagcattggcattcttgatatatttggttttgaaaatttcaaaaaaaattccttcgagcagctgtgcattaacattgcaaatgaacaaattcagtattattataatcaacatgtgtttgcatgggaacagaatgaatacctaaatgaagatgtggatgctagagttattgaatatgaggataactggcccctcttagatatgtttctgcaaaagccaatgggtttactttccctacttgatgaagaaagtagatttcccaaggccactgaccagactcttgtagaaaaatttgaaggtaacctgaaatcacaatacttctggagacccaaaagaatggaacttagttttggaattcaccattatgcaggaaaggtcctctataatgcaagtggattcttagccaaaaacaagacactagttcctactgacattgtgctacttttgaggtcatccgacaacagtgtaattaggcaactagtcaaccaccctctgaccaaaacaggtaatctgccacattctaaactaaaaatgttaaactatcaaatgaggacttcagaaaaattaatcaacctggcaaagggcgacactggagaagccacacgtcatgccagagagacaaccaacatgaaaacacaaacggttgcatcatattttagatattccctgatggatttgttgtctaaaatggtggtgggccaacctcattttgtccgttgcatcaaaccaaatagtgagcgtcaggcaagaaaatatgacaaagagaaagttctgctacagcttcggtacacaggaattctggaaacagcaagaattcgaagactaggattctcccatcggatactttttgctaactttataaagcggtactaccttctctgctacaagtcgagcgaggagccccgcatgagccctgacacctgtgccaccattttggaaaaagctggtctcgataactgggctcttggaaaaacaaaagtgttccttaagtattatcacgtggagcagttaaatctaatgcgaaaggaagctattgacaagcttattttgattcaagcttgtgtcagagcattcttgtgttcaagaagataccaaaaaatacaggagaaaaggaaagaaagcgctataataatacagtcagctgcaagaggacaccttgtcgggaaacaaagaaaagaaattgttgacatgaaaaacacagcagtaacaaccattcaaacttctgatcaggaattcgactacaagaaaaactttgaaaatacaagggaatctttcgtgaagaaacaagcagaaaatgcaatctctgctaatgaaagattcatttcagctccaaataataaaggaagtgtatctgtagtgaagacttccactttcaaacctgaagaggaaaccaccaatgctgtggagagtaacaacagagtgtatcagactccaaaaaaaatgaataatgtgtatgaggaagaggttaagcaagaattttaccttgtagggccagaagtaagccccaaacagaagtttgtcaaagacctggaagagaacagcaatctaaggaaagtggagaaagaggaagctatgatccagagttactatcagaggtacacagaggagaggaattgtgaagagtcaaaagcagcatatctagaaaggaaggccatatcagaaaggccaagctacccagtgccttggttagctgaaaatgagacttcctttaaaaaaactttggaacctacacttagccaaaggtcaatttatcaaaatgcaaacagcatggaaaaagaaaagaagacatctgtagttacccagagtgcaccgatatgcagccaggaggaaggcagaggccgtctgaggcatgagacagtcaaagagaggcaagttgaaccagtgacacaggcccaggaggaagaagataaagcagcggtattcattcagagcaaataccggggttacaagagaaggcagcagttgaggaaggacaagatgtcttcttttaagcatcagaagattgtcacaacaccaacagaagtagcaagaaacactcataatttgtattcctatcccacaaaacatgaggaaatcaataacatcaagaagaaggataacaaagactcgaaagcaacttcagaaagagaagcatgtggtttggcaattttttcaaaacagatatcaaagttatctgaagaatatttcattctgcagaaaaaattgaatgaaatgattttgtcacagcaactgaagtcactttatctgggtgtctcgcaccataagccaattaatagacgagtttcttctcagcagtgcctctcagaagtcaatccaagaagaaaaacgaagaccaaggaaagacagtcagggaaaattattagatttggaagatttctattataaggaatttttgcccagtcgttctggaccaaaggaacatagccctagtttaagagaacgaagaccacagcaagaactccagaatcaatgtattaaggctaatgaaagaatccatctaaactatgatatttgccctttgcctccaaaagaagatgtgctcttccatcttgggatccagcactgtaacatgttggagcttagagatgttctagtctaatctcagagctctgtacagaagaacaccaaatgccagaaagattaagtgatttgcccaagatcacacactgagttagtgaactaaaatcccagatgttcactccctgcccatttgcttttcactgacttacctgcttcccattttaaaagctcaccctgccccttctccaatgtatccttccccttccccccactggcagatacacatctgctatgaaagcgttctattcctgaaatactcctgatgtagattaagtgatgtctatgggtgttatttagtatccactgcaataaatgctagcagctagtatt

SEQ ID NO: 300741 - DNA, 1429 bp, Homo sapiens
cttaattctagaagggagcgcccgtagccagcgcccccgtaaagaaataaggaggcgcccggcttcccgcccaggcccagggccccagtgcagcctggacacagtattcaaagttttggcgtctgagcattgttatgcgttattttcaagctttgctaacggtttttaaacctttgagatgtttccattaattggaaaaacaatcatctttgataactttcctgatccttctgatacatgggaaatcactgagacaattggcaaaggaacttatgggaaagtttttaaagtattgaataagaaaaatggccaaaaagcagcagtcaaaattcttgatccaattcacgatattgacgaagagattgaagcagaatataacatcttaaaagcactttctgaccaccctaatgtggtcagattctatgggatatactttaagaaggataaagtaaatggagacaagctgtggttggttcttgagctctgcagtggaggatcagtgactgaccttgtgaaaggatttctgaagaggggtgaaagaatgagtgagcctctaattgcctatattttacatgaagcactaatgggacttcaacatttgcataacaacaaaactatccacagagatgtgaaaggcaataacattctattgaccacggaaggtggagtgaaactagtagattttggtgtgtctgcacagctcaccagtacccggcaccgtcggaacacatccgtaggaacaccgttttggatggctcctgaggtgattgcatgtgaacagcaattggataccacttatgacgccagatgtgacacttggtccctgggtatcacggccattgagctgggtgatggagatcctccactagctgaccttcatcccatgagagcactcttcaaaataccaaggtcagatgactaacattgggtccagtatctgcagcccgatttacttcctccagccaccaagtgttcatcatgctcttcatggagacgttcagatatattccaacaagttgggagcagaagatcctggaatattattctgcttcttctgagacattgtatttgttcagtagttgcatttccctggtctaagtaaaagagctttctcttgataatcagtgtgtctttctctcttttgctaggatttgatttcagaaaatagcagttcctcccaccctttatccattccccaatgagtcagtgaggcatcagagtccatagcctgtgcaagtgttttgctttgctttacctaccaatctagtaattttttactacttgctaagatttccctttgttcagaactttaaaataatattattaagaaaattatatataaaatttatccagaaaataatggttttaaacatgttagtattttgaatatgttaatataaaacaataaatttagaagaataacctcttt

SEQ ID NO: 300742 - DNA, 1833 bp, Homo sapiens
cacctaggccaaccccacaccatgagaatctcctaaacactactttctctgagggctgcctggctggttccttgaatgcctccagtgagctatgggctccctacatcccaaggacatctgggaccagtctcttcagaaagccatgacccaaaggacttggacaaacagttcacagaagataaaatacaatttgttaacaaacataggtcaaagtgttcacccatcattagtaattaaagcaatgcaagttaaagtaatgcaaaagtactttataacagagacaaactagccatatcttaattaagtggtcatacattgctgaacattgtaaaatgctgtaagcttactgaaattattcaacatccatacaaagatccatagcctttctttcaagagacttaaccaaaggaaattcattcattcattcaccaatccatccttccgcctatccttccaccctcttatccatcagccaaacactcactcactcgttccttcctccattcttccatccactcattcatcatttatttatagtctacaacatgttgggcatcagagatacaaaggccaattcaataagctccttgcccttatggggctcacagtctagcaggggaaactgatctgtagtgaagcaatgataatttctgggtggaagaacataattcttaagaatgaaaaaaagggtgttttaagcagttagttgtggcattattcataatatttttaaaaggtggttatacataagaataacagaatggttctgtgaatgacgccatagccactcaacaaggcacaacgcagcaagtgaggttatgaagattcatggaacaagggaaaatgttgatgacagaaaattaaatagaagaggcaggatacaaaaaaaaaaaagtatatgtggtgaataatggcaattaggtttttttaaagaagggatgctcattaaagaatagacactctttttttaaaaaaagtatgcctgtaagaatgtaaaatgggtgacatgtcagaatgttgagtggtgcatgcatttcccactgctctaggtcaagtgccatccacaccatttatattaggaacacaacgggacacagcaggattcgtggcctgtctatcccagaggtcctgaggccaagcttcccaaggagggagttgggagtcacaagaggaggccaaggagagttgtagctcctggtgtcaccaggaaaggatttgtgtgtggggagcatgcaaatgacaatgtcaagagacagaattaattctcattgttaaaagtttaacgaacacataaagataggccctgaccagacaggagcactaggatcccaactcggaccttgtgggtctggtacagaaagaaccgggtagggagcacgtgaaggatgttttatctctggcttttgtgccattaggaaccctatcccgaatctcagcatcccagaactaaagaacctttgaattacagatacaaaactcttaagggtcaaaaccctaagagccctgatcccccctcatggcctccacatttccaaaaggacacacagaattcatccaacccaaacccacccagcctccagggcaccagtgggtctccccagagctgctctcattggctcagttcgacccactgtgacccgtcaggacagcccctagatgttgggagcaggctctcctagcagccaacgtcgcttgttccttccaatttcctcttggtgcatgcaatgggccctcccttccccgccttctgcacactttaagtcttcctgagcctctgctgactttttttaacagccgtacatgagttcttttgaaagaccctcccggtcttct

SEQ ID NO: 300743 - DNA, 2619 bp, Homo sapiens
gacagccaaatggtgcgacaggaggagctgcagccgcggccgcagcgcccgcacggagaggcttgaggcggctcctggcgtcgcccagagggagcgactagacgaacagtccggtgagggcggcgagaggaagcccgctacgagtgccctagctccccgccgctctcgatgaaccggacggaataagccgcgcctccagcaggggctgcgcctccatgaatccctagttgtttttttttttttctttctctcccctctcctcacccccaccccgagccccgtcccgccttctcccttcgccagaggcggccgcgtccaggtgcggagtccataccggagcgcaatggcgtccaaccccgaacggggggagattctgctcacggaactgcagggggattcccgaagtcttccgttttctgagaatgtgagtgctgttcaaaaattagacttttcagatacaatggtgcagcagaaattggatgatatcaaggatcgaattaagagagaaataaggaaagaactgaaaatcaaagaaggagctgaaaatctgaggaaagtcacaacagataaaaaaagtttggcttatgtagacaacattttgaaaaaatcaaataaaaaattagaagaactacatcacaagctgcaggaattaaatgcacatattgttgtatcagatccagaagatattacagattgcccaaggactccagatactccaaataatgaccctcgttgttctactagcaacaatagattgaaggccctacaaaaacaattggatatagaacttaaagtaaaacaaggtgcagagaatatgatacagatgtattcaaatggatcttcaaaggatcggaaactccatggtacagctcagcaactgctccaggacagcaagacaaaaatagaagtcatacgaatgcagattcttcaggcagtccagactaatgaattggcttttgataatgcaaaacctgtgataagtcctcttgaacttcggatggaagaattaaggcatcattttaggatagagtttgcagtagcagaaggtgcaaagaatgtaatgaaattacttggctcaggaaaagtaacagacagaaaagcactttcagaagctcaagcaagatttaatgaatcaagtcagaagttggaccttttaaagtattcattagagcaaagattaaacgaagtccccaagaatcatcccaaaagcaggattattattgaagaactttcacttgttgctgcatcaccaacactaagtccacgtcaaagtatgatatctacgcaaaatcaatatagtacactatccaaaccagcagcactaacaggtactttggaagttcgtcttatgggctgccaagatatcctagagaatgtccctggacggtcaaaagcaacatcagttgcactgcctggttggagtccaagtgaaaccagatcatctttcatgagcagaacgagtaaaagtaaaagcggaagtagtcgaaatcttctaaaaaccgatgacttgtccaatgatgtctgtgctgttttgaagctcgataatactgtggttggccaaactagctggaaacccatttccaatcagtcatgggaccagaagtttacactggaactggacaggtcacgtgaactggaaatttcagtttattggcgtgattggcggtctctgtgtgctgtaaaatttctgaggttagaagattttttagacaaccaacggcatggcatgtgtctctatttggaaccacagggtactttatttgcagaggttaccttttttaatccagttattgaaagaagaccaaaacttcaaagacaaaagaaaattttttcaaagcaacaaggcaaaacatttctcagagctcctcaaatgaatattaatattgccacttggggaaggctagtaagaagagctattcctacagtaaatcattctggcaccttcagccctcaagctcctgtgcctactacagtgccagtggttgatgtacgcatccctcaactagcacctccagctaggtatgtgtctgagattttaagcatctcttatacaaagttattgggacattcttacgtactgattatagcaggtgtactgagtcttgcttttttcccaagtagtattttgaaagtagtgttctgtttacttaaaaagtaaattgtttgctttaattttaaagctgtttaaaatacagactttctattactgttttggtgagttactttatcttctataagtgattctacagtaaccaaattggactttgatcttgagcctgaacctcctccagccccaccacgagcttcttctcttggagaaatagatgaatcttctgaattaagagttttggatataccaggacaggcaagccattttaaaccttgcataattcctcttcactgaatgaattagcaataaaagcatcatagtgaataaggcgtgtctttccatttaaaattgccactgaactgtgaatttatggttttttgtttgttttttgtttttgtttttgttttttgagacggagtctcgctttgtcgcccagactggagtgctgtggcgcgatctcggcttactgcaacctctgcctccagggttcaagcgattctcctgcctcc

SEQ ID NO: 300744 - DNA, 5652 bp, Homo sapiens
gacagccaaatggtgcgacaggaggagctgcagccgcggccgcagcgcccgcacggagaggcttgaggcggctcctggcgtcgcccagagggagcgactagacgaacagtccggtgagggcggcgagaggaagcccgctacgagtgccctagctccccgccgctctcgatgaaccggacggaataagccgcgcctccagcaggggctgcgcctccatgaatccctagttgtttttttttttttctttctctcccctctcctcacccccaccccgagccccgtcccgccttctcccttcgccagaggcggccgcgtccaggtgcggagtccataccggagcgcaatggcgtccaaccccgaacggggggagattctgctcacggaactgcagggggattcccgaagtcttccgttttctgagaatgtgagtgctgttcaaaaattagacttttcagatacaatggtgcagcagaaattggatgatatcaaggatcgaattaagagagaaataaggaaagaactgaaaatcaaagaaggagctgaaaatctgaggaaagtcacaacagataaaaaaagtttggcttatgtagacaacattttgaaaaaatcaaataaaaaattagaagaactacatcacaagctgcaggaattaaatgcacatattgttgtatcagatccagaagatattacagattgcccaaggactccagatactccaaataatgaccctcgttgttctactagcaacaatagattgaaggccctacaaaaacaattggatatagaacttaaagtaaaacaaggtgcagagaatatgatacagatgtattcaaatggatcttcaaaggatcggaaactccatggtacagctcagcaactgctccaggacagcaagacaaaaatagaagtcatacgaatgcagattcttcaggcagtccagactaatgaattggcttttgataatgcaaaacctgtgataagtcctcttgaacttcggatggaagaattaaggcatcattttaggatagagtttgcagtagcagaaggtgcaaagaatgtaatgaaattacttggctcaggaaaagtaacagacagaaaagcactttcagaagctcaagcaagatttaatgaatcaagtcagaagttggaccttttaaagtattcattagagcaaagattaaacgaagtccccaagaatcatcccaaaagcaggattattattgaagaactttcacttgttgctgcatcaccaacactaagtccacgtcaaagtatgatatctacgcaaaatcaatatagtacactatccaaaccagcagcactaacaggtactttggaagttcgtcttatgggctgccaagatatcctagagaatgtccctggacggtcaaaagcaacatcagttgcactgcctggttggagtccaagtgaaaccagatcatctttcatgagcagaacgagtaaaagtaaaagcggaagtagtcgaaatcttctaaaaaccgatgacttgtccaatgatgtctgtgctgttttgaagctcgataatactgtggttggccaaactagctggaaacccatttccaatcagtcatgggaccagaagtttacactggaactggacaggtcacgtgaactggaaatttcagtttattggcgtgattggcggtctctgtgtgctgtaaaatttctgaggttagaagattttttagacaaccaacggcatggcatgtgtctctatttggaaccacagggtactttatttgcagaggttaccttttttaatccagttattgaaagaagaccaaaacttcaaagacaaaagaaaattttttcaaagcaacaaggcaaaacatttctcagagctcctcaaatgaatattaatattgccacttggggaaggctagtaagaagagctattcctacagtaaatcattctggcaccttcagccctcaagctcctgtgcctactacagtgccagtggttgatgtacgcatccctcaactagcacctccagctagtgattctacagtaaccaaattggactttgatcttgagcctgaacctcctccagccccaccacgagcttcttctcttggagaaatagatgaatcttctgaattaagagttttggatataccaggacaggattcagagactgtttttgatattcagaatgacagaaatagtatacttccaaaatctcaatctgaatacaagcctgatactcctcagtcaggcctagaatatagtggtattcaagaacttgaggacagaagatctcagcaaaggtttcagtttaatctacaagatttcaggtgttgtgctgtcttgggaagaggacattttggaaaggtgcttttagctgaatataaaaacacaaatgagatgtttgctataaaagccttaaagaaaggagatattgtggctcgagatgaagtagacagcctgatgtgtgaaaaaagaatttttgaaactgtgaatagtgtaaggcatccctttttggtgaacctttttgcatgtttccaaaccaaagagcatgtttgctttgtaatggaatatgctgccggtggggacctaatgatgcacattcatactgatgtcttttctgaaccaagagctgtattttatgctgcttgtgtagttcttgggttgcagtatttacatgaacacaaaattgtttatagagatttgaaattggataacttattgctagatacagagggctttgtgaaaattgctgattttggtctttgcaaagaaggaatgggatatggagatagaacaagcacattttgtggcactcctgaatttcttgccccagaagtattaacagaaacttcttatacaagggctgtagattggtggggccttggcgtgcttatatatgaaatgcttgttggtgagtctccctttcctggtgatgatgaagaggaagtttttgacagtattgtaaatgatgaagtaaggtatccaaggttcttatctacagaagccatttctataatgagaaggctgttaagaagaaatcctgaacggcgccttggggctagcgagaaagatgcagaggatgtaaaaagcacccatttttccggctaattgattggagcgctctgatggacaaaaaagtaaagccaccatttatacctaccataagaggacgagaagatgttagtaattttgatgatgaatttacctcagaagcacctattctgactccacctcgagaaccaaggatactttcggaagaggagcaggaaatgttcagagattttgactacattgctgattggtgttaagttgctagacactgcgaaaccaagctgactcacaagaagacctcttaaaaatagcaacccttcatttgctctctgtgccaccaatagcttctgagttttttgttgttgttgtttttattgaaacacgtgaagatttgtttaaaagtaccattctaatacttcttcaaaagtggctcctcattgtacttcagcgtaaatatgagcactggaaacagtttcatggagtttaagttgagtgaacatcggccatgaaaatccatcacgaatacttttggatcaatagtctatttttaaaaagaaagaaaaaaaccacttttttatagtccctagctttgccatatgcccgccttaagtggaaggaaagttaatcacttaactatgttttataaaaagaaaaaagggcttggaatgctattactgttcacacaaagtatgattctgtttgaataaggcaaatgctcctttttttaaaaaaaaagacattactgtaatatcaaaaaccgtggcagtttgtatacaactcggggcttgattttttttaaaaaaacagaatgaattgatgtcttattttataaatgttctatatttattaggagaaaactttatattgccttttttatcaatcatgtaacaggcttatagctttccaacagagctgcttgccaaacaattttttttgtttattaaacagtgctgaaacaaacaggatcagcatttacttaagatgttaagaatgaggacttttaatcagccgaaccaagatattgttacctgtatgcattcccaaagtctagatgctcagtatgttcagtcatatctttcagaatcagtgaaccgattaccctttttttggtattcactctacatctgccaacctagttcaccttggttttgtgtctgctgtagaagggaaccataacttggttaaaccgtagggattatcattgtatacatgctgtgaacatgtatatgtgcaagttttaatgtattctatgttgtaggcttattatttaattttaccacttcatcacttttgtacagtggccaagcagacacctcaaactccagcatttacattaagtgcatttgtacattttaggccactggatccagattttatattggcagttattgagggcaaaagcaatatattgtaacagaatgtataaatatttttgataaaacagtctatattttattaaaaaatgaattataacactaaagctgtacctcaaaagtctcaaaaataatttgatgaaatattttatacaactcttcaaaggatccgtctgtggctttttatactcttttagggttgtctttttacaaaccatgactttccacttgcctgtagttttttgtttgtttggtttggtttgattttatatttttttctcctaatctatgactttattgttttttcttagtttagtaatagcatctttgatcctgtgcttagcatgttagggtcattatacctcaggaatagcaagctgttaagtaaccatactgaattaactatttaattacagtgagctcatctcttaaaaattgttcaggtgtaaatcttatgagaaacatgaaaaagcacactgatttatggagagttgagctaaaaacatttataaatatttgctgggatgttttagcatcttttcattgtactctgagaacaattaaaattgtccagagatcatttatattaccttccaaattgtttattacccaagatcctttgggagaaaatcttatagaatgggggaacaatatgtggtttaaagttattttaaaatgccagttaatttcctcggcaaaggacaatagaggaacttagcttaattgtctggctttaatttaaactgtgttaatacaacattaaaataaaacactaaatacttttgaggtacagtctgctcacttttttggttctcaaatagcaaagaaagtaatgtctaaaataggctcttagcattaaaaactgacagcattttgtaactacacagtgtacagaatttttttttaattgaagtcaatcactaaaaaaattagaaggcagggtctatttacacaattaagctgaagaaagcactaattttttgtagtttaaaatatatatatattttagtcagatttaaaattttaagctttatagagtgtaaatatattttgctattactgtatgtgtatgtgactgctcaagcactttgtaaagaaattaggatattttagaatggtacactatgcattcaaatgaaatgtgcctttcactatgtcattctaagaaaacaagtgttttttgcagtcataaattatcacaaatgcacaaattaaagtctatatagattgaaatttgta

SEQ ID NO: 300745 - DNA, 5770 bp, Homo sapiens
gacagccaaatggtgcgacaggaggagctgcagccgcggccgcagcgcccgcacggagaggcttgaggcggctcctggcgtcgcccagagggagcgactagacgaacagtccggtgagggcggcgagaggaagcccgctacgagtgccctagctccccgccgctctcgatgaaccggacggaataagccgcgcctccagcaggggctgcgcctccatgaatccctagttgtttttttttttttctttctctcccctctcctcacccccaccccgagccccgtcccgccttctcccttcgccagaggcggccgcgtccaggtgcggagtccataccggagcgcaatggcgtccaaccccgaacggggggagattctgctcacggaactgcagggggattcccgaagtcttccgttttctgagaatgtgagtgctgttcaaaaattagacttttcagatacaatggtgcagcagaaattggatgatatcaaggatcgaattaagagagaaataaggaaagaactgaaaatcaaagaaggagctgaaaatctgaggaaagtcacaacagataaaaaaagtttggcttatgtagacaacattttgaaaaaatcaaataaaaaattagaagaactacatcacaagctgcaggaattaaatgcacatattgttgtatcagatccagaagatattacagattgcccaaggactccagatactccaaataatgaccctcgttgttctactagcaacaatagattgaaggccctacaaaaacaattggatatagaacttaaagtaaaacaaggtgcagagaatatgatacagatgtattcaaatggatcttcaaaggatcggaaactccatggtacagctcagcaactgctccaggacagcaagacaaaaatagaagtcatacgaatgcagattcttcaggcagtccagactaatgaattggcttttgataatgcaaaacctgtgataagtcctcttgaacttcggatggaagaattaaggcatcattttaggatagagtttgcagtagcagaaggtgcaaagaatgtaatgaaattacttggctcaggaaaagtaacagacagaaaagcactttcagaagctcaagcaagatttaatgaatcaagtcagaagttggaccttttaaagtattcattagagcaaagattaaacgaagtccccaagaatcatcccaaaagcaggattattattgaagaactttcacttgttgctgcatcaccaacactaagtccacgtcaaagtatgatatctacgcaaaatcaatatagtacactatccaaaccagcagcactaacaggtactttggaagttcgtcttatgggctgccaagatatcctagagaatgtccctggacggtcaaaagcaacatcagttgcactgcctggttggagtccaagtgaaaccagatcatctttcatgagcagaacgagtaaaagtaaaagcggaagtagtcgaaatcttctaaaaaccgatgacttgtccaatgatgtctgtgctgttttgaagctcgataatactgtggttggccaaactagctggaaacccatttccaatcagtcatgggaccagaagtttacactggaactggacaggtcacgtgaactggaaatttcagtttattggcgtgattggcggtctctgtgtgctgtaaaatttctgaggttagaagattttttagacaaccaacggcatggcatgtgtctctatttggaaccacagggtactttatttgcagaggttaccttttttaatccagttattgaaagaagaccaaaacttcaaagacaaaagaaaattttttcaaagcaacaaggcaaaacatttctcagagctcctcaaatgaatattaatattgccacttggggaaggctagtaagaagagctattcctacagtaaatcattctggcaccttcagccctcaagctcctgtgcctactacagtgccagtggttgatgtacgcatccctcaactagcacctccagctagtgattctacagtaaccaaattggactttgatcttgagcctgaacctcctccagccccaccacgagcttcttctcttggagaaatagatgaatcttctgaattaagagttttggatataccaggacaggattcagagactgtttttgatattcagaatgacagaaatagtatacttccaaaatctcaatctgaatacaagcctgatactcctcagtcaggcctagaatatagtggtattcaagaacttgaggacagaagatctcagcaaaggtttcagtttaatctacaagatttcaggtgttgtgctgtcttgggaagaggacattttggaaaggtgcttttagctgaatataaaaacacaaatgagatgtttgctataaaagccttaaagaaaggagatattgtggctcgagatgaagtagacagcctgatgtgtgaaaaaagaatttttgaaactgtgaatagtgtaaggcatccctttttggtgaacctttttgcatgtttccaaaccaaagagcatgtttgctttgtaatggaatatgctgccggtggggacctaatgatgcacattcatactgatgtcttttctgaaccaagagctgtattttatgctgcttgtgtagttcttgggttgcagtatttacatgaacacaaaattgtttatagagatttgaaattggataacttattgctagatacagagggctttgtgaaaattgctgattttggtctttgcaaagaaggaatgggatatggagatagaacaagcacattttgtggcactcctgaatttcttgccccagaagtattaacagaaacttcttatacaagggctgtagattggtggggccttggcgtgcttatatatgaaatgcttgttggtgagtctccctttcctggtgatgatgaagaggaagtttttgacagtattgtaaatgatgaagtaaggtatccaaggttcttatctacagaagccatttctataatgagaaggctgttaagaagaaatcctgaacggcgccttggggctagcgagaaagatgcagaggatgtaaaaagcacccatttttccggctaattgattggagcgctctgatggacaaaaaagtaaagccaccatttatacctaccataagaggacgagaagatgttagtaattttgatgatgaatttacctcagaagcacctattctgactccacctcgagaaccaaggatactttcggaagaggagcaggaaatgttcagagattttgactacattgctgattggtgttaagttgctagacactgcgaaaccaagctgactcacaagaagacctcttaaaaatagcaacccttcatttgctctctgtgccaccaatagcttctgagttttttgttgttgttgtttttattgaaacacgtgaagatttgtttaaaagtaccattctaatacttcttcaaaagtggctcctcattgtacttcagcgtaaatatgagcactggaaacagtttcatggagtttaagttgagtgaacatcggccatgaaaatccatcacgaatacttttggatcaatagtctatttttaaaaagaaagaaaaaaaccacttttttatagtccctagctttgccatatgcccgccttaagtggaaggaaagttaatcacttaactatgttttataaaaagaaaaaagggcttggaatgctattactgttcacacaaagtatgattctgtttgaataaggcaaatgctcctttttttaaaaaaaaagacattactgtaatatcaaaaaccgtggcagtttgtatacaactcggggcttgattttttttaaaaaaacagaatgaattgatgtcttattttataaatgttctatatttattaggagaaaactttatattgccttttttatcaatcatgtaacaggcttatagctttccaacagagctgcttgccaaacaattttttttgtttattaaacagtgctgaaacaaacaggatcagcatttacttaagatgttaagaatgaggacttttaatcagccgaaccaagatattgttacctgtatgcattcccaaagtctagatgctcagtatgttcagtcatatctttcagaatcagtgaaccgattaccctttttttggtattcactctacatctgccaacctagttcaccttggttttgtgtctgctgtagaagggaaccataacttggttaaaccgtagggattatcattgtatacatgctgtgaacatgtatatgtgcaagttttaatgtattctatgttgtaggcttattatttaattttaccacttcatcacttttgtacagtggccaagcagacacctcaaactccagcatttacattaagtgcatttgtacattttaggccactggatccagattttatattggcagttattgagggcaaaagcaatatattgtaacagaatgtataaatatttttgataaaacagtctatattttattaaaaaatgaattataacactaaagctgtacctcaaaagtctcaaaaataatttgatgaaatattttatacaactcttcaaaggatccgtctgtggctttttatactcttttagggttgtctttttacaaaccatgactttccacttgcctgtagttttttgtttgtttggtttggtttgattttatatttttttctcctaatctatgactttattgttttttcttagtttagtaatagcatctttgatcctgtgcttagcatgttagggtcattatacctcaggaatagcaagctgttaagtaaccatactgaattaactatttaattacagtgagctcatctcttaaaaattgttcaggtgtaaatcttatgagaaacatgaaaaagcacactgatttatggagagttgagctaaaaacatttataaatatttgctgggatgttttagcatcttttcattgtactctgagaacaattaaaattgtccagagatcatttatattaccttccaaattgtttattacccaagatcctttgggagaaaatcttatagaatgggggaacaatatgtggtttaaagttattttaaaatgccagttaatttcctcggcaaaggacaatagaggaacttagcttaattgtctggctttaatttaaactgtgttaatacaacattaaaataaaacactaaatacttttgaggtacagtctgctcacttttttggttctcaaatagcaaagaaagtaatgtctaaaataggctcttagcattaaaaactgacagcattttgtaactacacagtgtacagaatttttttttaattgaagtcaatcactaaaaaaattagaaggcagggtctatttacacaattaagctgaagaaagcactaattttttgtagtttaaaatatatatatattttagtcagatttaaaattttaagctttatagagtgtaaatatattttgctattactgtatgtgtatgtgactgctcaagcactttgtaaagaaattaggatattttagaatggtacactatgcattcaaatgaaatgtgcctttcactatgtcattctaagaaaacaagtgttttttgcagtcataaattatcacaaatgcacaaattaaagtctatatagattgaaatttgtaactttggttttaagtattctttccttttagaaacttcctaatgattaaaatatactttaacttttctgtgttcaaaatctcaaagactaattaactttaataaacattcttgcaagta

SEQ ID NO: 300746 - DNA, 6588 bp, Homo sapiens
gacagccaaatggtgcgacaggaggagctgcagccgcggccgcagcgcccgcacggagaggcttgaggcggctcctggcgtcgcccagagggagcgactagacgaacagtccggtgagggcggcgagaggaagcccgctacgagtgccctagctccccgccgctctcgatgaaccggacggaataagccgcgcctccagcaggggctgcgcctccatgaatccctagttgtttttttttttttctttctctcccctctcctcacccccaccccgagccccgtcccgccttctcccttcgccagaggcggccgcgtccaggtgcggagtccataccggagcgcaatggcgtccaaccccgaacggggggagattctgctcacggaactgcagggggattcccgaagtcttccgttttctgagaatgtgagtgctgttcaaaaattagacttttcagatacaatggtgcagcagaaattggatgatatcaaggatcgaattaagagagaaataaggaaagaactgaaaatcaaagaaggagctgaaaatctgaggaaagtcacaacagataaaaaaagtttggcttatgtagacaacattttgaaaaaatcaaataaaaaattagaagaactacatcacaagctgcaggaattaaatgcacatattgttgtatcagatccagaagatattacagattgcccaaggactccagatactccaaataatgaccctcgttgttctactagcaacaatagattgaaggccctacaaaaacaattggatatagaacttaaagtaaaacaaggtgcagagaatatgatacagatgtattcaaatggatcttcaaaggatcggaaactccatggtacagctcagcaactgctccaggacagcaagacaaaaatagaagtcatacgaatgcagattcttcaggcagtccagactaatgaattggcttttgataatgcaaaacctgtgataagtcctcttgaacttcggatggaagaattaaggcatcattttaggatagagtttgcagtagcagaaggtgcaaagaatgtaatgaaattacttggctcaggaaaagtaacagacagaaaagcactttcagaagctcaagcaagatttaatgaatcaagtcagaagttggaccttttaaagtattcattagagcaaagattaaacgaagtccccaagaatcatcccaaaagcaggattattattgaagaactttcacttgttgctgcatcaccaacactaagtccacgtcaaagtatgatatctacgcaaaatcaatatagtacactatccaaaccagcagcactaacaggtactttggaagttcgtcttatgggctgccaagatatcctagagaatgtccctggacggtcaaaagcaacatcagttgcactgcctggttggagtccaagtgaaaccagatcatctttcatgagcagaacgagtaaaagtaaaagcggaagtagtcgaaatcttctaaaaaccgatgacttgtccaatgatgtctgtgctgttttgaagctcgataatactgtggttggccaaactagctggaaacccatttccaatcagtcatgggaccagaagtttacactggaactggacaggtcacgtgaactggaaatttcagtttattggcgtgattggcggtctctgtgtgctgtaaaatttctgaggttagaagattttttagacaaccaacggcatggcatgtgtctctatttggaaccacagggtactttatttgcagaggttaccttttttaatccagttattgaaagaagaccaaaacttcaaagacaaaagaaaattttttcaaagcaacaaggcaaaacatttctcagagctcctcaaatgaatattaatattgccacttggggaaggctagtaagaagagctattcctacagtaaatcattctggcaccttcagccctcaagctcctgtgcctactacagtgccagtggttgatgtacgcatccctcaactagcacctccagctagtgattctacagtaaccaaattggactttgatcttgagcctgaacctcctccagccccaccacgagcttcttctcttggagaaatagatgaatcttctgaattaagagttttggatataccaggacaggattcagagactgtttttgatattcagaatgacagaaatagtatacttccaaaatctcaatctgaatacaagcctgatactcctcagtcaggcctagaatatagtggtattcaagaacttgaggacagaagatctcagcaaaggtttcagtttaatctacaagatttcaggtgttgtgctgtcttgggaagaggacattttggaaaggtgcttttagctgaatataaaaacacaaatgagatgtttgctataaaagccttaaagaaaggagatattgtggctcgagatgaagtagacagcctgatgtgtgaaaaaagaatttttgaaactgtgaatagtgtaaggcatccctttttggtgaacctttttgcatgtttccaaaccaaagagcatgtttgctttgtaatggaatatgctgccggtggggacctaatgatgcacattcatactgatgtcttttctgaaccaagagctgtattttatgctgcttgtgtagttcttgggttgcagtatttacatgaacacaaaattgtttatagagatttgaaattggataacttattgctagatacagagggctttgtgaaaattgctgattttggtctttgcaaagaaggaatgggatatggagatagaacaagcacattttgtggcactcctgaatttcttgccccagaagtattaacagaaacttcttatacaagggctgtagattggtggggccttggcgtgcttatatatgaaatgcttgttggtgagtctccctttcctggtgatgatgaagaggaagtttttgacagtattgtaaatgatgaagtaaggtatccaaggttcttatctacagaagccatttctataatgagaaggctgttaagaagaaatcctgaacggcgccttggggctagcgagaaagatgcagaggatgtaaaaagcacccatttttccggctaattgattggagcgctctgatggacaaaaaagtaaagccaccatttatacctaccataagaggacgagaagatgttagtaattttgatgatgaatttacctcagaagcacctattctgactccacctcgagaaccaaggatactttcggaagaggagcaggaaatgttcagagattttgactacattgctgattggtgttaagttgctagacactgcgaaaccaagctgactcacaagaagacctcttaaaaatagcaacccttcatttgctctctgtgccaccaatagcttctgagttttttgttgttgttgtttttattgaaacacgtgaagatttgtttaaaagtaccattctaatacttcttcaaaagtggctcctcattgtacttcagcgtaaatatgagcactggaaacagtttcatggagtttaagttgagtgaacatcggccatgaaaatccatcacgaatacttttggatcaatagtctatttttaaaaagaaagaaaaaaaccacttttttatagtccctagctttgccatatgcccgccttaagtggaaggaaagttaatcacttaactatgttttataaaaagaaaaaagggcttggaatgctattactgttcacacaaagtatgattctgtttgaataaggcaaatgctcctttttttaaaaaaaaagacattactgtaatatcaaaaaccgtggcagtttgtatacaactcggggcttgattttttttaaaaaaacagaatgaattgatgtcttattttataaatgttctatatttattaggagaaaactttatattgccttttttatcaatcatgtaacaggcttatagctttccaacagagctgcttgccaaacaattttttttgtttattaaacagtgctgaaacaaacaggatcagcatttacttaagatgttaagaatgaggacttttaatcagccgaaccaagatattgttacctgtatgcattcccaaagtctagatgctcagtatgttcagtcatatctttcagaatcagtgaaccgattaccctttttttggtattcactctacatctgccaacctagttcaccttggttttgtgtctgctgtagaagggaaccataacttggttaaaccgtagggattatcattgtatacatgctgtgaacatgtatatgtgcaagttttaatgtattctatgttgtaggcttattatttaattttaccacttcatcacttttgtacagtggccaagcagacacctcaaactccagcatttacattaagtgcatttgtacattttaggccactggatccagattttatattggcagttattgagggcaaaagcaatatattgtaacagaatgtataaatatttttgataaaacagtctatattttattaaaaaatgaattataacactaaagctgtacctcaaaagtctcaaaaataatttgatgaaatattttatacaactcttcaaaggatccgtctgtggctttttatactcttttagggttgtctttttacaaaccatgactttccacttgcctgtagttttttgtttgtttggtttggtttgattttatatttttttctcctaatctatgactttattgttttttcttagtttagtaatagcatctttgatcctgtgcttagcatgttagggtcattatacctcaggaatagcaagctgttaagtaaccatactgaattaactatttaattacagtgagctcatctcttaaaaattgttcaggtgtaaatcttatgagaaacatgaaaaagcacactgatttatggagagttgagctaaaaacatttataaatatttgctgggatgttttagcatcttttcattgtactctgagaacaattaaaattgtccagagatcatttatattaccttccaaattgtttattacccaagatcctttgggagaaaatcttatagaatgggggaacaatatgtggtttaaagttattttaaaatgccagttaatttcctcggcaaaggacaatagaggaacttagcttaattgtctggctttaatttaaactgtgttaatacaacattaaaataaaacactaaatacttttgaggtacagtctgctcacttttttggttctcaaatagcaaagaaagtaatgtctaaaataggctcttagcattaaaaactgacagcattttgtaactacacagtgtacagaatttttttttaattgaagtcaatcactaaaaaaattagaaggcagggtctatttacacaattaagctgaagaaagcactaattttttgtagtttaaaatatatatatattttagtcagatttaaaattttaagctttatagagtgtaaatatattttgctattactgtatgtgtatgtgactgctcaagcactttgtaaagaaattaggatattttagaatggtacactatgcattcaaatgaaatgtgcctttcactatgtcattctaagaaaacaagtgttttttgcagtcataaattatcacaaatgcacaaattaaagtctatatagattgaaatttgtaactttggttttaagtattctttccttttagaaacttcctaatgattaaaatatactttaacttttctgtgttcaaaatctcaaagactaattaactttaataaacattcttgcaagtaaaaaaaaaaaaaaaaaaaaaaaaaaaaaaaaaaaaaaaaaaaaaaaaaaaaaagagggcgcgggaccccaaaagaaatccccacgaggggaccccaactctttagcgcgcgtcaccagattttctgtgaaacaaagaggggccccacaaaaggggcgccgctataacaaaagcaagacgagagggacaccgccataaaaacagccgcgggagagtgcggaaacaacctgcatgactgagaaacctaggggcaacaaaccaacacccacatcgggggggcggagaaaatatgctgcgggacaaaacccacaaggaaaaattacaacacaccacaccgagacaacatacacaaaagaacgcggtcatcacagaggggtacacaacaacagcaggactaaacaacgagcgacagaaaacaatctcgcgacccaaatgaacaaagactgccgactaagcatattataccacagggacagtgccaaaaaaaaacagacaaagcacaaccaatacacagcagcacacaaataacacgcaaaaaaataagacaaagagacagagagaataactacaaggaccaacacagaagcagaagaacaagacagagagacgcaggcggagacaaggagaagagctagacgaaacagacgcgaccagcgcggcagaagaaacacacacagaagaagaaacgtaccgagtagaaggaagacagcagaaaagggtaggcagcacggaagacaagacaagagagaaacacgaccaagaggagcacagacgacaggaacacagcagaaagcgcagaacccacaaacagtaatagaa

SEQ ID NO: 300747 - DNA, 5575 bp, Homo sapiens
  misc_feature (5551)..(5551): n is a, c, g, or t
gacagccaaatggtgcgacaggaggagctgcagccgcggccgcagcgcccgcacggagaggcttgaggcggctcctggcgtcgcccagagggagcgactagacgaacagtccggtgagggcggcgagaggaagcccgctacgagtgccctagctccccgccgctctcgatgaaccggacggaataagccgcgcctccagcaggggctgcgcctccatgaatccctagttgtttttttttttttctttctctcccctctcctcacccccaccccgagccccgtcccgccttctcccttcgccagaggcggccgcgtccaggtgcggagtccataccggagcgcaatggcgtccaaccccgaacggggggagattctgctcacggaactgcagggggattcccgaagtcttccgttttctgagaatgtgagtgctgttcaaaaattagacttttcagatacaatggtgcagcagaaattggatgatatcaaggatcgaattaagagagaaataaggaaagaactgaaaatcaaagaaggagctgaaaatctgaggaaagtcacaacagataaaaaaagtttggcttatgtagacaacattttgaaaaaatcaaataaaaaattagaagaactacatcacaagctgcaggaattaaatgcacatattgttgtatcagatccagaagatattacagattgcccaaggactccagatactccaaataatgaccctcgttgttctactagcaacaatagattgaaggccctacaaaaacaattggatatagaacttaaagtaaaacaaggtgcagagaatatgatacagatgtattcaaatggatcttcaaaggatcggaaactccatggtacagctcagcaactgctccaggacagcaagacaaaaatagaagtcatacgaatgcagattcttcaggcagtccagactaatgaattggcttttgataatgcaaaacctgtgataagtcctcttgaacttcggatggaagaattaaggcatcattttaggatagagtttgcagtagcagaaggtgcaaagaatgtaatgaaattacttggctcaggaaaagtaacagacagaaaagcactttcagaagctcaagcaagatttaatgaatcaagtcagaagttggaccttttaaagtattcattagagcaaagattaaacgaagtccccaagaatcatcccaaaagcaggattattattgaagaactttcacttgttgctgcatcaccaacactaagtccacgtcaaagtatgatatctacgcaaaatcaatatagtacactatccaaaccagcagcactaacaggtactttggaagttcgtcttatgggctgccaagatatcctagagaatgtccctggacggtcaaaagcaacatcagttgcactgcctggttggagtccaagtgaaaccagatcatctttcatgagcagaacgagtaaaagtaaaagcggaagtagtcgaaatcttctaaaaaccgatgacttgtccaatgatgtctgtgctgttttgaagctcgataatactgtggttggccaaactagctggaaacccatttccaatcagtcatgggaccagaagtttacactggaactggacaggtcacgtgaactggaaatttcagtttattggcgtgattggcggtctctgtgtgctgtaaaatttctgaggttagaagattttttagacaaccaacggcatggcatgtgtctctatttggaaccacagggtactttatttgcagaggttaccttttttaatccagttattgaaagaagaccaaaacttcaaagacaaaagaaaattttttcaaagcaacaaggcaaaacatttctcagagctcctcaaatgaatattaatattgccacttggggaaggctagtaagaagagctattcctacagtaaatcattctggcaccttcagccctcaagctcctgtgcctactacagtgccagtggttgatgtacgcatccctcaactagcacctccagctagtgattctacagtaaccaaattggactttgatcttgagcctgaacctcctccagccccaccacgagcttcttctcttggagaaatagatgaatcttctgaattaagagttttggatataccaggacaggattcagagactgtttttgatattcagaatgacagaaatagtatacttccaaaatctcaatctgaatacaagcctgatactcctcagtcaggcctagaatatagtggtattcaagaacttgaggacagaagatctcagcaaaggtttcagtttaatctacaagatttcaggtgttgtgctgtcttgggaagaggacattttggaaaggtgcttttagctgaatataaaaacacaaatgagatgtttgctataaaagccttaaagaaaggagatattgtggctcgagatgaagtagacagcctgatgtgtgaaaaaagaatttttgaaactgtgaatagtgtaaggcatccctttttggtgaacctttttgcatgtttccaaaccaaagagcatgtttgctttgtaatggaatatgctgccggtggggacctaatgatgcacattcatactgatgtcttttctgaaccaagagctgtattttatgctgcttgtgtagttcttgggttgcagtatttacatgaacacaaaattgtttatagagatttgaaattggataacttattgctagatacagagggctttgtgaaaattgctgattttggtctttgcaaagaaggaatgggatatggagatagaacaagcacattttgtggcactcctgaatttcttgccccagaagtattaacagaaacttcttatacaagggctgtagattggtggggccttggcgtgcttatatatgaaatgcttgttggtgagtctccctttcctggtgatgatgaagaggaagtttttgacagtattgtaaatgatgaagtaaggtatccaaggttcttatctacagaagccatttctataatgagaaggctgttaagaagaaatcctgaacggcgccttggggctagcgagaaagatgcagaggatgtaaaaagcacccatttttccggctaattgattggagcgctctgatggacaaaaaagtaaagccaccatttatacctaccataagaggacgagaagatgttagtaattttgatgatgaatttacctcagaagcacctattctgactccacctcgagaaccaaggatactttcggaagaggagcaggaaatgttcagagattttgactacattgctgattggtgttaagttgctagacactgcgaaaccaagctgactcacaagaagacctcttaaaaatagcaacccttcatttgctctctgtgccaccaatagcttctgagttttttgttgttgttgtttttattgaaacacgtgaagatttgtttaaaagtaccattctaatacttcttcaaaagtggctcctcattgtacttcagcgtaaatatgagcactggaaacagtttcatggagtttaagttgagtgaacatcggccatgaaaatccatcacgaatacttttggatcaatagtctatttttaaaaagaaagaaaaaaaccacttttttatagtccctagctttgccatatgcccgccttaagtggaaggaaagttaatcacttaactatgttttataaaaagaaaaaagggcttggaatgctattactgttcacacaaagtatgattctgtttgaataaggcaaatgctcctttttttaaaaaaaaagacattactgtaatatcaaaaaccgtggcagtttgtatacaactcggggcttgattttttttaaaaaaacagaatgaattgatgtcttattttataaatgttctatatttattaggagaaaactttatattgccttttttatcaatcatgtaacaggcttatagctttccaacagagctgcttgccaaacaattttttttgtttattaaacagtgctgaaacaaacaggatcagcatttacttaagatgttaagaatgaggacttttaatcagccgaaccaagatattgttacctgtatgcattcccaaagtctagatgctcagtatgttcagtcatatctttcagaatcagtgaaccgattaccctttttttggtattcactctacatctgccaacctagttcaccttggttttgtgtctgctgtagaagggaaccataacttggttaaaccgtagggattatcattgtatacatgctgtgaacatgtatatgtgcaagttttaatgtattctatgttgtaggcttattatttaattttaccacttcatcacttttgtacagtggccaagcagacacctcaaactccagcatttacattaagtgcatttgtacattttaggccactggatccagattttatattggcagttattgagggcaaaagcaatatattgtaacagaatgtataaatatttttgataaaacagtctatattttattaaaaaatgaattataacactaaagctgtacctcaaaagtctcaaaaataatttgatgaaatattttatacaactcttcaaaggatccgtctgtggctttttatactcttttagggttgtctttttacaaaccatgactttccacttgcctgtagttttttgtttgtttggtttggtttgattttatatttttttctcctaatctatgactttattgttttttcttagtttagtaatagcatctttgatcctgtgcttagcatgttagggtcattatacctcaggaatagcaagctgttaagtaaccatactgaattaactatttaattacagtgagctcatctcttaaaaattgttcaggtgtaaatcttatgagaaacatgaaaaagcacactgatttatggagagttgagctaaaaacatttataaatatttgctgggatgttttagcatcttttcattgtactctgagaacaattaaaattgtccagagatcatttatattaccttccaaattgtttattacccaagatcctttgggagaaaatcttatagaatgggggaacaatatgtggtttaaagttattttaaaatgccagttaatttcctcggcaaaggacaatagaggaacttagcttaattgtctggctttaatttaaactgtgttaatacaacattaaaataaaacactaaatacttttgaggtacagtctgctcacttttttggttctcaaatagcaaagaaagtaatgtctaaaataggctcttagcattaaaaactgacagcattttgtaactacacagtgtacagaatttttttttaattgaagtcaatcactaaaaaaattagaaggcagggtctatttacacaattaagctgaagaaagcactaattttttgtagtttaaaatatatatatattttagtcagatttaaaattttaagctttatagagtgtaaatatattttgctattactgtatgtgtatgtgactgctcaagcactttgtaaagaaattaggatattttagaatggtacactatgcattctatggntgtcgtggatcctctagaatcagc

SEQ ID NO: 300748 - DNA, 5716 bp, Homo sapiens
gacagccaaatggtgcgacaggaggagctgcagccgcggccgcagcgcccgcacggagaggcttgaggcggctcctggcgtcgcccagagggagcgactagacgaacagtccggtgagggcggcgagaggaagcccgctacgagtgccctagctccccgccgctctcgatgaaccggacggaataagccgcgcctccagcaggggctgcgcctccatgaatccctagttgtttttttttttttctttctctcccctctcctcacccccaccccgagccccgtcccgccttctcccttcgccagaggcggccgcgtccaggtgcggagtccataccggagcgcaatggcgtccaaccccgaacggggggagattctgctcacggaactgcagggggattcccgaagtcttccgttttctgagaatgtgagtgctgttcaaaaattagacttttcagatacaatggtgcagcagaaattggatgatatcaaggatcgaattaagagagaaataaggaaagaactgaaaatcaaagaaggagctgaaaatctgaggaaagtcacaacagataaaaaaagtttggcttatgtagacaacattttgaaaaaatcaaataaaaaattagaagaactacatcacaagctgcaggaattaaatgcacatattgttgtatcagatccagaagatattacagattgcccaaggactccagatactccaaataatgaccctcgttgttctactagcaacaatagattgaaggccctacaaaaacaattggatatagaacttaaagtaaaacaaggtgcagagaatatgatacagatgtattcaaatggatcttcaaaggatcggaaactccatggtacagctcagcaactgctccaggacagcaagacaaaaatagaagtcatacgaatgcagattcttcaggcagtccagactaatgaattggcttttgataatgcaaaacctgtgataagtcctcttgaacttcggatggaagaattaaggcatcattttaggatagagtttgcagtagcagaaggtgcaaagaatgtaatgaaattacttggctcaggaaaagtaacagacagaaaagcactttcagaagctcaagcaagatttaatgaatcaagtcagaagttggaccttttaaagtattcattagagcaaagattaaacgaagtccccaagaatcatcccaaaagcaggattattattgaagaactttcacttgttgctgcatcaccaacactaagtccacgtcaaagtatgatatctacgcaaaatcaatatagtacactatccaaaccagcagcactaacaggtactttggaagttcgtcttatgggctgccaagatatcctagagaatgtccctggacggtcaaaagcaacatcagttgcactgcctggttggagtccaagtgaaaccagatcatctttcatgagcagaacgagtaaaagtaaaagcggaagtagtcgaaatcttctaaaaaccgatgacttgtccaatgatgtctgtgctgttttgaagctcgataatactgtggttggccaaactagctggaaacccatttccaatcagtcatgggaccagaagtttacactggaactggacaggtcacgtgaactggaaatttcagtttattggcgtgattggcggtctctgtgtgctgtaaaatttctgaggttagaagattttttagacaaccaacggcatggcatgtgtctctatttggaaccacagggtactttatttgcagaggttaccttttttaatccagttattgaaagaagaccaaaacttcaaagacaaaagaaaattttttcaaagcaacaaggcaaaacatttctcagagctcctcaaatgaatattaatattgccacttggggaaggctagtaagaagagctattcctacagtaaatcattctggcaccttcagccctcaagctcctgtgcctactacagtgccagtggttgatgtacgcatccctcaactagcacctccagctagtgattctacagtaaccaaattggactttgatcttgagcctgaacctcctccagccccaccacgagcttcttctcttggagaaatagatgaatcttctgaattaagagttttggatataccaggacaggattcagagactgtttttgatattcagaatgacagaaatagtatacttccaaaatctcaatctgaatacaagcctgatactcctcagtcaggcctagaatatagtggtattcaagaacttgaggacagaagatctcagcaaaggtttcagtttaatctacaagatttcaggtgttgtgctgtcttgggaagaggacattttggaaaggtgcttttagctgaatataaaaacacaaatgagatgtttgctataaaagccttaaagaaaggagatattgtggctcgagatgaagtagacagcctgatgtgtgaaaaaagaatttttgaaactgtgaatagtgtaaggcatccctttttggtgaacctttttgcatgtttccaaaccaaagagcatgtttgctttgtaatggaatatgctgccggtggggacctaatgatgcacattcatactgatgtcttttctgaaccaagagctgtattttatgctgcttgtgtagttcttgggttgcagtatttacatgaacacaaaattgtttatagagatttgaaattggataacttattgctagatacagagggctttgtgaaaattgctgattttggtctttgcaaagaaggaatgggatatggagatagaacaagcacattttgtggcactcctgaatttcttgccccagaagtattaacagaaacttcttatacaagggctgtagattggtggggccttggcgtgcttatatatgaaatgcttgttggtgagtctccctttcctggtgatgatgaagaggaagtttttgacagtattgtaaatgatgaagtaaggtatccaaggttcttatctacagaagccatttctataatgagaaggctgttaagaagaaatcctgaacggcgccttggggctagcgagaaagatgcagaggatgtaaaaagcacccatttttccggctaattgattggagcgctctgatggacaaaaaagtaaagccaccatttatacctaccataagaggacgagaagatgttagtaattttgatgatgaatttacctcagaagcacctattctgactccacctcgagaaccaaggatactttcggaagaggagcaggaaatgttcagagattttgactacattgctgattggtgttaagttgctagacactgcgaaaccaagctgactcacaagaagacctcttaaaaatagcaacccttcatttgctctctgtgccaccaatagcttctgagttttttgttgttgttgtttttattgaaacacgtgaagatttgtttaaaagtaccattctaatacttcttcaaaagtggctcctcattgtacttcagcgtaaatatgagcactggaaacagtttcatggagtttaagttgagtgaacatcggccatgaaaatccatcacgaatacttttggatcaatagtctatttttaaaaagaaagaaaaaaaccacttttttatagtccctagctttgccatatgcccgccttaagtggaaggaaagttaatcacttaactatgttttataaaaagaaaaaagggcttggaatgctattactgttcacacaaagtatgattctgtttgaataaggcaaatgctcctttttttaaaaaaaaagacattactgtaatatcaaaaaccgtggcagtttgtatacaactcggggcttgattttttttaaaaaaacagaatgaattgatgtcttattttataaatgttctatatttattaggagaaaactttatattgccttttttatcaatcatgtaacaggcttatagctttccaacagagctgcttgccaaacaattttttttgtttattaaacagtgctgaaacaaacaggatcagcatttacttaagatgttaagaatgaggacttttaatcagccgaaccaagatattgttacctgtatgcattcccaaagtctagatgctcagtatgttcagtcatatctttcagaatcagtgaaccgattaccctttttttggtattcactctacatctgccaacctagttcaccttggttttgtgtctgctgtagaagggaaccataacttggttaaaccgtagggattatcattgtatacatgctgtgaacatgtatatgtgcaagttttaatgtattctatgttgtaggcttattatttaattttaccacttcatcacttttgtacagtggccaagcagacacctcaaactccagcatttacattaagtgcatttgtacattttaggccactggatccagattttatattggcagttattgagggcaaaagcaatatattgtaacagaatgtataaatatttttgataaaacagtctatattttattaaaaaatgaattataacactaaagctgtacctcaaaagtctcattttatactcttttagggttgtctttttacaaaccatgactttccacttgcctgtagttttttgtttgtttggtttggtttgattttatatttttttctcctaatctatgactttattgttttttcttagtttagtaatagcatctttgatcctgtgcttagcatgttagggtcattatacctcaggaatagcaagctgttaagtaaccatactgaattaactatttaattacagtgagctcatctcttaaaaattgttcaggtgtaaatcttatgagaaacatgaaaaagcacactgatttatggagagttgagctaaaaacatttataaatatttgctgggatgttttagcatcttttcattgtactctgagaacaattaaaattgtccagagatcatttatattaccttccaaattgtttattacccaagatcctttgggagaaaatcttatagaatgggggaacaatatgtggtttaaagttattttaaaatgccagttaatttcctcggcaaaggacaatagaggaacttagcttaattgtctggctttaatttaaactgtgttaatacaacattaaaataaaacactaaatacttttgaggtacagtctgctcacttttttggttctcaaatagcaaagaaagtaatgtctaaaataggctcttagcattaaaaactgacagcattttgtaactacacagtgtacagaatttttttttaattgaagtcaatcactaaaaaaattagaaggcagggtctatttacacaattaagctgaagaaagcactaattttttgtagtttaaaatatatatatattttagtcagatttaaaattttaagctttatagagtgtaaatatattttgctattactgtatgtgtatgtgactgctcaagcactttgtaaagaaattaggatattttagaatggtacactatgcattcaaatgaaatgtgcctttcactatgtcattctaagaaaacaagtgttttttgcagtcataaattatcacaaatgcacaaattaaagtctatatagattgaaatttgtaactttggttttaagtattctttccttttagaaacttcctaatgattaaaatatactttaacttttctgtgttcaaaatctcaaagactaattaactttaataaacattcttgcaagta

SEQ ID NO: 300749 - DNA, 5466 bp, Homo sapiens
gacagccaaatggtgcgacaggaggagctgcagccgcggccgcagcgcccgcacggagaggcttgaggcggctcctggcgtcgcccagagggagcgactagacgaacagtccggtgagggcggcgagaggaagcccgctacgagtgccctagctccccgccgctctcgatgaaccggacggaataagccgcgcctccagcaggggctgcgcctccatgaatccctagttgtttttttttttttctttctctcccctctcctcacccccaccccgagccccgtcccgccttctcccttcgccagaggcggccgcgtccaggtgcggagtccataccggagcgcaatggcgtccaaccccgaacggggggagattctgctcacggaactgcagggggattcccgaagtcttccgttttctgagaatgtgagtgctgttcaaaaattagacttttcagatacaatggtgcagcagaaattggatgatatcaaggatcgaattaagagagaaataaggaaagaactgaaaatcaaagaaggagctgaaaatctgaggaaagtcacaacagataaaaaaagtttggcttatgtagacaacattttgaaaaaatcaaataaaaaattagaagaactacatcacaagctgcaggaattaaatgcacatattgttgtatcagatccagaagatattacagattgcccaaggactccagatactccaaataatgaccctcgttgttctactagcaacaatagattgaaggccctacaaaaacaattggatatagaacttaaagtaaaacaaggtgcagagaatatgatacagatgtattcaaatggatcttcaaaggatcggaaactccatggtacagctcagcaactgctccaggacagcaagacaaaaatagaagtcatacgaatgcagattcttcaggcagtccagactaatgaattggcttttgataatgcaaaacctgtgataagtcctcttgaacttcggatggaagaattaaggcatcattttaggatagagtttgcagtagcagaaggtgcaaagaatgtaatgaaattacttggctcaggaaaagtaacagacagaaaagcactttcagaagctcaagcaagatttaatgaatcaagtcagaagttggaccttttaaagtattcattagagcaaagattaaacgaagtccccaagaatcatcccaaaagcaggattattattgaagaactttcacttgttgctgcatcaccaacactaagtccacgtcaaagtatgatatctacgcaaaatcaatatagtacactatccaaaccagcagcactaacagatgatgtctgtgctgttttgaagctcgataatactgtggttggccaaactagctggaaacccatttccaatcagtcatgggaccagaagtttacactggaactggacaggtcacgtgaactggaaatttcagtttattggcgtgattggcggtctctgtgtgctgtaaaatttctgaggttagaagattttttagacaaccaacggcatggcatgtgtctctatttggaaccacagggtactttatttgcagaggttaccttttttaatccagttattgaaagaagaccaaaacttcaaagacaaaagaaaattttttcaaagcaacaaggcaaaacatttctcagagctcctcaaatgaatattaatattgccacttggggaaggctagtaagaagagctattcctacagtaaatcattctggcaccttcagccctcaagctcctgtgcctactacagtgccagtggttgatgtacgcatccctcaactagcacctccagctagtgattctacagtaaccaaattggactttgatcttgagcctgaacctcctccagccccaccacgagcttcttctcttggagaaatagatgaatcttctgaattaagagttttggatataccaggacaggattcagagactgtttttgatattcagaatgacagaaatagtatacttccaaaatctcaatctgaatacaagcctgatactcctcagtcaggcctagaatatagtggtattcaagaacttgaggacagaagatctcagcaaaggtttcagtttaatctacaagatttcaggtgttgtgctgtcttgggaagaggacattttggaaaggtgcttttagctgaatataaaaacacaaatgagatgtttgctataaaagccttaaagaaaggagatattgtggctcgagatgaagtagacagcctgatgtgtgaaaaaagaatttttgaaactgtgaatagtgtaaggcatccctttttggtgaacctttttgcatgtttccaaaccaaagagcatgtttgctttgtaatggaatatgctgccggtggggacctaatgatgcacattcatactgatgtcttttctgaaccaagagctgtattttatgctgcttgtgtagttcttgggttgcagtatttacatgaacacaaaattgtttatagagatttgaaattggataacttattgctagatacagagggctttgtgaaaattgctgattttggtctttgcaaagaaggaatgggatatggagatagaacaagcacattttgtggcactcctgaatttcttgccccagaagtattaacagaaacttcttatacaagggctgtagattggtggggccttggcgtgcttatatatgaaatgcttgttggtgagtctccctttcctggtgatgatgaagaggaagtttttgacagtattgtaaatgatgaagtaaggtatccaaggttcttatctacagaagccatttctataatgagaaggctgttaagaagaaatcctgaacggcgccttggggctagcgagaaagatgcagaggatgtaaaaagcacccatttttccggctaattgattggagcgctctgatggacaaaaaagtaaagccaccatttatacctaccataagaggacgagaagatgttagtaattttgatgatgaatttacctcagaagcacctattctgactccacctcgagaaccaaggatactttcggaagaggagcaggaaatgttcagagattttgactacattgctgattggtgttaagttgctagacactgcgaaaccaagctgactcacaagaagacctcttaaaaatagcaacccttcatttgctctctgtgccaccaatagcttctgagttttttgttgttgttgtttttattgaaacacgtgaagatttgtttaaaagtaccattctaatacttcttcaaaagtggctcctcattgtacttcagcgtaaatatgagcactggaaacagtttcatggagtttaagttgagtgaacatcggccatgaaaatccatcacgaatacttttggatcaatagtctatttttaaaaagaaagaaaaaaaccacttttttatagtccctagctttgccatatgcccgccttaagtggaaggaaagttaatcacttaactatgttttataaaaagaaaaaagggcttggaatgctattactgttcacacaaagtatgattctgtttgaataaggcaaatgctcctttttttaaaaaaaaagacattactgtaatatcaaaaaccgtggcagtttgtatacaactcggggcttgattttttttaaaaaaacagaatgaattgatgtcttattttataaatgttctatatttattaggagaaaactttatattgccttttttatcaatcatgtaacaggcttatagctttccaacagagctgcttgccaaacaattttttttgtttattaaacagtgctgaaacaaacaggatcagcatttacttaagatgttaagaatgaggacttttaatcagccgaaccaagatattgttacctgtatgcattcccaaagtctagatgctcagtatgttcagtcatatctttcagaatcagtgaaccgattaccctttttttggtattcactctacatctgccaacctagttcaccttggttttgtgtctgctgtagaagggaaccataacttggttaaaccgtagggattatcattgtatacatgctgtgaacatgtatatgtgcaagttttaatgtattctatgttgtaggcttattatttaattttaccacttcatcacttttgtacagtggccaagcagacacctcaaactccagcatttacattaagtgcatttgtacattttaggccactggatccagattttatattggcagttattgagggcaaaagcaatatattgtaacagaatgtataaatatttttgataaaacagtctatattttattaaaaaatgaattataacactaaagctgtacctcaaaagtctcaaaaataatttgatgaaatattttatacaactcttcaaaggatccgtctgtggctttttatactcttttagggttgtctttttacaaaccatgactttccacttgcctgtagttttttgtttgtttggtttggtttgattttatatttttttctcctaatctatgactttattgttttttcttagtttagtaatagcatctttgatcctgtgcttagcatgttagggtcattatacctcaggaatagcaagctgttaagtaaccatactgaattaactatttaattacagtgagctcatctcttaaaaattgttcaggtgtaaatcttatgagaaacatgaaaaagcacactgatttatggagagttgagctaaaaacatttataaatatttgctgggatgttttagcatcttttcattgtactctgagaacaattaaaattgtccagagatcatttatattaccttccaaattgtttattacccaagatcctttgggagaaaatcttatagaatgggggaacaatatgtggtttaaagttattttaaaatgccagttaatttcctcggcaaaggacaatagaggaacttagcttaattgtctggctttaatttaaactgtgttaatacaacattaaaataaaacactaaatacttttgaggtacagtctgctcacttttttggttctcaaatagcaaagaaagtaatgtctaaaataggctcttagcattaaaaactgacagcattttgtaactacacagtgtacagaatttttttttaattgaagtcaatcactaaaaaaattagaaggcagggtctatttacacaattaagctgaagaaagcactaattttttgtagtttaaaatatatatatattttagtcagatttaaaattttaagctttatagagtgtaaatatattttgctattactgtatgtgtatgtgactgctcaagcactttgtaaagaaattaggatattttagaatggtacactatgcattcaaatgaaatgtgcctttcactatgtcattctaagaaaacaagtgttttttgcagtcataaattatcacaaatgcacaaattaaagtctatatagattgaaatttgta

SEQ ID NO: 300750 - DNA, 3905 bp, Homo sapiens
gacagccaaatggtgcgacaggaggagctgcagccgcggccgcagcgcccgcacggagaggcttgaggcggctcctggcgtcgcccagagggagcgactagacgaacagtccggtgagggcggcgagaggaagcccgctacgagtgccctagctccccgccgctctcgatgaaccggacggaataagccgcgcctccagcaggggctgcgcctccatgaatccctagttgtttttttttttttctttctctcccctctcctcacccccaccccgagccccgtcccgccttctcccttcgccagaggcggccgcgtccaggtgcggagtccataccggagcgcaatggcgtccaaccccgaacggggggagattctgctcacggaactgcagggggattcccgaagtcttccgttttctgagaatgtgagtgctgttcaaaaattagacttttcagatacaatggtgcagcagaaattggatgatatcaaggatcgaattaagagagaaataaggaaagaactgaaaatcaaagaaggagctgaaaatctgaggaaagtcacaacagataaaaaaagtttggcttatgtagacaacattttgaaaaaatcaaataaaaaattagaagaactacatcacaagctgcaggaattaaatgcacatattgttgtatcagatccagaagatattacagattgcccaaggactccagatactccaaataatgaccctcgttgttctactagcaacaatagattgaaggccctacaaaaacaattggatatagaacttaaagtaaaacaaggtgcagagaatatgatacagatgtattcaaatggatcttcaaaggatcggaaactccatggtacagctcagcaactgctccaggacagcaagacaaaaatagaagtcatacgaatgcagattcttcaggcagtccagactaatgaattggcttttgataatgcaaaacctgtgataagtcctcttgaacttcggatggaagaattaaggcatcattttaggatagagtttgcagtagcagaaggtgcaaagaatgtaatgaaattacttggctcaggaaaagtaacagacagaaaagcactttcagaagctcaagcaagatttaatgaatcaagtcagaagttggaccttttaaagtattcattagagcaaagattaaacgaagtccccaagaatcatcccaaaagcaggattattattgaagaactttcacttgttgctgcatcaccaacactaagtccacgtcaaagtatgatatctacgcaaaatcaatatagtacactatccaaaccagcagcactaacaggtactttggaagttcgtcttatgggctgccaagatatcctagagaatgtccctggacggtcaaaagcaacatcagttgcactgcctggttggagtccaagtgaaaccagatcatctttcatgagcagaacgagtaaaagtaaaagcggaagtagtcgaaatcttctaaaaaccgatgacttgtccaatgatgtctgtgctgttttgaagctcgataatactgtggttggccaaactagctggaaacccatttccaatcagtcatgggaccagaagtttacactggaactggacaggtcacgtgaactggaaatttcagtttattggcgtgattggcggtctctgtgtgctgtaaaatttctgaggttagaagattttttagacaaccaacggcatggcatgtgtctctatttggaaccacagggtactttatttgcagaggttaccttttttaatccagttattgaaagaagaccaaaacttcaaagacaaaagaaaattttttcaaagcaacaaggcaaaacatttctcagagctcctcaaatgaatattaatattgccacttggggaaggctagtaagaagagctattcctacagtaaatcattctggcaccttcagccctcaagctcctgtgcctactacagtgccagtggttgatgtacgcatccctcaactagcacctccagctagtgattctacagtaaccaaattggactttgatcttgagcctgaacctcctccagccccaccacgagcttcttctcttggagaaatagatgaatcttctgaattaagagttttggatataccaggacaggattcagagactgtttttgatattcagaatgacagaaatagtatacttccaaaatctcaatctgaatacaagcctgatactcctcagtcaggcctagaatatagtggtattcaagaacttgaggacagaagatctcagcaaaggtttcagtttaatctacaagatttcaggtgttgtgctgtcttgggaagaggacattttggaaaggtgcttttagctgaatataaaaacacaaatgagatgtttgctataaaagccttaaagaaaggagatattgtggctcgagatgaagtagacagcctgatgtgtgaaaaaagaatttttgaaactgtgaatagtgtaaggcatccctttttggtgaacctttttgcatgtttccaaaccaaagagcatgtttgctttgtaatggaatatgctgccggtggggacctaatgatgcacattcatactgatgtcttttctgaaccaagagctgtattttatgctgcttgtgtagttcttgggttgcagtatttacatgaacacaaaattgtttatagagatttgaaattggataacttattgctagatacagagggctttgtgaaaattgctgattttggtctttgcaaagaaggaatgggatatggagatagaacaagcacattttgtggcactcctgaatttcttgccccagaagtattaacagaaacttcttatacaagggctgtagattggtggggccttggcgtgcttatatatgaaatgcttgttggtgagtctccctttcctggtgatgatgaagaggaagtttttgacagtattgtaaatgatgaagtaaggtatccaaggttcttatctacagaagccatttctataatgagaaggctgttaagaagaaatcctgaacggcgccttggggctagcgagaaagatgcagaggatgtaaaaagcacccatttttccggctaattgattggagcgctctgatggacaaaaaagtaaagccaccatttatacctaccataagaggacgagaagatgttagtaattttgatgatgaatttacctcagaagcacctattctgactccacctcgagaaccaaggatactttcggaagaggagcaggaaatgttcagagattttgactacattgctgattggtgttaagttgctagacactgcgaaaccaagctgactcacaagaagacctcttaaaaatagcaacccttcatttgctctctgtgccaccaatagcttctgagttttttgttgttgttgtttttattgaaacacgtgaagatttgtttaaaagtaccattctaatacttcttcaaaagtggctcctcattgtacttcagcgtaaatatgagcactggaaacagtttcatggagtttaagttgagtgaacatcggccatgaaaatccatcacgaatacttttggatcaatagtctatttttaaaaagaaagaaaaaaaccacttttttatagtccctagctttgccatatgcccgccttaagtggatcagcgctgatccgcttaagggaaactgagtgcttgattgagtctctcatttgcgtctttcatttattttatggcagtgtcagtatttcattctcataattataatgtgttttttggcagtaattcattgtgtaaattatacaccgtgttgtccatgttaggtggagaaaatgtagaagacagaagtgtcttgcataataagttgtttaagtgactaggcctcagaattgttgaattgtggttagtagact

SEQ ID NO: 300751 - DNA, 2788 bp, Homo sapiens
actttaaaagctgtttttcagttcataaatgttgcatggcttagacaaaaaaagacaaaatatatctaagttttttaaagtaataatccttatcagtgaattttattctattggttttattttaacttttttattttacattatgctagctgttaagaagaaatcctgaacggcgccttggggctagcgagaaagatgcagaggatgtaaaaagcacccatttttccggctaattgattggagcgctctgatggacaaaaaagtaaagccaccatttatacctaccataagaggacgagaagatgttagtaattttgatgatgaatttacctcagaagcacctattctgactccacctcgagaaccaaggatactttcggaagaggagcaggaaatgttcagagattttgactacattgctgattggtgttaagttgctagacactgcgaaaccaagctgactcacaagaagacctcttaaaaatagcaacccttcatttgctctctgtgccaccaatagcttctgagttttttgttgttgttgtttttattgaaacacgtgaagatttgtttaaaagtaccattctaatacttcttcaaaagtggctcctcattgtacttcagcgtaaatatgagcactggaaacagtttcatggagtttaagttgagtgaacatcggccatgaaaatccatcacgaatacttttggatcaatagtctatttttaaaaagaaagaaaaaaaccacttttttatagtccctagctttgccatatgcccgccttaagtggaaggaaagttaatcacttaactatgttttataaaaagaaaaaagggcttggaatgctattactgttcacacaaagtatgattctgtttgaataaggcaaatgctcctttttttaaaaaaaaagacattactgtaatatcaaaaaccgtggcagtttgtatacaactcggggcttgattttttttaaaaaaacagaatgaattgatgtcttattttataaatgttctatatttattaggagaaaactttatattgccttttttatcaatcatgtaacaggcttatagctttccaacagagctgcttgccaaacaattttttttgtttattaaacagtgctgaaacaaacaggatcagcatttacttaagatgttaagaatgaggacttttaatcagccgaaccaagatattgttacctgtatgcattcccaaagtctagatgctcagtatgttcagtcatatctttcagaatcagtgaaccgattaccctttttttggtattcactctacatctgccaacctagttcaccttggttttgtgtctgctgtagaagggaaccataacttggttaaaccgtagggattatcattgtatacatgctgtgaacatgtatatgtgcaagttttaatgtattctatgttgtaggcttattatttaattttaccacttcatcacttttgtacagtggccaagcagacacctcaaactccagcatttacattaagtgcatttgtacattttaggccactggatccagattttatattggcagttattgagggcaaaagcaatatattgtaacagaatgtataaatatttttgataaaacagtctatattttattaaaaaatgaattataacactaaagctgtacctcaaaagtctcaaaaataatttgatgaaatattttatacaactcttcaaaggatccgtctgtggctttttatactcttttagggttgtctttttacaaaccatgactttccacttgcctgtagttttttgtttgtttggtttggtttgattttatatttttttctcctaatctatgactttattgttttttcttagtttagtaatagcatctttgatcctgtgcttagcatgttagggtcattatacctcaggaatagcaagctgttaagtaaccatactgaattaactatttaattacagtgagctcatctcttaaaaattgttcaggtgtaaatcttatgagaaacatgaaaaagcacactgatttatggagagttgagctaaaaacatttataaatatttgctgggatgttttagcatcttttcattgtactctgagaacaattaaaattgtccagagatcatttatattaccttccaaattgtttattacccaagatcctttgggagaaaatcttatagaatgggggaacaatatgtggtttaaagttattttaaaatgccagttaatttcctcggcaaaggacaatagaggaacttagcttaattgtctggctttaatttaaactgtgttaatacaacattaaaataaaacactaaatacttttgaggtacagtctgctcacttttttggttctcaaatagcaaagaaagtaatgtctaaaataggctcttagcattaaaaactgacagcattttgtaactacacagtgtacagaatttttttttaattgaagtcaatcactaaaaaaattagaaggcagggtctatttacacaattaagctgaagaaagcactaattttttgtagtttaaaatatatatatattttagtcagatttaaaattttaagctttatagagtgtaaatatattttgctattactgtatgtgtatgtgactgctcaagcactttgtaaagaaattaggatattttagaatggtacactatgcattcaaatgaaatgtgcctttcactatgtcattctaagaaaacaagtgttttttgcagtcataaattatcacaaatgcacaaattaaagtctatatagattgaaatttgta

SEQ ID NO: 300752 - DNA, 459 bp, Homo sapiens
atttgtaactttggttttaagtattctttccttttagaaacttcctaatgattaaaatatactttaacttttctgtgttcaaaatctcaaagactaattaactttaataaacattcttgcaagtactttttgtcctagtgaaggcttaaaaccatgaacattcagagcaaactgtccacttcattgggaataatgggaaaagtttgtattctgctcctgtaaggtcagtagcatcttttatttgaagcatatttatggactgcttactgtgtatagatactgagaataggaagtttttttttttaaagcaacaaaatgttgatgaatgaagaacagcctgttttaattaagatgcaagcaccagtattgtatgtacttttctcttgtttgaggttagcttattttaatttaggacctggcttctcaaaaaggcaaatgaataaaacagaatactagtat

SEQ ID NO: 300753 - DNA, 905 bp, Homo sapiens
cagattttcaggttgattgatgtgggacagcagccacaatgaggaactcctatagatttctggcatcctctctctcagttgtcgtttctctcctgctaattcctgaagatgtctgtgaaaaaattattggaggaaatgaagtaactcctcattcaagaccctacatggtcctacttagtcttgacagaaaaaccatctgtgctggggctttgattgcaaaagactgggtgttgactgcagctcactgtaacttgaacaaaaggtcccaggtcattcttggggctcactcaataaccagggaagagccaacaaaacagataatgcttgttaagaaagagtttccctatccatgctatgacccagccacacgcgaaggtgaccttaaacttttacagctgacggaaaaagcaaaaattaacaaatatgtgactatccttcatctacctaaaaagggggatgatgtgaaaccaggaaccatgtgccaagttgcagggtgggggaggactcacaatagtgcatcttggtccgatactctgagagaagtcaatatcaccatcatagacagaaaagtctgcaatgatcgaaatcactataattttaaccctgtgattggaatgaatatggtttgtgctggaagcctccgaggtggaagagactcgtgcaatggagattctggaagccctttgttgtgcgagggtgttttccgaggggtcacttcctttggccttgaaaataaatgcggagaccctcgtgggcctggtgtctatattcttctctcaaagaaacacctcaactggataattatgactatcaagggagcagtttaaataaccgtttcctttcatttactgtggcttcttaatcttttcacaaataaaatcaatttgcatgactgtaaaaaaaaa

SEQ ID NO: 300754 - DNA, 1240 bp, Homo sapiens
gatacgaaataagtcttccaagcacgcaagaaccgccatagctgcaactgactctcttaattttccaccgctacacgctggaagttaaagcaaccatgagcaaagctgtaggaaacttcatctaccaaaaacaggacaggatgtaaaacttcacaccgagtgtcatgtggcaggatggggaagcacaaaaagagactcatgcaaagttttgaaaacaccttgagagaagtgaacaaacatcactatgatggaccaaaaaacatgcaatgatgcagagcactataatttcaagctggttgttgaaaactgcatgatctgtgctagtggtagaaaaggtgaagatgcggggaggcttccaagatggccaaataggaacagctccaggctgcagctcccagcgagatcaatgaggaagacaagtgatttctgcatttccaactcagatgtctgtgaaaaaattattggaggaaatgaagtaactcctcattcaagaccctacatggtcctacttagtcttgacagaaaaaccatctgtgctggggctttgattgcaaaagactgggtgttgactgcagctcactgtaacttgaacaaaaggtcccaggtcattcttggggctcactcaataaccagggaagagccaacaaaacagataatgcttgttaagaaagagtttccctatccatgctatgacccagccacacgcgaaggtgaccttaaacttttacagctgacggaaaaagcaaaaattaacaaatatgtgactatccttcatctacctaaaaagggggatgatgtgaaaccaggaaccatgtgccaagttgcagggtgggggaggactcacaatagtgcatcttggtccgatactctgagagaagtcaatatcaccatcatagacagaaaagtctgcaatgatcgaaatcactataattttaaccctgtgattggaatgaatatggtttgtgctggaagcctccgaggtggaagagactcgtgcaatggagattctggaagccctttgttgtgcgagggtgttttccgaggggtcacttcctttggccttgaaaataaatgcggagaccctcgtgggcctggtgtctatattcttctctcaaagaaacacctcaactggataattatgactatcaagggagcagtttaaataaccgtttcctttcatttactgtggcttcttaatcttttcacaaataaaatcaatttgcatgactgtaaaaaaaaa

SEQ ID NO: 300755 - DNA, 1271 bp, Homo sapiens
gatacgaaataagtcttccaagcacgcaagaaccgccatagctgcaactgactctcttaattttccaccgctacacgctggaagttaaagcaaccatgagcaaagctgtaggaaacttcatctaccaaaaacaggacaggatgtaaaacttcacaccgagtgtcatgtggcaggatggggaagcacaaaaagagactcatgcaaagttttgaaaacaccttgagagaagtgaacaaacatcactatgatggaccaaaaaacatgcaatgatgcagagcactataatttcaagctggttgttgaaaactgcatgatctgtgctagtggtagaaaaggtgaagatgcggggaggcttccaagatggccaaataggaacagctccaggctgcagctcccagcgagatcaatgaggaagacaagtgatttctgcatttccaactcagatgtctgtgaaaaaattattggaggaaatgaagtaactcctcattcaagaccctacatggtcctacttagtcttgacagaaaaaccatctgtgctggggctttgattgcaaaagactgggtgttgactgcagctcactgtaacttgaacaaaaggtcccaggtcattcttggggctcactcaataaccagggaagagccaacaaaacagataatgcttgttaagaaagagtttccctatccatgctatgacccagccacacgcgaaggtgaccttaaacttttacagctgacggaaaaagcaaaaattaacaaatatgtgactatccttcatctacctaaaaagggggatgatgtgaaaccaggaaccatgtgccaagttgcagggtgggggaggactcacaatagtgcatcttggtccgatactctgagagaagtcaatatcaccatcatagacagaaaagtctgcaatgatcgaaatcactataattttaaccctgtgattggaatgaatatggtttgtgctggaagcctccgaggtggaagagactcgtgcaatggagattctggaagccctttgttgtgcgagggtgttttccgaggggtcacttcctttggccttgaaaataaatgcggagaccctcgtgggcctggtgtctatattcttctctcaaagaaacacctcaactggataattatgactatcaagggagcagtttaaataaccgtttcctttcatttactgtggcttcttaatcttttcacaaataaaaatccgatgcgggccgattaaattataatatataaatatttccatttacatactagac

SEQ ID NO: 300756 - DNA, 1268 bp, Homo sapiens
gatacgaaataagtcttccaagcacgcaagaaccgccatagctgcaactgactctcttaattttccaccgctacacgctggaagttaaagcaaccatgagcaaagctgtaggaaacttcatctaccaaaaacaggacaggatgtaaaacttcacaccgagtgtcatgtggcaggatggggaagcacaaaaagagactcatgcaaagttttgaaaacaccttgagagaagtgaacaaacatcactatgatggaccaaaaaacatgcaatgatgcagagcactataatttcaagctggttgttgaaaactgcatgatctgtgctagtggtagaaaaggtgaagatgcggggaggcttccaagatggccaaataggaacagctccaggctgcagctcccagcgagatcaatgaggaagacaagtgatttctgcatttccaactcagatgtctgtgaaaaaattattggaggaaatgaagtaactcctcattcaagaccctacatggtcctacttagtcttgacagaaaaaccatctgtgctggggctttgattgcaaaagactgggtgttgactgcagctcactgtaacttgaacaaaaggtcccaggtcattcttggggctcactcaataaccagggaagagccaacaaaacagataatgcttgttaagaaagagtttccctatccatgctatgacccagccacacgcgaaggtgaccttaaacttttacagctgacggaaaaagcaaaaattaacaaatatgtgactatccttcatctacctaaaaagggggatgatgtgaaaccaggaaccatgtgccaagttgcagggtgggggaggactcacaatagtgcatcttggtccgatactctgagagaagtcaatatcaccatcatagacagaaaagtctgcaatgatcgaaatcactataattttaaccctgtgattggaatgaatatggtttgtgctggaagcctccgaggtggaagagactcgtgcaatggagattctggaagccctttgttgtgcgagggtgttttccgaggggtcacttcctttggccttgaaaataaatgcggagaccctcgtgggcctggtgtctatattcttctctcaaagaaacacctcaactggataattatgactatcaagggagcagtttaaataaccgtttcctttcatttactgtggcttcttaatcttttcacaaataaaacaagatgcggccgttttggtgcaaattgtggtctcttccgaccgatcctgagcc

SEQ ID NO: 300757 - DNA, 908 bp, Homo sapiens
actcagctcgcctgcacccaggtgaaataaacagccttgttgctcacacaaagcctgtttggtggtctcttcacatggatgcgagtgaaatttacttttgttgaaaactttatgtctgtgaaaaaattattggaggaaatgaagtaactcctcattcaagaccctacatggtcctacttagtcttgacagaaaaaccatctgtgctggggctttgattgcaaaagactgggtgttgactgcagctcactgtaacttgaacaaaaggtcccaggtcattcttggggctcactcaataaccagggaagagccaacaaaacagataatgcttgttaagaaagagtttccctatccatgctatgacccagccacacgcgaaggtgaccttaaacttttacagctgacggaaaaagcaaaaattaacaaatatgtgactatccttcatctacctaaaaagggggatgatgtgaaaccaggaaccatgtgccaagttgcagggtgggggaggactcacaatagtgcatcttggtccgatactctgagagaagtcaatatcaccatcatagacagaaaagtctgcaatgatcgaaatcactataattttaaccctgtgattggaatgaatatggtttgtgctggaagcctccgaggtggaagagactcgtgcaatggagattctggaagccctttgttgtgcgagggtgttttccgaggggtcacttcctttggccttgaaaataaatgcggagaccctcgtgggcctggtgtctatattcttctctcaaagaaacacctcaactggataattatgactatcaagggagcagtttaaataaccgtttcctttcatttactgtggcttcttaatcttttcacaaataaaatcaatttgcatgactgtaaaaaaaaa

SEQ ID NO: 300758 - DNA, 1268 bp, Homo sapiens
gatacgaaataagtcttccaagcacgcaagaaccgccatagctgcaactgactctcttaattttccaccgctacacgctggaagttaaagcaaccatgagcaaagctgtaggaaacttcatctaccaaaaacaggacaggatgtaaaacttcacaccgagtgtcatgtggcaggatggggaagcacaaaaagagactcatgcaaagttttgaaaacaccttgagagaagtgaacaaacatcactatgatggaccaaaaaacatgcaatgatgcagagcactataatttcaagctggttgttgaaaactgcatgatctgtgctagtggtagaaaaggtgaagatgcggggaggcttccaagatggccaaataggaacagctccaggctgcagctcccagcgagatcaatgaggaagacaagtgatttctgcatttccaactcagatgtctgtgaaaaaattattggaggaaatgaagtaactcctcattcaagaccctacatggtcctacttagtcttgacagaaaaaccatctgtgctggggctttgattgcaaaagactgggtgttgactgcagctcactgtaacttgaacaaaaggtcccaggtcattcttggggctcactcaataaccagggaagagccaacaaaacagataatgcttgttaagaaagagtttccctatccatgctatgacccagccacacgcgaaggtgaccttaaacttttacagctgacggaaaaagcaaaaattaacaaatatgtgactatccttcatctacctaaaaagggggatgatgtgaaaccaggaaccatgtgccaagttgcagggtgggggaggactcacaatagtgcatcttggtccgatactctgagagaagtcaatatcaccatcatagacagaaaagtctgcaatgatcgaaatcactataattttaaccctgtgattggaatgaatatggtttgtgctggaagcctccgaggtggaagagactcgtgcaatggagattctggaagccctttgttgtgcgagggtgttttccgaggggtcacttcctttggccttgaaaataaatgcggagaccctcgtgggcctggtgtctatattcttctctcaaagaaacacctcaactggataattatgactatcaagggagcagtttaaataaccgtttcctttcatttactgtggcttcttaatcttttcacaaataaaaaggatcgcgcccagaccttctttccctggtccgctcgcggacccctccgccgtg

SEQ ID NO: 300759 - DNA, 1268 bp, Homo sapiens
  misc_feature (1237)..(1237): n is a, c, g, or t
gatacgaaataagtcttccaagcacgcaagaaccgccatagctgcaactgactctcttaattttccaccgctacacgctggaagttaaagcaaccatgagcaaagctgtaggaaacttcatctaccaaaaacaggacaggatgtaaaacttcacaccgagtgtcatgtggcaggatggggaagcacaaaaagagactcatgcaaagttttgaaaacaccttgagagaagtgaacaaacatcactatgatggaccaaaaaacatgcaatgatgcagagcactataatttcaagctggttgttgaaaactgcatgatctgtgctagtggtagaaaaggtgaagatgcggggaggcttccaagatggccaaataggaacagctccaggctgcagctcccagcgagatcaatgaggaagacaagtgatttctgcatttccaactcagatgtctgtgaaaaaattattggaggaaatgaagtaactcctcattcaagaccctacatggtcctacttagtcttgacagaaaaaccatctgtgctggggctttgattgcaaaagactgggtgttgactgcagctcactgtaacttgaacaaaaggtcccaggtcattcttggggctcactcaataaccagggaagagccaacaaaacagataatgcttgttaagaaagagtttccctatccatgctatgacccagccacacgcgaaggtgaccttaaacttttacagctgacggaaaaagcaaaaattaacaaatatgtgactatccttcatctacctaaaaagggggatgatgtgaaaccaggaaccatgtgccaagttgcagggtgggggaggactcacaatagtgcatcttggtccgatactctgagagaagtcaatatcaccatcatagacagaaaagtctgcaatgatcgaaatcactataattttaaccctgtgattggaatgaatatggtttgtgctggaagcctccgaggtggaagagactcgtgcaatggagattctggaagccctttgttgtgcgagggtgttttccgaggggtcacttcctttggccttgaaaataaatgcggagaccctcgtgggcctggtgtctatattcttctctcaaagaaacacctcaactggataattatgactatcaagggagcagtttaaataaccgtttcctttcatttactgtggcttcttaatcttttcacaaataaaacccggatgcggccagcccttctntctataacactatctaaaagcggtcaaaaaa

SEQ ID NO: 300760 - DNA, 1282 bp, Homo sapiens
  misc_feature (1219)..(1219): n is a, c, g, or t
gatacgaaataagtcttccaagcacgcaagaaccgccatagctgcaactgactctcttaattttccaccgctacacgctggaagttaaagcaaccatgagcaaagctgtaggaaacttcatctaccaaaaacaggacaggatgtaaaacttcacaccgagtgtcatgtggcaggatggggaagcacaaaaagagactcatgcaaagttttgaaaacaccttgagagaagtgaacaaacatcactatgatggaccaaaaaacatgcaatgatgcagagcactataatttcaagctggttgttgaaaactgcatgatctgtgctagtggtagaaaaggtgaagatgcggggaggcttccaagatggccaaataggaacagctccaggctgcagctcccagcgagatcaatgaggaagacaagtgatttctgcatttccaactcagatgtctgtgaaaaaattattggaggaaatgaagtaactcctcattcaagaccctacatggtcctacttagtcttgacagaaaaaccatctgtgctggggctttgattgcaaaagactgggtgttgactgcagctcactgtaacttgaacaaaaggtcccaggtcattcttggggctcactcaataaccagggaagagccaacaaaacagataatgcttgttaagaaagagtttccctatccatgctatgacccagccacacgcgaaggtgaccttaaacttttacagctgacggaaaaagcaaaaattaacaaatatgtgactatccttcatctacctaaaaagggggatgatgtgaaaccaggaaccatgtgccaagttgcagggtgggggaggactcacaatagtgcatcttggtccgatactctgagagaagtcaatatcaccatcatagacagaaaagtctgcaatgatcgaaatcactataattttaaccctgtgattggaatgaatatggtttgtgctggaagcctccgaggtggaagagactcgtgcaatggagattctggaagccctttgttgtgcgagggtgttttccgaggggtcacttcctttggccttgaaaataaatgcggagaccctcgtgggcctggtgtctatattcttctctcaaagaaacacctcaactggataattatgactatcaagggagcagtttaaataaccgtttcctttcatttactgtggcttcttaatcttttcacaaataaaagattnagcaagcgagccagaattttaatgggtttataatatatacaatatacataataataatatacg

SEQ ID NO: 300761 - DNA, 874 bp, Homo sapiens
gatacgaaataagtcttccaagcacgcaagaaccgccatagctgcaactgactctcttaattttccaccgctacacgatgtctgtgaaaaaattattggaggaaatgaagtaactcctcattcaagaccctacatggtcctacttagtcttgacagaaaaaccatctgtgctggggctttgattgcaaaagactgggtgttgactgcagctcactgtaacttgaacaaaaggtcccaggtcattcttggggctcactcaataaccagggaagagccaacaaaacagataatgcttgttaagaaagagtttccctatccatgctatgacccagccacacgcgaaggtgaccttaaacttttacagctgacggaaaaagcaaaaattaacaaatatgtgactatccttcatctacctaaaaagggggatgatgtgaaaccaggaaccatgtgccaagttgcagggtgggggaggactcacaatagtgcatcttggtccgatactctgagagaagtcaatatcaccatcatagacagaaaagtctgcaatgatcgaaatcactataattttaaccctgtgattggaatgaatatggtttgtgctggaagcctccgaggtggaagagactcgtgcaatggagattctggaagccctttgttgtgcgagggtgttttccgaggggtcacttcctttggccttgaaaataaatgcggagaccctcgtgggcctggtgtctatattcttctctcaaagaaacacctcaactggataattatgactatcaagggagcagtttaaataaccgtttcctttcatttactgtggcttcttaatcttttcacaaataaaatcaatttgcatgactgtaaaaaaaaa

SEQ ID NO: 300762 - DNA, 622 bp, Homo sapiens
gtgcccctgttgtaaaaactcacaataaagaggatcctgaaattttggactataatttaaaatgtaaatatttatcttatcccattaacactttatgtttttcttccaacagctgacggaaaaagcaaaaattaacaaatatgtgactatccttcatctacctaaaaagggggatgatgtgaaaccaggaaccatgtgccaagttgcagggtgggggaggactcacaatagtgcatcttggtccgatactctgagagaagtcaatatcaccatcatagacagaaaagtctgcaatgatcgaaatcactataattttaaccctgtgattggaatgaatatggtttgtgctggaagcctccgaggtggaagagactcgtgcaatggagattctggaagccctttgttgtgcgagggtgttttccgaggggtcacttcctttggccttgaaaataaatgcggagaccctcgtgggcctggtgtctatattcttctctcaaagaaacacctcaactggataattatgactatcaagggagcagtttaaataaccgtttcctttcatttactgtggcttcttaatcttttcacaaataaaatcaatttgcatgactgtaaaaaaaaa

SEQ ID NO: 300763 - DNA, 471 bp, Homo sapiens
attcataaacattcttttattctttaaagcacacattttctttctgagccacaaagaaatctccccacctccatatttacaaatgggacaatgaaactgatcagtatatatgctcaactgccaatacaaagaataaatccagtaaataatgttgtgtctgttctcaggaacaaaaggtcccaggtcattcttggggctcactcaataaccagggaagagccaacaaaacagataatgcttgttaagaaagagtttccctatccatgctatgacccagccacacgcgaaggtgaccttaaacttttacaggtacgtatctttgattgtcttctcaaaagtcatagaaccttctacaatctggccgccgacgtgaaaacctttccttggtgcccctgttgtaaaaactcacaataaagaggatcctgaaattttggactataatttaaaatgtaaatatttatcttatcccat

SEQ ID NO: 300764 - DNA, 513 bp, Homo sapiens
agatgagtctttggctcagcagaatgggcctaggtggagcttgaaattaatgaagagatgctgcttccagctttttgagcaagaagaagtttggcctccagttattacaccttgaggtcagcgggtatctcaagtctgagtagttataaaagtgagctgatgtagaaacaccaccaaagcaacgttttatctaaatatttcagatcccccattataaatcatttattatgattacccttttggtgtcatggaatgagatgatgagcttttcttaatgaagtatttcatagacatattttttccatttatcttggtgttggatgctatgtgacctgaatggcaaatgaggaaatatttgtgcaactcctgaaatgcacacatctccccatgccagagtgcaggagcggacagggctttccctggcagcaatagggagcccggtcctggagtagggcctctccagccctgactggcacccatagcaggtgacatctgacttggggtgtgccatgt

SEQ ID NO: 300765 - DNA, 3306 bp, Homo sapiens
aggcagcggcggcggctgcgggcgtagcgggccggagccgacgcggcggcgggcaccgcgggcaccgcgcacgccgctgccccaggggcgccccggccggccgcgcgcacgggccccgcgggacgggccacgcgggggtgggaggggcccgggccacgcgcgccgccgccgccgcccacgcgcgaccctcgggggcccggccgcgacgcacctttgtccgggggggggcccccccgcttcatgccgccgcccccccccacgcgccgcgtgcccggccgcgcagggtttccaggcctgaggtgcccgccctggccccaggagaatgaaccagccgcagaggatggcgcctgtgggcacagacaaggagctcagtgacctcctggacttcagcatgatgttcccgctgcctgtcaccaacgggaagggccggcccgcctccctggccggggcgcagttcggaggttcaggtcttgaggaccggcccagctcaggctcctggggcagcggcgaccagagcagctcctcctttgaccccagccggaccttcagcgagggcacccacttcactgagtcgcacagcagcctctcttcatccacattcctgggaccgggactcggaggcaagagcggtgagcggggcgcctatgcctccttcgggagagacgcaggcgtgggcggcctgactcaggctggcttcctgtcaggcgagctggccctcaacagccccgggcccctgtccccttcgggcatgaaggggacctcccagtactacccctcctactccggcagctcccggcggagagcggcagacggcagcctagacacgcagcccaagaaggtccggaaggtcccgccgggtcttccatcctcggtgtacccacccagctcaggtgaggactacggcagggatgccaccgcctacccgtccgccaagacccccagcagcacctatcccgcccccttctacgtggcagatggcagcctgcacccctcagccgagctctggagtcccccgggccaggcgggcttcgggcccatgctgggtgggggctcatccccgctgcccctcccgcccggtagcggcccggtgggcagcagtggaagcagcagcacgtttggtggcctgcaccagcacgagcgtatgggctaccagctgcatggagcagaggtgaacggtgggctcccatctgcatcctccttctcctcagcccccggagccacgtacggcggcgtctccagccacacgccgcctgtcagcggggccgacagcctcctgggctcccgagggaccacagctggcagctccggggatgccctcggcaaagcactggcctcgatctactccccggatcactcaagcaataacttctcgtccagcccttctacccccgtgggctccccccagggcctggcaggaacgtcacagtggcctcgagcaggagcccccggtgccttatcgcccagctacgacgggggtctccacggcctgcagagtaagatagaagaccacctggacgaggccatccacgtgctccgcagccacgccgtgggcacagccggcgacatgcacacgctgctgcctggccacggggcgctggcctcaggtttcaccggccccatgtcgctgggcgggcggcacgcaggcctggttggaggcagccaccccgaggacggcctcgcaggcagcaccagcctcatgcacaaccacgcggccctccccagccagccaggcaccctccctgacctgtctcggcctcccgactcctacagtgggctagggcgagcaggtgccacggcggccgccagcgagatcaagcgggaggagaaggaggacgaggagaacacgtcagcggctgaccactcggaggaggagaagaaggagctgaaggccccccgggcccggaccagcccagacgaggacgaggacgaccttctccccccagagcagaaggccgagcgggagaaggagcgccgggtggccaataacgcccgggagcggctgcgggtccgtgacatcaacgaggcctttaaggagctggggcgcatgtgccaactgcacctcaacagcgagaagccccagaccaaactgctcatcctgcaccaggctgtctcggtcatcctgaacttggagcagcaagtgcgagagcggaacctgaatcccaaagcagcctgtttgaaacggcgagaagaggaaaaggtgtcaggtgtggttggagacccccagatggtgctttcagctccccacccaggcctgagcgaagcccacaaccccgccgggcacatgtgaaaggtatgcctccgtgggacgagccacccgctttcagccctgtgctctggccccagaacggccactcgagaccccgggcttcatccacatccacacctcacacacctgttgtcagcatcgagccaacaccaacctgacaaggttcggagtgatgggggcggccaaggtgacactgggtccaggagctccctggggccctggcctaccactcactggcctcgctccccctgtccccgaatctcagccaccgtgtcactctgtgacctgtcccatggatcctgaaactgcatcttggccctgttgcctgggctgacaggagcattttttttttttccagtaaacaaaacctgaaagcaagcaacaaaacatacactttgtcagagaagaaaaaaatgccttaactataaaaagcggagaaatggaaacatatcactcaagggggatgctgtggaaacctggcttattcttctaaagccaccagcaaattgtgcctaagcgaaatattttttttaaggaaaataaaaacattagttacaagattttttttttcttaatgtagatgaaaattagcaaggatgctgcctttggtctctggtttttttaagctttttttgcatatgttttgtaagcaacaaatttttttgtataaaagtcccgtgtctctcgctatttctgctgctgttcctagactgagcattgcatttcttgatcaaccagatgattaaacgttgtattaaaaaaaaaaaggagaaggagcgccgggtggccaataacgcccgggagcggctgcgggtccgtgacatcaacgaggccttaaggagctggggcgcatgtgccaactgcacctcaacagcgagaagccccagaccaaactgctcatcctgcaccaggctgtctcggtcatcctgaacttggagcagcaggtgcgaggtaggctccccggccagggctgccccagcaccctctcccttccccgcacccaggtgcagatgctggggtcctccgtgtgcttgccgccc

SEQ ID NO: 300766 - DNA, 2192 bp, Homo sapiens
aaattaaggctaggtagaggccggtgttaatcggccgaggaacacgtcagccagtacggacgaggtgctgtccctggaggagaaagacctgagggaccgggagaggcgcatggccaataacgcgcgggagcgggtgcgcgtgcgggatattaacgaggccttccgggagctggggcgcatgtgccagatgcacctcaagtcggacaaagcgcagaccaagctgctcatcctgcagcaggccgtgcaggtcatcctggggctggagcagcaggtgcgagagcggaacctgaatcccaaagcagcctgtttgaaacggcgagaagaggaaaaggtgtcaggtgtggttggagacccccagatggtgctttcagctccccacccaggcctgagcgaagcccacaaccccgccgggcacatgtgaaagctgggtgggcagtggccccatagcctctggaactgctgtttcttccgccagaacacaggtgtcgtgaaaactacccctaaaagccaaaatgggaaaggaaaagactcatatcaacattgtcgtcattggacacgtagattcgggcaagtccaccactactggccatctgatctataaatgcggtggcatcgacaaaagaaccattgaaaaaatttgagaaggaggctgctgagatgggaaagggctccttcaagtatgcctgggtcttggataaactgaaagctgagcgtgaacgtggtatcaccattgatatctccttgtggaaatttgagaccagcaagtactatgtgactatcattgatgccccaggacacagagactttatcaaaaacatgattacagggacatctcaggctgactgtgctgtcctgattgttgctgctggtgttggtgaatttgaagctggtatctccaagaatgggcagacccgagagcatgcccttctggcttacacactgggtgtgaaacaactaattgtcggtgttaacaaaatggattccactgagccaccctacagccagaagagatatgaggaaattgttaaggaagtcagcacttacattaagaaaattggctacaaccccgacacagtagcatttgtgccaatttctggttggaatggtgacaacatgctggagccaagtgctaacatgccttggttcaagggatggaaagtcacccgtaaggatggcaatgccagtggaaccacgctgcttgaggctctggactgcatcctaccaccaactcgtccaactgacaagcccttgcgcctgcctctccaggatgtctacaaaattggtggtattggtactgttcctgttggccgagtggagactggtgttctcaaacccggtatggtggtcacctttgctccagtcaacgttacaacggaagtaaaatctgtcgaaatgcaccatgaagctttgagtgaagctcttcctggggacaatgtgggcttcaatgtcaagaatgtgtctgtcaaggatgttcgtcgtggcaacgttgctggtgacagcaaaaatgacccaccaatggaagcagctggcttcactgctcaggtgattatcctgaaccatccaggccaaataagcgccggctatgcccctgtattggattgccacacggctcacattgcatgcaagtttgctgagctgaaggaaaagattgatcgccgttctggtaaaaagctggaagatggccctaaattcttgaagtctggtgatgctgccattgttgatatggttcctggcaagcccatgtgtgttgagagcttctcagactatccacctttgggtcgctttgctgttcgtgatatgagacagacagttgcggtgggtgtcatcaaagcagtggacaagaaggctgctggagctggcaaggtcaccaagtctgcccagaaagctcagaaggctaaatgaatattatccctaatacctgccaccccactcttaatcagtggtggaagaacggtctcagaactgtttgtttcaattggccatttaagtttagtagtaaaagactggttaatgataacaatgcatcgtaaaaccttcagaaggaaaggagaatgttttgtggaccactttggttttcttttttgcgtgtggcagttttaagttattagtttttaaaatcagtactttttaatggaaacaacttgaccaaaaatttgtcacagaattttgagacccattaaaaaagttaaatg

SEQ ID NO: 300767 - DNA, 1995 bp, Homo sapiens
cagcaactccgtggccaagctgaggaggcccagggcccgctcctgcttctccacgggtgtgctctgtggcccccgatggaagggggaaggatccaagcaggccctccctgcccagggcagaagattctggagtcctgggcgttgcctgtgagtgttctgagagataagggccccgcccgccccgccccgggaccaaggtcctcgtcccgtcccttgctgcgccgggaactcctgccccacgcaggcttctggtctccacactgggcttgttcctgggtgatgagattcggctccaccctcacgggctgccagcctcctgcccgatgggtgagcctctgctgctgcttcagcaaagggcggccccacttcccacactggcaggtggggacagggagaccctgggcctccccagagctcatgggttagcttccacaccctcatgctgtcatgagcctttctcacagggtcagaagagtctgcatctgacacagagaccccagtccacatagtcagggctgggccagagggagggacttggggctgatggggaggaggctcggcgtgagagtgaggtctttgcccaaggagggtatgaaagctggggctttagtgggtgggtaggagttggccagcagagagccgacggaagagttaatttaagtttatggacctgtaagtgctccgagtcccagggtgtctgggtgttagctgctgactggtgtcctcatgagtcgggctgggtgaggctgggttaggaagggttccacaagccccccgggtccactgaggtttgcccctgagatgatgaaccgaagcttttagagctgggcaggcgtgagggtgacccataactctctctgtcctgcctgcaggtcttgaggaccggcccagctcaggctcctggggcagcggcgaccagagcagctcctcctttgaccccagccgggtaggagtccccgtgaggcctgagaccctgagtttcctgtccccagagttgggggcgaggggtgtggggaaactgaggctgagagaaggggccagccttccaggggtttggactgggggacatgggtttgagtcctgcctctccagctgtaatgcggggtggagggggggcctgtgaagccccagcacctctcatccccaccccatctcccctagaccttcagcgagggcacccacttcactgagtcgcacagcagcctctcttcatccacattcctgggaccgggactcggagggaggtgagtgcctggcctggtgcggtccctctgctgtgcacagatgtgcagacgtgggccttggcatggtcagtgcacgcacagcgccaggcaagtccccagcgttcacccagagggtgtggacagccgaagcctctgcccgtcctgggagcagctgcggggaggtgcaggggacgtggcccggactccctggcacggcactctgcaactaggcttccccgcctgagcgtagaggcagggaggccgttccagaccccacttcctccctgggatttctgcagggctcctcctgcttcccggggaggggtcagccgggctggcctgtgcccgctgggaaggaggcgtaggagttctggagactcgggagggcggccagagtgtgcggtggtcagagcccatgcccttccgcagaccgcccgcccgccctctttccctggggggccctcctgttaaccgagagaatcgtgactcaggttgggctcggtggctcacgcctgtaataccagcactttgggagagcgaggtgggtggatcacctgaggtcaggagtttgagaccagcctggccaacatggtgaaaccccgcttctaccaaaaacacaaaaattagccggtcatggtgttggatgcttatagtgccaactactcaggaggctgaggcaggagaattgcttgaacccaggaggtggaggctgcagtgagccgagatcacgccattgccctccagcctgggtgatggagcgagattccatctt

SEQ ID NO: 300768 - DNA, 4447 bp, Homo sapiens
ggcacgagggtgccggccgcgcccagagggtttccaggcctgaggtgcccgccctggccccaggagaatgaaccagccgcagaggatggcgcctgtgggcacagacaaggagctcagtgacctcctggacttcagcatgatgttcccgctgcctgtcaccaacgggaagggccggcccgcctccctggccggggcgcagttcggaggttcaggtcttgaggaccggcccagctcaggctcctggggcagcggcgaccagagcagctcctcctttgaccccagccggaccttcagcgagggcacccacttcactgagtcgcacagcagcctctcttcatccacattcctgggaccgggactcggaggcaagagcggtgagcggggcgcctatgcctccttcgggagagacgcaggcgtgggcggcctgactcaggctggcttcctgtcaggcgagctggccctcaacagccccgggcccctgtccccttcgggcatgaaggggacctcccagtactacccctcctactccggcagctcccggcggagagcggcagacggcagcctagacacgcagcccaagaaggtccggaaggtcccgccgggtcttccatcctcggtgtacccacccagctcaggtgaggactacggcagggatgccaccgcctacccgtccgccaagacccccagcagcacctatcccgcccccttctacgtggcagatggcagcctgcacccctcagccgagctctggagtcccccgggccaggcgggcttcgggcccatgctgggtgggggctcatccccgctgcccctcccgcccggtagcggcccggtgggcagcagtggaagcagcagcacgtttggtggcctgcaccagcacgagcgtatgggctaccagctgcatggagcagaggtgaacggtgggctcccatctgcatcctccttctcctcagcccccggagccacgtacggcggcgtctccagccacacgccgcctgtcagcggggccgacagcctcctgggctcccgagggaccacagctggcagctccggggatgccctcggcaaagcactggcctcgatctactccccggatcactcaagcaataacttctcgtccagcccttctacccccgtgggctccccccagggcctggcaggaacgtcacagtggcctcgagcaggagcccccggtgccttatcgcccagctacgacgggggtctccacggcctgcagagtaagatagaagaccacctggacgaggccatccacgtgctccgcagccacgccgtgggcacagccggcgacatgcacacgctgctgcctggccacggggcgctggcctcaggtttcaccggccccatgtcgctgggcgggcggcacgcaggcctggttggaggcagccaccccgaggacggcctcgcaggcagcaccagcctcatgcacaaccacgcggccctccccagccagccaggcaccctccctgacctgtctcggcctcccgactcctacagtgggctagggcgagcaggtgccacggcggccgccagcgagatcaagcgggaggagaaggaggacgaggagaacacgtcagcggctgaccactcggaggaggagaagaaggagctgaaggccccccgggcccggaccagcccagacgaggacgaggacgaccttctccccccagagcagaaggccgagcgggagaaggagcgccgggtggccaataacgcccgggagcggctgcgggtccgtgacatcaacgaggcctttaaggagctggggcgcatgtgccaactgcacctcaacagcgagaagccccagaccaaactgctcatcctgcaccaggctgtctcggtcatcctgaacttggagcagcaagtgcgagagcggaacctgaatcccaaagcagcctgtttgaaacggcgagaagaggaaaaggtgtcaggtgtggttggagacccccagatggtgctttcagctccccacccaggcctgagcgaagcccacaaccccgccgggcacatgtgaaaggtatgcctccgtgggacgagccacccgctttcagccctgtgctctggccccagaacggccactcgagaccccgggcttcatccacatccacacctcacacacctgttgtcagcatcgagccaacaccaacctgacaaggttcggagtgatgggggcggccaaggtgacactgggtccaggagctccctggggccctggcctaccactcactggcctcgctccccctgtccccgaatctcagccaccgtgtcactctgtgacctgtcccatggatcctgaaactgcatcttggccctgttgcctgggctgacaggagcattttttttttttccagtaaacaaaacctgaaagcaagcaacaaaacatacactttgtcagagaagaaaaaaatgccttaactataaaaagcggagaaatggaaacatatcactcaagggggatgctgtggaaacctggcttattcttctaaagccaccagcaaattgtgcctaagcgaaatattttttttaaggaaaataaaaacattagttacaagattttttttttcttaatgtagatgaaaattagcaaggatgctgcctttggtctctggtttttttaagctttttttgcatatgttttgtaagcaacaaatttttttgtataaaagtcccgtgtctctcgctatttctgctgctgttcctagactgagcattgcatttcttgatcaaccagatgattaaacgttgtattaaaaagaccccgtgtaaacctgagcccccccgtccccccccccccccggaagccactgcacacagacagaacggggacaggcggcgggtcttttgtttttttgatgttgggggttctcttggttttgtcatgtggaaagtgatgcgtgggcgttccctgatgaaggcaccttggggcttccctgccgcatcctctcccctcaggaaggggactgacctgggcttgggggaagggacgtcagcaaggtggctctgaccctcccaggtgactctgccaagcagctgtggcccccagggctaccctacacaacgccctccccaggcccccctaagctgctctcccttggaacctgcacagctctctgaaatggggcattttgttgggaccagtgacccctggcatggggaccacaccctggagcccggtgctggggacctcctggacaccctgtccttcactcctttgccccagggacccaggctcatgctctgaactctggctgagaggatgctgctcaggagccagcacaggacaccccccaccccaccccaccatgtccccattacaccagagggccatcgtgacgtagacaggatgccaggggcctggccagcctcccccaatgctggggagcatccctgggcctggggccacacctgctgccctccctctgtgtggtccaagggcaagagtggctggagccgggggactgtgctggtctgagccccacgaaggccttgggctgtgcgtccgaccctgctgcagaaccagcagggtgtcccctcgggcccatctgtgtcccatgtcccagcacccaggcctctctccaggtctccttttctggtcttttgccatgagggtaaccagctcttcccagctggctggggactgtcttgggtttaaaactgcaagtctcctaccctgggatcccatccagttccacacgaactagggcagtggtcactgtggcacccaggtgtgggcctggctagctgggggccttcatgtgcccttcatgcccctccctgcattgaggccttgtggacccctgggctggctgtgttcatccccgctgcaggtcgggcgtctccccccgtgccactcctgagactcccaccgttacccccaggagatcctggactgcctgactcccctccccagactggcttgggagcctgggccccatggtagatgcaagggaaacctcaaggccagctcaatgcctggtatctgcccccagtccaggccaggcggaggggaggggctgtccggctgcctctcccttctcggtggcttcccctacgccctgggagtttgatctcttaagggaacttgcctctccctcttgttttgctcctggccctgcccctaggtctgggtgggcagtggccccatagcctctggaactgtgcgttctgcatagaattcaaacgagattcacccagcgcgaggaggaagaaacagcagttcctgggaaccacaattatggggggtggggggtgtgatctgagtgcctcaagatggttttcaaaaaaatttttttaaagaaaataattgtatacgtgtcaacacagctggctggatgattgggactttaaaacgaccctctttcaggtggattcagagacctgtcctgtatataacagcactgtagcaataaacgtgacattttataacgat

SEQ ID NO: 300769 - DNA, 4753 bp, Homo sapiens
ggcacgagggtgccggccgcgcccagagggtttccaggcctgaggtgcccgccctggccccaggagaatgaaccagccgcagaggatggcgcctgtgggcacagacaaggagctcagtgacctcctggacttcagcatgatgttcccgctgcctgtcaccaacgggaagggccggcccgcctccctggccggggcgcagttcggaggttcaggtcttgaggaccggcccagctcaggctcctggggcagcggcgaccagagcagctcctcctttgaccccagccgggtaggagtccccgtgaggcctgagaccctgagtttcctgtccccagagttgggggcgaggggtgtggggaaactgaggctgagagaaggggccagccttccaggggtttggactgggggacatgggtttgagtcctgcctctccagctgtaatgcggggtggagggggggcctgtgaagccccagcacctctcatccccaccccatctcccctagaccttcagcgagggcacccacttcactgagtcgcacagcagcctctcttcatccacattcctgggaccgggactcggagggaggtgagtgcctggcctggtgcggtccctctgctgtgcacagatgtgcagacgtgggccttggcatggtcagtgcacgcacagcgccaggcaagagcggtgagcggggcgcctatgcctccttcgggagagacgcaggcgtgggcggcctgactcaggctggcttcctgtcaggcgagctggccctcaacagccccgggcccctgtccccttcgggcatgaaggggacctcccagtactacccctcctactccggcagctcccggcggagagcggcagacggcagcctagacacgcagcccaagaaggtccggaaggtcccgccgggtcttccatcctcggtgtacccacccagctcaggtgaggactacggcagggatgccaccgcctacccgtccgccaagacccccagcagcacctatcccgcccccttctacgtggcagatggcagcctgcacccctcagccgagctctggagtcccccgggccaggcgggcttcgggcccatgctgggtgggggctcatccccgctgcccctcccgcccggtagcggcccggtgggcagcagtggaagcagcagcacgtttggtggcctgcaccagcacgagcgtatgggctaccagctgcatggagcagaggtgaacggtgggctcccatctgcatcctccttctcctcagcccccggagccacgtacggcggcgtctccagccacacgccgcctgtcagcggggccgacagcctcctgggctcccgagggaccacagctggcagctccggggatgccctcggcaaagcactggcctcgatctactccccggatcactcaagcaataacttctcgtccagcccttctacccccgtgggctccccccagggcctggcaggaacgtcacagtggcctcgagcaggagcccccggtgccttatcgcccagctacgacgggggtctccacggcctgcagagtaagatagaagaccacctggacgaggccatccacgtgctccgcagccacgccgtgggcacagccggcgacatgcacacgctgctgcctggccacggggcgctggcctcaggtttcaccggccccatgtcgctgggcgggcggcacgcaggcctggttggaggcagccaccccgaggacggcctcgcaggcagcaccagcctcatgcacaaccacgcggccctccccagccagccaggcaccctccctgacctgtctcggcctcccgactcctacagtgggctagggcgagcaggtgccacggcggccgccagcgagatcaagcgggaggagaaggaggacgaggagaacacgtcagcggctgaccactcggaggaggagaagaaggagctgaaggccccccgggcccggaccagcccagacgaggacgaggacgaccttctccccccagagcagaaggccgagcgggagaaggagcgccgggtggccaataacgcccgggagcggctgcgggtccgtgacatcaacgaggcctttaaggagctggggcgcatgtgccaactgcacctcaacagcgagaagccccagaccaaactgctcatcctgcaccaggctgtctcggtcatcctgaacttggagcagcaagtgcgagagcggaacctgaatcccaaagcagcctgtttgaaacggcgagaagaggaaaaggtgtcaggtgtggttggagacccccagatggtgctttcagctccccacccaggcctgagcgaagcccacaaccccgccgggcacatgtgaaaggtatgcctccgtgggacgagccacccgctttcagccctgtgctctggccccagaacggccactcgagaccccgggcttcatccacatccacacctcacacacctgttgtcagcatcgagccaacaccaacctgacaaggttcggagtgatgggggcggccaaggtgacactgggtccaggagctccctggggccctggcctaccactcactggcctcgctccccctgtccccgaatctcagccaccgtgtcactctgtgacctgtcccatggatcctgaaactgcatcttggccctgttgcctgggctgacaggagcattttttttttttccagtaaacaaaacctgaaagcaagcaacaaaacatacactttgtcagagaagaaaaaaatgccttaactataaaaagcggagaaatggaaacatatcactcaagggggatgctgtggaaacctggcttattcttctaaagccaccagcaaattgtgcctaagcgaaatattttttttaaggaaaataaaaacattagttacaagattttttttttcttaatgtagatgaaaattagcaaggatgctgcctttggtctctggtttttttaagctttttttgcatatgttttgtaagcaacaaatttttttgtataaaagtcccgtgtctctcgctatttctgctgctgttcctagactgagcattgcatttcttgatcaaccagatgattaaacgttgtattaaaaagaccccgtgtaaacctgagcccccccgtccccccccccccccggaagccactgcacacagacagaacggggacaggcggcgggtcttttgtttttttgatgttgggggttctcttggttttgtcatgtggaaagtgatgcgtgggcgttccctgatgaaggcaccttggggcttccctgccgcatcctctcccctcaggaaggggactgacctgggcttgggggaagggacgtcagcaaggtggctctgaccctcccaggtgactctgccaagcagctgtggcccccagggctaccctacacaacgccctccccaggcccccctaagctgctctcccttggaacctgcacagctctctgaaatggggcattttgttgggaccagtgacccctggcatggggaccacaccctggagcccggtgctggggacctcctggacaccctgtccttcactcctttgccccagggacccaggctcatgctctgaactctggctgagaggatgctgctcaggagccagcacaggacaccccccaccccaccccaccatgtccccattacaccagagggccatcgtgacgtagacaggatgccaggggcctggccagcctcccccaatgctggggagcatccctgggcctggggccacacctgctgccctccctctgtgtggtccaagggcaagagtggctggagccgggggactgtgctggtctgagccccacgaaggccttgggctgtgcgtccgaccctgctgcagaaccagcagggtgtcccctcgggcccatctgtgtcccatgtcccagcacccaggcctctctccaggtctccttttctggtcttttgccatgagggtaaccagctcttcccagctggctggggactgtcttgggtttaaaactgcaagtctcctaccctgggatcccatccagttccacacgaactagggcagtggtcactgtggcacccaggtgtgggcctggctagctgggggccttcatgtgcccttcatgcccctccctgcattgaggccttgtggacccctgggctggctgtgttcatccccgctgcaggtcgggcgtctccccccgtgccactcctgagactcccaccgttacccccaggagatcctggactgcctgactcccctccccagactggcttgggagcctgggccccatggtagatgcaagggaaacctcaaggccagctcaatgcctggtatctgcccccagtccaggccaggcggaggggaggggctgtccggctgcctctcccttctcggtggcttcccctacgccctgggagtttgatctcttaagggaacttgcctctccctcttgttttgctcctggccctgcccctaggtctgggtgggcagtggccccatagcctctggaactgtgcgttctgcatagaattcaaacgagattcacccagcgcgaggaggaagaaacagcagttcctgggaaccacaattatggggggtggggggtgtgatctgagtgcctcaagatggttttcaaaaaaatttttttaaagaaaataattgtatacgtgtcaacacagctggctggatgattgggactttaaaacgaccctctttcaggtggattcagagacctgtcctgtatataacagcactgtagcaataaacgtgacattttataacgat

SEQ ID NO: 300770 - DNA, 4116 bp, Homo sapiens
ggcacgagggtgccggccgcgcccagagggtttccaggcctgaggtgcccgccctggccccaggagaatgaaccagccgcagaggatggcgcctgtgggcacagacaaggagctcagtgacctcctggacttcagcatgatgttcccgctgcctgtcaccaacgggaagggccggcccgcctccctggccggggcgcagttcggaggttcaggtcttgaggaccggcccagctcaggctcctggggcagcggcgaccagagcagctcctcctttgaccccagccggaccttcagcgagggcacccacttcactgagtcgcacagcagcctctcttcatccacattcctgggaccgggactcggaggcaagagcggtgagcggggcgcctatgcctccttcgggagagacgcaggcgtgggcggcctgactcaggctggcttcctgtcaggcgagctggccctcaacagccccgggcccctgtccccttcgggcatgaaggggacctcccagtactacccctcctactccggcagctcccggcggagagcggcagacggcagcctagacacgcagcccaagaaggtccggaaggtcccgccgggtcttccatcctcggtgtacccacccagctcaggtgaggactacggcagggatgccaccgcctacccgtccgccaagacccccagcagcacctatcccgcccccttctacgtggcagatggcagcctgcacccctcagccgagctctggagtcccccgggccaggcgggcttcgggcccatgctgggtgggggctcatccccgctgcccctcccgcccggtagcggcccggtgggcagcagtggaagcagcagcacgtttggtggcctgcaccagcacgagcgtatgggctaccagctgcatggagcagaggtgaacggtgggctcccatctgcatcctccttctcctcagcccccggagccacgtacggcggcgtctccagccacacgccgcctgtcagcggggccgacagcctcctgggctcccgagggaccacagctggcagctccggggatgccctcggcaaagcactggcctcgatctactccccggatcactcaagcaataacttctcgtccagcccttctacccccgtgggctccccccagggcctggcaggaacgtcacagtggcctcgagcaggagcccccggtgccttatcgcccagctacgacgggggtctccacggcctgcagagtaagatagaagaccacctggacgaggccatccacgtgctccgcagccacgccgtgggcacagccggcgacatgcacacgctgctgcctggccacggggcgctggcctcaggtttcaccggccccatgtcgctgggcgggcggcacgcaggcctggttggaggcagccaccccgaggacggcctcgcaggcagcaccagcctcatgcacaaccacgcggccctccccagccagccaggcaccctccctgacctgtctcggcctcccgactcctacagtgggctagggcgagcaggtgccacggcggccgccagcgagatcaagcgggaggagaaggaggacgaggagaacacgtcagcggctgaccactcggaggaggagaagaaggagctgaaggccccccgggcccggaccagcccagacgaggacgaggacgaccttctccccccagagcagaaggccgagcgggagaaggagcgccgggtggccaataacgcccgggagcggctgcgggtccgtgacatcaacgaggcctttaaggagctggggcgcatgtgccaactgcacctcaacagcgagaagccccagaccaaactgctcatcctgcaccaggctgtctcggtcatcctgaacttggagcagcaagtgcgagagcggaacctgaatcccaaagcagcctgtttgaaacggcgagaagaggaaaaggtgtcaggtgtggttggagacccccagatggtgctttcagctccccacccaggcctgagcgaagcccacaaccccgccgggcacatgtgaaagcagtaaacaaaacctgaaagcaagcaacaaaacatacactttgtcagagaagaaaaaaatgccttaactataaaaagcggagaaatggaaacatatcactcaagggggatgctgtggaaacctggcttattcttctaaagccaccagcaaattgtgcctaagcgaaatattttttttaaggaaaataaaaacattagttacaagattttttttttcttaatgtagatgaaaattagcaaggatgctgcctttggtctctggtttttttaagctttttttgcatatgttttgtaagcaacaaatttttttgtataaaagtcccgtgtctctcgctatttctgctgctgttcctagactgagcattgcatttcttgatcaaccagatgattaaacgttgtattaaaaagaccccgtgtaaacctgagcccccccgtccccccccccccccggaagccactgcacacagacagaacggggacaggcggcgggtcttttgtttttttgatgttgggggttctcttggttttgtcatgtggaaagtgatgcgtgggcgttccctgatgaaggcaccttggggcttccctgccgcatcctctcccctcaggaaggggactgacctgggcttgggggaagggacgtcagcaaggtggctctgaccctcccaggtgactctgccaagcagctgtggcccccagggctaccctacacaacgccctccccaggcccccctaagctgctctcccttggaacctgcacagctctctgaaatggggcattttgttgggaccagtgacccctggcatggggaccacaccctggagcccggtgctggggacctcctggacaccctgtccttcactcctttgccccagggacccaggctcatgctctgaactctggctgagaggatgctgctcaggagccagcacaggacaccccccaccccaccccaccatgtccccattacaccagagggccatcgtgacgtagacaggatgccaggggcctggccagcctcccccaatgctggggagcatccctgggcctggggccacacctgctgccctccctctgtgtggtccaagggcaagagtggctggagccgggggactgtgctggtctgagccccacgaaggccttgggctgtgcgtccgaccctgctgcagaaccagcagggtgtcccctcgggcccatctgtgtcccatgtcccagcacccaggcctctctccaggtctccttttctggtcttttgccatgagggtaaccagctcttcccagctggctggggactgtcttgggtttaaaactgcaagtctcctaccctgggatcccatccagttccacacgaactagggcagtggtcactgtggcacccaggtgtgggcctggctagctgggggccttcatgtgcccttcatgcccctccctgcattgaggccttgtggacccctgggctggctgtgttcatccccgctgcaggtcgggcgtctccccccgtgccactcctgagactcccaccgttacccccaggagatcctggactgcctgactcccctccccagactggcttgggagcctgggccccatggtagatgcaagggaaacctcaaggccagctcaatgcctggtatctgcccccagtccaggccaggcggaggggaggggctgtccggctgcctctcccttctcggtggcttcccctacgccctgggagtttgatctcttaagggaacttgcctctccctcttgttttgctcctggccctgcccctaggtctgggtgggcagtggccccatagcctctggaactgtgcgttctgcatagaattcaaacgagattcacccagcgcgaggaggaagaaacagcagttcctgggaaccacaattatggggggtggggggtgtgatctgagtgcctcaagatggttttcaaaaaaatttttttaaagaaaataattgtatacgtgtcaacacagctggctggatgattgggactttaaaacgaccctctttcaggtggattcagagacctgtcctgtatataacagcactgtagcaataaacgtgacattttataacgat

SEQ ID NO: 300771 - DNA, 4704 bp, Homo sapiens
ggcacgagggtgccggccgcgcccagagggtttccaggcctgaggtgcccgccctggccccaggagaatgaaccagccgcagaggatggcgcctgtgggcacagacaaggagctcagtgacctcctggacttcagcatgatgttcccgctgcctgtcaccaacgggaagggccggcccgcctccctggccggggcgcagttcggaggttcaggtcttgaggaccggcccagctcaggctcctggggcagcggcgaccagagcagctcctcctttgaccccagccggaccttcagcgagggcacccacttcactgagtcgcacagcagcctctcttcatccacattcctgggaccgggactcggaggcaagagcggtgagcggggcgcctatgcctccttcgggagagacgcaggcgtgggcggcctgactcaggctggcttcctgtcaggcgagctggccctcaacagccccgggcccctgtccccttcgggcatgaaggggacctcccagtactacccctcctactccggcagctcccggcggagagcggcagacggcagcctagacacgcagcccaagaaggtccggaaggtcccgccgggtcttccatcctcggtgtacccacccagctcaggtgaggactacggcagggatgccaccgcctacccgtccgccaagacccccagcagcacctatcccgcccccttctacgtggcagatggcagcctgcacccctcagccgagctctggagtcccccgggccaggcgggcttcgggcccatgctgggtgggggctcatccccgctgcccctcccgcccggtagcggcccggtgggcagcagtggaagcagcagcacgtttggtggcctgcaccagcacgagcgtatgggctaccagctgcatggagcagaggtgaacggtgggctcccatctgcatcctccttctcctcagcccccggagccacgtacggcggcgtctccagccacacgccgcctgtcagcggggccgacagcctcctgggctcccgagggaccacagctggcagctccggggatgccctcggcaaagcactggcctcgatctactccccggatcactcaagcaataacttctcgtccagcccttctacccccgtgggctccccccagggcctggcaggaacgtcacagtggcctcgagcaggagcccccggtgccttatcgcccagctacgacgggggtctccacggcctgcagagtaagatagaagaccacctggacgaggccatccacgtgctccgcagccacgccgtgggcacagccggcgacatgcacacgctgctgcctggccacggggcgctggcctcaggtttcaccggccccatgtcgctgggcgggcggcacgcaggcctggttggaggcagccaccccgaggacggcctcgcaggcagcaccagcctcatgcacaaccacgcggccctccccagccagccaggcaccctccctgacctgtctcggcctcccgactcctacagtgggctagggcgagcaggtgccacggcggccgccagcgagatcaagcgggaggagaaggaggacgaggagaacacgtcagcggctgaccactcggaggaggagaagaaggagctgaaggccccccgggcccggaccagcccagacgaggacgaggacgaccttctccccccagagcagaaggccgagcgggagaaggagcgccgggtggccaataacgcccgggagcggctgcgggtccgtgacatcaacgaggcctttaaggagctggggcgcatgtgccaactgcacctcaacagcgagaagccccagaccaaactgctcatcctgcaccaggctgtctcggtcatcctgaacttggagcagcaagtgcgagagcggaacctgaatcccaaagcagcctgtttgaaacggcgagaagaggaaaaggtgtcaggtgtggttggagacccccagatggtgctttcagctccccacccaggcctgagcgaagcccacaaccccgccgggcacatgtgaaaggtatgcctccgtgggacgagccacccgctttcagccctgtgctctggccccagaacggccactcgagaccccgggcttcatccacatccacacctcacacacctgttgtcagcatcgagccaacaccaacctgacaaggttcggagtgatgggggcggccaaggtgacactgggtccaggagctccctggggccctggcctaccactcactggcctcgctccccctgtccccgaatctcagccaccgtgtcactctgtgacctgtcccatggatcctgaaactgcatcttggccctgttgcctgggctgacaggagcattttttttttttccagtaaacaaaacctgaaagcaagcaacaaaacatacactttgtcagagaagaaaaaaatgccttaactataaaaagcggagaaatggaaacatatcactcaagggggatgctgtggaaacctggcttattcttctaaagccaccagcaaattgtgcctaagcgaaatattttttttaaggaaaataaaaacattagttacaagattttttttttcttaatgtagatgaaaattagcaaggatgctgcctttggtctctggtttttttaagctttttttgcatatgttttgtaagcaacaaatttttttgtataaaagtcccgtgtctctcgctatttctgctgctgttcctagactgagcattgcatttcttgatcaaccagatgattaaacgttgtattaaaaagaccccgtgtaaacctgagcccccccgtccccccccccccccggaagccactgcacacagacagaacggggacaggcggcgggtcttttgtttttttgatgttgggggttctcttggttttgtcatgtggaaagtgatgcgtgggcgttccctgatgaaggcaccttggggcttccctgccgcatcctctcccctcaggaaggggactgacctgggcttgggggaagggacgtcagcaaggtggctctgaccctcccaggtgactctgccaagcagctgtggcccccagggctaccctacacaacgccctccccaggcccccctaagctgctctcccttggaacctgcacagctctctgaaatggggcattttgttgggaccagtgacccctggcatggggaccacaccctggagcccggtgctggggacctcctggacaccctgtccttcactcctttgccccagggacccaggctcatgctctgaactctggctgagaggatgctgctcaggagccagcacaggacaccccccaccccaccccaccatgtccccattacaccagagggccatcgtgacgtagacaggatgccaggggcctggccagcctcccccaatgctggggagcatccctgggcctggggccacacctgctgccctccctctgtgtggtccaagggcaagagtggctggagccgggggactgtgctggtctgagccccacgaaggccttgggctgtgcgtccgaccctgctgcagaaccagcagggtgtcccctcgggcccatctgtgtcccatgtcccagcacccaggcctctctccaggtctccttttctggtcttttgccatgagggtaaccagctcttcccagctggctggggactgtcttgggtttaaaactgcaagtctcctaccctgggatcccatccagttccacacgaactagggcagtggtcactgtggcacccaggtgtgggcctggctagctgggggccttcatgtgcccttcatgcccctccctgcattgaggccttgtggacccctgggctggctgtgttcatccccgctgcaggtcgggcgtctccccccgtgccactcctgagactcccaccgttacccccaggagatcctggactgcctgactcccctccccagactggcttgggagcctgggccccatggtagatgcaagggaaacctcaaggccagctcaatgcctggtatctgcccccagtccaggccaggcggaggggaggggctgtccggctgcctctcccttctcggtggcttcccctacgccctgggagtttgatctcttaagggaacttgcctctccctcttgttttgctcctggccctgcccctaggtctgggtgggcagtggccccatagcctctggaactgtgcgttctgcatagaattcaaacgagattcacccagcgcgaggaggaagaaacagcagttcctgggaaccacaattatggggggtggggggtgtgatctgagtgcctcaagatggttttcaaaaaaatttttttaaagaaaataattgtatacgtgtcaacacagctggctggatgattgggactttaaaacgaccctctttcaggtggattcagagacctgtcctgtatataacagcactgtagcaataaacgtgacattttataacgatacacacacaaacccaccaacccgggcccccaatcagcggggcccggcgacacaggcgtacgcacgggccgtgcccacgcggtcccttacccggttctgtaccacgtgcaatcggcgcgcccccaagtggcgataatcgacacaggtactgtttacgactgccaggacacacccacccggtaacggaccagttcaaacggcacggacactaaatctgccacaaaaaccgatgagtcgacaaccactacccgcatacac

SEQ ID NO: 300772 - DNA, 4394 bp, Homo sapiens
ggcacgagggtgccggccgcgcccagagggtttccaggcctgaggtgcccgccctggccccaggagaatgaaccagccgcagaggatggcgcctgtgggcacagacaaggagctcagtgacctcctggacttcagcatgatgttcccgctgcctgtcaccaacgggaagggccggcccgcctccctggccggggcgcagttcggaggttcaggtcttgaggaccggcccagctcaggctcctggggcagcggcgaccagagcagctcctcctttgaccccagccggaccttcagcgagggcacccacttcactgagtcgcacagcagcctctcttcatccacattcctgggaccgggactcggaggcaagagcggtgagcggggcgcctatgcctccttcgggagagacgcaggcgtgggcggcctgactcaggctggcttcctgtcaggcgagctggccctcaacagccccgggcccctgtccccttcgggcatgaaggggacctcccagtactacccctcctactccggcagctcccggcggagagcggcagacggcagcctagacacgcagcccaagaaggtccggaaggtcccgccgggtcttccatcctcggtgtacccacccagctcaggtgaggactacggcagggatgccaccgcctacccgtccgccaagacccccagcagcacctatcccgcccccttctacgtggcagatggcagcctgcacccctcagccgagctctggagtcccccgggccaggcgggcttcgggcccatgctgggtgggggctcatccccgctgcccctcccgcccggtagcggcccggtgggcagcagtggaagcagcagcacgtttggtggcctgcaccagcacgagcgtatgggctaccagctgcatggagcagaggtgaacggtgggctcccatctgcatcctccttctcctcagcccccggagccacgtacggcggcgtctccagccacacgccgcctgtcagcggggccgacagcctcctgggctcccgagggaccacagctggcagctccggggatgccctcggcaaagcactggcctcgatctactccccggatcactcaagcaataacttctcgtccagcccttctacccccgtgggctccccccagggcctggcaggaacgtcacagtggcctcgagcaggagcccccggtgccttatcgcccagctacgacgggggtctccacggcctgcagagtaagatagaagaccacctggacgaggccatccacgtgctccgcagccacgccgtgggcacagccggcgacatgcacacgctgctgcctggccacggggcgctggcctcaggtttcaccggccccatgtcgctgggcgggcggcacgcaggcctggttggaggcagccaccccgaggacggcctcgcaggcagcaccagcctcatgcacaaccacgcggccctccccagccagccaggcaccctccctgacctgtctcggcctcccgactcctacagtgggctagggcgagcaggtgccacggcggccgccagcgagatcaagcgggaggagaaggaggacgaggagaacacgtcagcggctgaccactcggaggaggagaagaaggagctgaaggccccccgggcccggaccagcccagacgaggacgaggacgaccttctccccccagagcagaaggccgagcgggagaaggagcgccgggtggccaataacgcccgggagcggctgcgggtccgtgacatcaacgaggcctttaaggagctggggcgcatgtgccaactgcacctcaacagcgagaagccccagaccaaactgctcatcctgcaccaggctgtctcggtcatcctgaacttggagcagcaagtgcgagagcggaacctgaatcccaaagcagcctgtttgaaacggcgagaagaggccaggcctgagcgaagcccacaaccccgccgggcacatgtgaaaggtatgcctccgtgggacgagccacccgctttcagccctgtgctctggccccagaacggccactcgagaccccgggcttcatccacatccacacctcacacacctgttgtcagcatcgagccaacaccaacctgacaaggttcggagtgatgggggcggccaaggtgacactgggtccaggagctccctggggccctggcctaccactcactggcctcgctccccctgtccccgaatctcagccaccgtgtcactctgtgacctgtcccatggatcctgaaactgcatcttggccctgttgcctgggctgacaggagcattttttttttttccagtaaacaaaacctgaaagcaagcaacaaaacatacactttgtcagagaagaaaaaaatgccttaactataaaaagcggagaaatggaaacatatcactcaagggggatgctgtggaaacctggcttattcttctaaagccaccagcaaattgtgcctaagcgaaatattttttttaaggaaaataaaaacattagttacaagattttttttttcttaatgtagatgaaaattagcaaggatgctgcctttggtctctggtttttttaagctttttttgcatatgttttgtaagcaacaaatttttttgtataaaagtcccgtgtctctcgctatttctgctgctgttcctagactgagcattgcatttcttgatcaaccagatgattaaacgttgtattaaaaagaccccgtgtaaacctgagcccccccgtccccccccccccccggaagccactgcacacagacagaacggggacaggcggcgggtcttttgtttttttgatgttgggggttctcttggttttgtcatgtggaaagtgatgcgtgggcgttccctgatgaaggcaccttggggcttccctgccgcatcctctcccctcaggaaggggactgacctgggcttgggggaagggacgtcagcaaggtggctctgaccctcccaggtgactctgccaagcagctgtggcccccagggctaccctacacaacgccctccccaggcccccctaagctgctctcccttggaacctgcacagctctctgaaatggggcattttgttgggaccagtgacccctggcatggggaccacaccctggagcccggtgctggggacctcctggacaccctgtccttcactcctttgccccagggacccaggctcatgctctgaactctggctgagaggatgctgctcaggagccagcacaggacaccccccaccccaccccaccatgtccccattacaccagagggccatcgtgacgtagacaggatgccaggggcctggccagcctcccccaatgctggggagcatccctgggcctggggccacacctgctgccctccctctgtgtggtccaagggcaagagtggctggagccgggggactgtgctggtctgagccccacgaaggccttgggctgtgcgtccgaccctgctgcagaaccagcagggtgtcccctcgggcccatctgtgtcccatgtcccagcacccaggcctctctccaggtctccttttctggtcttttgccatgagggtaaccagctcttcccagctggctggggactgtcttgggtttaaaactgcaagtctcctaccctgggatcccatccagttccacacgaactagggcagtggtcactgtggcacccaggtgtgggcctggctagctgggggccttcatgtgcccttcatgcccctccctgcattgaggccttgtggacccctgggctggctgtgttcatccccgctgcaggtcgggcgtctccccccgtgccactcctgagactcccaccgttacccccaggagatcctggactgcctgactcccctccccagactggcttgggagcctgggccccatggtagatgcaagggaaacctcaaggccagctcaatgcctggtatctgcccccagtccaggccaggcggaggggaggggctgtccggctgcctctcccttctcggtggcttcccctacgccctgggagtttgatctcttaagggaacttgcctctccctcttgttttgctcctggccctgcccctaggtctgggtgggcagtggccccatagcctctggaactgtgcgttctgcatagaattcaaacgagattcacccagcgcgaggaggaagaaacagcagttcctgggaaccacaattatggggggtggggggtgtgatctgagtgcctcaagatggttttcaaaaaaatttttttaaagaaaataattgtatacgtgtcaacacagctggctggatgattgggactttaaaacgaccctctttcaggtggattcagagacctgtcctgtatataacagcactgtagcaataaacgtgacattttataacgat

SEQ ID NO: 300773 - DNA, 4674 bp, Homo sapiens
ggcacgagggtgccggccgcgcccagagggtttccaggcctgaggtgcccgccctggccccaggagaatgaaccagccgcagaggatggcgcctgtgggcacagacaaggagctcagtgacctcctggacttcagcatgatgttcccgctgcctgtcaccaacgggaagggccggcccgcctccctggccggggcgcagttcggaggttcaggtcttgaggaccggcccagctcaggctcctggggcagcggcgaccagagcagctcctcctttgaccccagccggaccttcagcgagggcacccacttcactgagtcgcacagcagcctctcttcatccacattcctgggaccgggactcggaggcaagagcggtgagcggggcgcctatgcctccttcgggagagacgcaggcgtgggcggcctgactcaggctggcttcctgtcaggcgagctggccctcaacagccccgggcccctgtccccttcgggcatgaaggggacctcccagtactacccctcctactccggcagctcccggcggagagcggcagacggcagcctagacacgcagcccaagaaggtccggaaggtcccgccgggtcttccatcctcggtgtacccacccagctcaggtgaggactacggcagggatgccaccgcctacccgtccgccaagacccccagcagcacctatcccgcccccttctacgtggcagatggcagcctgcacccctcagccgagctctggagtcccccgggccaggcgggcttcgggcccatgctgggtgggggctcatccccgctgcccctcccgcccggtagcggcccggtgggcagcagtggaagcagcagcacgtttggtggcctgcaccagcacgagcgtatgggctaccagctgcatggagcagaggtgaacggtgggctcccatctgcatcctccttctcctcagcccccggagccacgtacggcggcgtctccagccacacgccgcctgtcagcggggccgacagcctcctgggctcccgagggaccacagctggcagctccggggatgccctcggcaaagcactggcctcgatctactccccggatcactcaagcaataacttctcgtccagcccttctacccccgtgggctccccccagggcctggcaggaacgtcacagtggcctcgagcaggagcccccggtgccttatcgcccagctacgacgggggtctccacggcctgcagagtaagatagaagaccacctggacgaggccatccacgtgctccgcagccacgccgtgggcacagccggcgacatgcacacgctgctgcctggccacggggcgctggcctcaggtttcaccggccccatgtcgctgggcgggcggcacgcaggcctggttggaggcagccaccccgaggacggcctcgcaggcagcaccagcctcatgcacaaccacgcggccctccccagccagccaggcaccctccctgacctgtctcggcctcccgactcctacagtgggctagggcgagcaggtgccacggcggccgccagcgagatcaagcgggaggagaaggaggacgaggagaacacgtcagcggctgaccactcggaggaggagaagaaggagctgaaggccccccgggcccggaccagcccagacgaggacgaggacgaccttctccccccagagcagaaggccgagcgggagaaggagcgccgggtggccaataacgcccgggagcggctgcgggtccgtgacatcaacgaggcctttaaggagctggggcgcatgtgccaactgcacctcaacagcgagaagccccagaccaaactgctcatcctgcaccaggctgtctcggtcatcctgaacttggagcagcaagtgcgagcagtacggacgaggtgctgtccctggaggagaaagacctgagggaccgggagaggcgcatggccaataacgcgcgggagcgggtgcgcgtgcgggatattaacgaggccttccgggagctggggcgcatgtgccagatgcacctcaagtcggacaaagcgcagaccaagctgctcatcctgcagcaggccgtgcaggtcatcctggggctggagcagcaggtgcgagagcggaacctgaatcccaaagcagcctgtttgaaacggcgagaagaggaaaaggtgtcaggtgtggttggagacccccagatggtgctttcagctccccacccaggcctgagcgaagcccacaaccccgccgggcacatgtgaaaggtatgcctccgtgggacgagccacccgctttcagccctgtgctctggccccagaacggccactcgagaccccgggcttcatccacatccacacctcacacacctgttgtcagcatcgagccaacaccaacctgacaaggttcggagtgatgggggcggccaaggtgacactgggtccaggagctccctggggccctggcctaccactcactggcctcgctccccctgtccccgaatctcagccaccgtgtcactctgtgacctgtcccatggatcctgaaactgcatcttggccctgttgcctgggctgacaggagcattttttttttttccagtaaacaaaacctgaaagcaagcaacaaaacatacactttgtcagagaagaaaaaaatgccttaactataaaaagcggagaaatggaaacatatcactcaagggggatgctgtggaaacctggcttattcttctaaagccaccagcaaattgtgcctaagcgaaatattttttttaaggaaaataaaaacattagttacaagattttttttttcttaatgtagatgaaaattagcaaggatgctgcctttggtctctggtttttttaagctttttttgcatatgttttgtaagcaacaaatttttttgtataaaagtcccgtgtctctcgctatttctgctgctgttcctagactgagcattgcatttcttgatcaaccagatgattaaacgttgtattaaaaagaccccgtgtaaacctgagcccccccgtccccccccccccccggaagccactgcacacagacagaacggggacaggcggcgggtcttttgtttttttgatgttgggggttctcttggttttgtcatgtggaaagtgatgcgtgggcgttccctgatgaaggcaccttggggcttccctgccgcatcctctcccctcaggaaggggactgacctgggcttgggggaagggacgtcagcaaggtggctctgaccctcccaggtgactctgccaagcagctgtggcccccagggctaccctacacaacgccctccccaggcccccctaagctgctctcccttggaacctgcacagctctctgaaatggggcattttgttgggaccagtgacccctggcatggggaccacaccctggagcccggtgctggggacctcctggacaccctgtccttcactcctttgccccagggacccaggctcatgctctgaactctggctgagaggatgctgctcaggagccagcacaggacaccccccaccccaccccaccatgtccccattacaccagagggccatcgtgacgtagacaggatgccaggggcctggccagcctcccccaatgctggggagcatccctgggcctggggccacacctgctgccctccctctgtgtggtccaagggcaagagtggctggagccgggggactgtgctggtctgagccccacgaaggccttgggctgtgcgtccgaccctgctgcagaaccagcagggtgtcccctcgggcccatctgtgtcccatgtcccagcacccaggcctctctccaggtctccttttctggtcttttgccatgagggtaaccagctcttcccagctggctggggactgtcttgggtttaaaactgcaagtctcctaccctgggatcccatccagttccacacgaactagggcagtggtcactgtggcacccaggtgtgggcctggctagctgggggccttcatgtgcccttcatgcccctccctgcattgaggccttgtggacccctgggctggctgtgttcatccccgctgcaggtcgggcgtctccccccgtgccactcctgagactcccaccgttacccccaggagatcctggactgcctgactcccctccccagactggcttgggagcctgggccccatggtagatgcaagggaaacctcaaggccagctcaatgcctggtatctgcccccagtccaggccaggcggaggggaggggctgtccggctgcctctcccttctcggtggcttcccctacgccctgggagtttgatctcttaagggaacttgcctctccctcttgttttgctcctggccctgcccctaggtctgggtgggcagtggccccatagcctctggaactgtgcgttctgcatagaattcaaacgagattcacccagcgcgaggaggaagaaacagcagttcctgggaaccacaattatggggggtggggggtgtgatctgagtgcctcaagatggttttcaaaaaaatttttttaaagaaaataattgtatacgtgtcaacacagctggctggatgattgggactttaaaacgaccctctttcaggtggattcagagacctgtcctgtatataacagcactgtagcaataaacgtgacattttataacgat

SEQ ID NO: 300774 - DNA, 4412 bp, Homo sapiens
ggcacgagggtgccggccgcgcccagagggtttccaggcctgaggtgcccgccctggccccaggagaatgaaccagccgcagaggatggcgcctgtgggcacagacaaggagctcagtgacctcctggacttcagcatgatgttcccgctgcctgtcaccaacgggaagggccggcccgcctccctggccggggcgcagttcggaggttcaggtcttgaggaccggcccagctcaggctcctggggcagcggcgaccagagcagctcctcctttgaccccagccggaccttcagcgagggcacccacttcactgagtcgcacagcagcctctcttcatccacattcctgggaccgggactcggaggcaagagcggtgagcggggcgcctatgcctccttcgggagagacgcaggcgtgggcggcctgactcaggctggcttcctgtcaggcgagctggccctcaacagccccgggcccctgtccccttcgggcatgaaggggacctcccagtactacccctcctactccggcagctcccggcggagagcggcagacggcagcctagacacgcagcccaagaaggtccggaaggtcccgccgggtcttccatcctcggtgtacccacccagctcaggtgaggactacggcagggatgccaccgcctacccgtccgccaagacccccagcagcacctatcccgcccccttctacgtggcagatggcagcctgcacccctcagccgagctctggagtcccccgggccaggcgggcttcgggcccatgctgggtgggggctcatccccgctgcccctcccgcccggtagcggcccggtgggcagcagtggaagcagcagcacgtttggtggcctgcaccagcacgagcgtatgggctaccagctgcatggagcagaggtgaacggtgggctcccatctgcatcctccttctcctcagcccccggagccacgtacggcggcgtctccagccacacgccgcctgtcagcggggccgacagcctcctgggctcccgagggaccacagctggcagctccggggatgccctcggcaaagcactggcctcgatctactccccggatcactcaagcaataacttctcgtccagcccttctacccccgtgggctccccccagggcctggcaggaacgtcacagtggcctcgagcaggagcccccggtgccttatcgcccagctacgacgggggtctccacggcctgcagagtaagatagaagaccacctggacgaggccatccacgtgctccgcagccacgccgtgggcacagccggcgacatgcacacgctgctgcctggccacggggcgctggcctcaggtttcaccggccccatgtcgctgggcgggcggcacgcaggcctggttggaggcagccaccccgaggacggcctcgcaggcagcaccagcctcatgcacaaccacgcggccctccccagccagccaggcaccctccctgacctgtctcggcctcccgactcctacagtgggctagggcgagcaggtgccacggcggccgccagcgagatcaagcgggaggagaaggaggacgaggagaacacgtcagcggctgaccactcggaggaggagaagaaggagctgaaggccccccgggcccggaccagagcagaaggccgagcgggagaaggagcgccgggtggccaataacgcccgggagcggctgcgggtccgtgacatcaacgaggcctttaaggagctggggcgcatgtgccaactgcacctcaacagcgagaagccccagaccaaactgctcatcctgcaccaggctgtctcggtcatcctgaacttggagcagcaagtgcgagagcggaacctgaatcccaaagcagcctgtttgaaacggcgagaagaggaaaaggtgtcaggtgtggttggagacccccagatggtgctttcagctccccacccaggcctgagcgaagcccacaaccccgccgggcacatgtgaaaggtatgcctccgtgggacgagccacccgctttcagccctgtgctctggccccagaacggccactcgagaccccgggcttcatccacatccacacctcacacacctgttgtcagcatcgagccaacaccaacctgacaaggttcggagtgatgggggcggccaaggtgacactgggtccaggagctccctggggccctggcctaccactcactggcctcgctccccctgtccccgaatctcagccaccgtgtcactctgtgacctgtcccatggatcctgaaactgcatcttggccctgttgcctgggctgacaggagcattttttttttttccagtaaacaaaacctgaaagcaagcaacaaaacatacactttgtcagagaagaaaaaaatgccttaactataaaaagcggagaaatggaaacatatcactcaagggggatgctgtggaaacctggcttattcttctaaagccaccagcaaattgtgcctaagcgaaatattttttttaaggaaaataaaaacattagttacaagattttttttttcttaatgtagatgaaaattagcaaggatgctgcctttggtctctggtttttttaagctttttttgcatatgttttgtaagcaacaaatttttttgtataaaagtcccgtgtctctcgctatttctgctgctgttcctagactgagcattgcatttcttgatcaaccagatgattaaacgttgtattaaaaagaccccgtgtaaacctgagcccccccgtccccccccccccccggaagccactgcacacagacagaacggggacaggcggcgggtcttttgtttttttgatgttgggggttctcttggttttgtcatgtggaaagtgatgcgtgggcgttccctgatgaaggcaccttggggcttccctgccgcatcctctcccctcaggaaggggactgacctgggcttgggggaagggacgtcagcaaggtggctctgaccctcccaggtgactctgccaagcagctgtggcccccagggctaccctacacaacgccctccccaggcccccctaagctgctctcccttggaacctgcacagctctctgaaatggggcattttgttgggaccagtgacccctggcatggggaccacaccctggagcccggtgctggggacctcctggacaccctgtccttcactcctttgccccagggacccaggctcatgctctgaactctggctgagaggatgctgctcaggagccagcacaggacaccccccaccccaccccaccatgtccccattacaccagagggccatcgtgacgtagacaggatgccaggggcctggccagcctcccccaatgctggggagcatccctgggcctggggccacacctgctgccctccctctgtgtggtccaagggcaagagtggctggagccgggggactgtgctggtctgagccccacgaaggccttgggctgtgcgtccgaccctgctgcagaaccagcagggtgtcccctcgggcccatctgtgtcccatgtcccagcacccaggcctctctccaggtctccttttctggtcttttgccatgagggtaaccagctcttcccagctggctggggactgtcttgggtttaaaactgcaagtctcctaccctgggatcccatccagttccacacgaactagggcagtggtcactgtggcacccaggtgtgggcctggctagctgggggccttcatgtgcccttcatgcccctccctgcattgaggccttgtggacccctgggctggctgtgttcatccccgctgcaggtcgggcgtctccccccgtgccactcctgagactcccaccgttacccccaggagatcctggactgcctgactcccctccccagactggcttgggagcctgggccccatggtagatgcaagggaaacctcaaggccagctcaatgcctggtatctgcccccagtccaggccaggcggaggggaggggctgtccggctgcctctcccttctcggtggcttcccctacgccctgggagtttgatctcttaagggaacttgcctctccctcttgttttgctcctggccctgcccctaggtctgggtgggcagtggccccatagcctctggaactgtgcgttctgcatagaattcaaacgagattcacccagcgcgaggaggaagaaacagcagttcctgggaaccacaattatggggggtggggggtgtgatctgagtgcctcaagatggttttcaaaaaaatttttttaaagaaaataattgtatacgtgtcaacacagctggctggatgattgggactttaaaacgaccctctttcaggtggattcagagacctgtcctgtatataacagcactgtagcaataaacgtgacattttataacgat

SEQ ID NO: 300775 - DNA, 4639 bp, Homo sapiens
ggcacgagggtgccggccgcgcccagagggtttccaggcctgaggtgcccgccctggccccaggagaatgaaccagccgcagaggatggcgcctgtgggcacagacaaggagctcagtgacctcctggacttcagcatgatgttcccgctgcctgtcaccaacgggaagggccggcccgcctccctggccggggcgcagttcggaggttcaggtcttgaggaccggcccagctcaggctcctggggcagcggcgaccagagcagctcctcctttgaccccagccggaccttcagcgagggcacccacttcactgagtcgcacagcagcctctcttcatccacattcctgggaccgggactcggaggcaagagcggtgagcggggcgcctatgcctccttcgggagagacgcaggcgtgggcggcctgactcaggctggcttcctgtcaggcgagctggccctcaacagccccgggcccctgtccccttcgggcatgaaggggacctcccagtactacccctcctactccggcagctcccggcggagagcggcagacggcagcctagacacgcagcccaagaaggtccggaaggtcccgccgggtcttccatcctcggtgtacccacccagctcaggtgaggactacggcagggatgccaccgcctacccgtccgccaagacccccagcagcacctatcccgcccccttctacgtggcagatggcagcctgcacccctcagccgagctctggagtcccccgggccaggcgggcttcgggcccatgctgggtgggggctcatccccgctgcccctcccgcccggtagcggcccggtgggcagcagtggaagcagcagcacgtttggtggcctgcaccagcacgagcgtatgggctaccagctgcatggagcagaggtgaacggtgggctcccatctgcatcctccttctcctcagcccccggagccacgtacggcggcgtctccagccacacgccgcctgtcagcggggccgacagcctcctgggctcccgagggaccacagctggcagctccggggatgccctcggcaaagcactggcctcgatctactccccggatcactcaagcaataacttctcgtccagcccttctacccccgtgggctccccccagggcctggcaggaacgtcacagtggcctcgagcaggagcccccggtgccttatcgcccagctacgacgggggtctccacggcctgcagagtaagatagaagaccacctggacgaggccatccacgtgctccgcagccacgccgtgggcacagccggcgacatgcacacgctgctgcctggccacggggcgctggcctcaggtttcaccggccccatgtcgctgggcgggcggcacgcaggcctggttggaggcagccaccccgaggacggcctcgcaggcagcaccagcctcatgcacaaccacgcggccctccccagccagccaggcaccctccctgacctgtctcggcctcccgactcctacagtgggctagggcgagcaggtgccacggcggccgccagcgagatcaagcgggaggagaaggaggacgaggagaacacgtcagcggctgaccactcggaggaggagaagaaggagctgaaggccccccgggcccggaccagagcagaaggccgagcgggagaaggagcgccgggtggccaataacgcccgggagcggctgcgggtccgtgacatcaacgaggcctttaaggagctggggcgcatgtgccaactgcacctcaacagcgagaagccccagaccaaactgctcatcctgcaccaggctgtctcggtcatcctgaacttggagcagcaagtgcgagcagtacggacgaggtgctgtccctggaggagaaagacctgagggaccgggagaggcgcatggccaataacgcgcgggagcgggtgcgcgtgcgggatattaacgaggccttccgggagctggggcgcatgtgccagatgcacctcaagtcggacaaagcgcagaccaagctgctcatcctgcagcaggccgtgcaggtcatcctggggctggagcagcaggtgcgagagcggaacctgaatcccaaagcagcctgtttgaaacggcgagaagaggaaaaggtgtcaggtgtggttggagacccccagatggtgctttcagctccccacccaggcctgagcgaagcccacaaccccgccgggcacatgtgaaaggtatgcctccgtgggacgagccacccgctttcagccctgtgctctggccccagaacggccactcgagaccccgggcttcatccacatccacacctcacacacctgttgtcagcatcgagccaacaccaacctgacaaggttcggagtgatgggggcggccaaggtgacactgggtccaggagctccctggggccctggcctaccactcactggcctcgctccccctgtccccgaatctcagccaccgtgtcactctgtgacctgtcccatggatcctgaaactgcatcttggccctgttgcctgggctgacaggagcattttttttttttccagtaaacaaaacctgaaagcaagcaacaaaacatacactttgtcagagaagaaaaaaatgccttaactataaaaagcggagaaatggaaacatatcactcaagggggatgctgtggaaacctggcttattcttctaaagccaccagcaaattgtgcctaagcgaaatattttttttaaggaaaataaaaacattagttacaagattttttttttcttaatgtagatgaaaattagcaaggatgctgcctttggtctctggtttttttaagctttttttgcatatgttttgtaagcaacaaatttttttgtataaaagtcccgtgtctctcgctatttctgctgctgttcctagactgagcattgcatttcttgatcaaccagatgattaaacgttgtattaaaaagaccccgtgtaaacctgagcccccccgtccccccccccccccggaagccactgcacacagacagaacggggacaggcggcgggtcttttgtttttttgatgttgggggttctcttggttttgtcatgtggaaagtgatgcgtgggcgttccctgatgaaggcaccttggggcttccctgccgcatcctctcccctcaggaaggggactgacctgggcttgggggaagggacgtcagcaaggtggctctgaccctcccaggtgactctgccaagcagctgtggcccccagggctaccctacacaacgccctccccaggcccccctaagctgctctcccttggaacctgcacagctctctgaaatggggcattttgttgggaccagtgacccctggcatggggaccacaccctggagcccggtgctggggacctcctggacaccctgtccttcactcctttgccccagggacccaggctcatgctctgaactctggctgagaggatgctgctcaggagccagcacaggacaccccccaccccaccccaccatgtccccattacaccagagggccatcgtgacgtagacaggatgccaggggcctggccagcctcccccaatgctggggagcatccctgggcctggggccacacctgctgccctccctctgtgtggtccaagggcaagagtggctggagccgggggactgtgctggtctgagccccacgaaggccttgggctgtgcgtccgaccctgctgcagaaccagcagggtgtcccctcgggcccatctgtgtcccatgtcccagcacccaggcctctctccaggtctccttttctggtcttttgccatgagggtaaccagctcttcccagctggctggggactgtcttgggtttaaaactgcaagtctcctaccctgggatcccatccagttccacacgaactagggcagtggtcactgtggcacccaggtgtgggcctggctagctgggggccttcatgtgcccttcatgcccctccctgcattgaggccttgtggacccctgggctggctgtgttcatccccgctgcaggtcgggcgtctccccccgtgccactcctgagactcccaccgttacccccaggagatcctggactgcctgactcccctccccagactggcttgggagcctgggccccatggtagatgcaagggaaacctcaaggccagctcaatgcctggtatctgcccccagtccaggccaggcggaggggaggggctgtccggctgcctctcccttctcggtggcttcccctacgccctgggagtttgatctcttaagggaacttgcctctccctcttgttttgctcctggccctgcccctaggtctgggtgggcagtggccccatagcctctggaactgtgcgttctgcatagaattcaaacgagattcacccagcgcgaggaggaagaaacagcagttcctgggaaccacaattatggggggtggggggtgtgatctgagtgcctcaagatggttttcaaaaaaatttttttaaagaaaataattgtatacgtgtcaacacagctggctggatgattgggactttaaaacgaccctctttcaggtggattcagagacctgtcctgtatataacagcactgtagcaataaacgtgacattttataacgat

SEQ ID NO: 300776 - DNA, 4422 bp, Homo sapiens
ggcacgagggtgccggccgcgcccagagggtttccaggcctgaggtgcccgccctggccccaggagaatgaaccagccgcagaggatggcgcctgtgggcacagacaaggagctcagtgacctcctggacttcagcatgatgttcccgctgcctgtcaccaacgggaagggccggcccgcctccctggccggggcgcagttcggaggttcaggtcttgaggaccggcccagctcaggctcctggggcagcggcgaccagagcagctcctcctttgaccccagccggaccttcagcgagggcacccacttcactgagtcgcacagcagcctctcttcatccacattcctgggaccgggactcggaggcaagagcggtgagcggggcgcctatgcctccttcgggagagacgcaggcgtgggcggcctgactcaggctggcttcctgtcaggcgagctggccctcaacagccccgggcccctgtccccttcgggcatgaaggggacctcccagtactacccctcctactccggcagctcccggcggagagcggcagacggcagcctagacacgcagcccaagaaggtccggaaggtcccgccgggtcttccatcctcggtgtacccacccagctcaggtgaggactacggcagggatgccaccgcctacccgtccgccaagacccccagcagcacctatcccgcccccttctacgtggcagatggcagcctgcacccctcagccgagctctggagtcccccgggccaggcgggcttcgggcccatgctgggtgggggctcatccccgctgcccctcccgcccggtagcggcccggtgggcagcagtggaagcagcagcacgtttggtggcctgcaccagcacgagcgtatgggctaccagctgcatggagcagaggtgaacggtgggctcccatctgcatcctccttctcctcagcccccggagccacgtacggcggcgtctccagccacacgccgcctgtcagcggggccgacagcctcctgggctcccgagggaccacagctggcagctccggggatgccctcggcaaagcactggcctcgatctactccccggatcactcaagcaataacttctcgtccagcccttctacccccgtgggctccccccagggcctggcaggaacgtcacagtggcctcgagcaggagcccccggtgccttatcgcccagctacgacgggggtctccacggcctgcagagtaagatagaagaccacctggacgaggccatccacgtgctccgcagccacgccgtgggcacagccggcgacatgcacacgctgctgcctggccacggggcgctggcctcaggtttcaccggccccatgtcgctgggcgggcggcacgcaggcctggttggaggcagccaccccgaggacggcctcgcaggcagcaccagcctcatgcacaaccacgcggccctccccagccagccaggcaccctccctgacctgtctcggcctcccgactcctacagtgggctagggcgagcaggtgccacggcggccgccagcgagatcaagcgggaggagaaggaggacgaggagaacacgtcagcggctgaccactcggaggaggagaagaaggagctgaaggccccccgggcccggaccagcccagacgaggacgaggacgaccttctccccccagagcagaaggccgagcgggagaaggagcgccgggtggccaataacgcccgggagcggctgcgggtccgtgacatcaacgaggcctttaaggagctggggcgcatgtgccaactgcacctcaacagcgagaagccccagaccaaactgctcatcctgcaccaggctgtctcggtcatcagcggaacctgaatcccaaagcagcctgtttgaaacggcgagaagaggaaaaggtgtcaggtgtggttggagacccccagatggtgctttcagctccccacccaggcctgagcgaagcccacaaccccgccgggcacatgtgaaaggtatgcctccgtgggacgagccacccgctttcagccctgtgctctggccccagaacggccactcgagaccccgggcttcatccacatccacacctcacacacctgttgtcagcatcgagccaacaccaacctgacaaggttcggagtgatgggggcggccaaggtgacactgggtccaggagctccctggggccctggcctaccactcactggcctcgctccccctgtccccgaatctcagccaccgtgtcactctgtgacctgtcccatggatcctgaaactgcatcttggccctgttgcctgggctgacaggagcattttttttttttccagtaaacaaaacctgaaagcaagcaacaaaacatacactttgtcagagaagaaaaaaatgccttaactataaaaagcggagaaatggaaacatatcactcaagggggatgctgtggaaacctggcttattcttctaaagccaccagcaaattgtgcctaagcgaaatattttttttaaggaaaataaaaacattagttacaagattttttttttcttaatgtagatgaaaattagcaaggatgctgcctttggtctctggtttttttaagctttttttgcatatgttttgtaagcaacaaatttttttgtataaaagtcccgtgtctctcgctatttctgctgctgttcctagactgagcattgcatttcttgatcaaccagatgattaaacgttgtattaaaaagaccccgtgtaaacctgagcccccccgtccccccccccccccggaagccactgcacacagacagaacggggacaggcggcgggtcttttgtttttttgatgttgggggttctcttggttttgtcatgtggaaagtgatgcgtgggcgttccctgatgaaggcaccttggggcttccctgccgcatcctctcccctcaggaaggggactgacctgggcttgggggaagggacgtcagcaaggtggctctgaccctcccaggtgactctgccaagcagctgtggcccccagggctaccctacacaacgccctccccaggcccccctaagctgctctcccttggaacctgcacagctctctgaaatggggcattttgttgggaccagtgacccctggcatggggaccacaccctggagcccggtgctggggacctcctggacaccctgtccttcactcctttgccccagggacccaggctcatgctctgaactctggctgagaggatgctgctcaggagccagcacaggacaccccccaccccaccccaccatgtccccattacaccagagggccatcgtgacgtagacaggatgccaggggcctggccagcctcccccaatgctggggagcatccctgggcctggggccacacctgctgccctccctctgtgtggtccaagggcaagagtggctggagccgggggactgtgctggtctgagccccacgaaggccttgggctgtgcgtccgaccctgctgcagaaccagcagggtgtcccctcgggcccatctgtgtcccatgtcccagcacccaggcctctctccaggtctccttttctggtcttttgccatgagggtaaccagctcttcccagctggctggggactgtcttgggtttaaaactgcaagtctcctaccctgggatcccatccagttccacacgaactagggcagtggtcactgtggcacccaggtgtgggcctggctagctgggggccttcatgtgcccttcatgcccctccctgcattgaggccttgtggacccctgggctggctgtgttcatccccgctgcaggtcgggcgtctccccccgtgccactcctgagactcccaccgttacccccaggagatcctggactgcctgactcccctccccagactggcttgggagcctgggccccatggtagatgcaagggaaacctcaaggccagctcaatgcctggtatctgcccccagtccaggccaggcggaggggaggggctgtccggctgcctctcccttctcggtggcttcccctacgccctgggagtttgatctcttaagggaacttgcctctccctcttgttttgctcctggccctgcccctaggtctgggtgggcagtggccccatagcctctggaactgtgcgttctgcatagaattcaaacgagattcacccagcgcgaggaggaagaaacagcagttcctgggaaccacaattatggggggtggggggtgtgatctgagtgcctcaagatggttttcaaaaaaatttttttaaagaaaataattgtatacgtgtcaacacagctggctggatgattgggactttaaaacgaccctctttcaggtggattcagagacctgtcctgtatataacagcactgtagcaataaacgtgacattttataacgat

SEQ ID NO: 300777 - DNA, 4438 bp, Homo sapiens
ggcacgagggtgccggccgcgcccagagggtttccaggcctgaggtgcccgccctggccccaggagaatgaaccagccgcagaggatggcgcctgtgggcacagacaaggagctcagtgacctcctggacttcagcatgatgttcccgctgcctgtcaccaacgggaagggccggcccgcctccctggccggggcgcagttcggaggttcaggtcttgaggaccggcccagctcaggctcctggggcagcggcgaccagagcagctcctcctttgaccccagccggaccttcagcgagggcacccacttcactgagtcgcacagcagcctctcttcatccacattcctgggaccgggactcggaggcaagagcggtgagcggggcgcctatgcctccttcgggagagacgcaggcgtgggcggcctgactcaggctggcttcctgtcaggcgagctggccctcaacagccccgggcccctgtccccttcgggcatgaaggggacctcccagtactacccctcctactccggcagctcccggcggagagcggcagacggcagcctagacacgcagcccaagaaggtccggaaggtcccgccgggtcttccatcctcggtgtacccacccagctcaggtgaggactacggcagggatgccaccgcctacccgtccgccaagacccccagcagcacctatcccgcccccttctacgtggcagatggcagcctgcacccctcagccgagctctggagtcccccgggccaggcgggcttcgggcccatgctgggtgggggctcatccccgctgcccctcccgcccggtagcggcccggtgggcagcagtggaagcagcagcacgtttggtggcctgcaccagcacgagcgtatgggctaccagctgcatggagcagaggtgaacggtgggctcccatctgcatcctccttctcctcagcccccggagccacgtacggcggcgtctccagccacacgccgcctgtcagcggggccgacagcctcctgggctcccgagggaccacagctggcagctccggggatgccctcggcaaagcactggcctcgatctactccccggatcactcaagcaataacttctcgtccagcccttctacccccgtgggctccccccagggcctggcaggaacgtcacagtggcctcgagcaggagcccccggtgccttatcgcccagctacgacgggggtctccacggcctgcagagtaagatagaagaccacctggacgaggccatccacgtgctccgcagccacgccgtgggcacagccggcgacatgcacacgctgctgcctggccacggggcgctggcctcaggtttcaccggccccatgtcgctgggcgggcggcacgcaggcctggttggaggcagccaccccgaggacggcctcgcaggcagcaccagcctcatgcacaaccacgcggccctccccagccagccaggcaccctccctgacctgtctcggcctcccgactcctacagtgggctagggcgagcaggtgccacggcggccgccagcgagatcaagcgggaggagaaggaggacgaggagaacacgtcagcggctgaccactcggaggaggagaagaaggagctgaaggccccccgggcccggaccagcagtacggacgaggtgctgtccctggaggagaaagacctgagggaccgggagaggcgcatggccaataacgcgcgggagcgggtgcgcgtgcgggatattaacgaggccttccgggagctggggcgcatgtgccagatgcacctcaagtcggacaaagcgcagaccaagctgctcatcctgcagcaggccgtgcaggtcatcctggggctggagcagcaggtgcgagagcggaacctgaatcccaaagcagcctgtttgaaacggcgagaagaggaaaaggtgtcaggtgtggttggagacccccagatggtgctttcagctccccacccaggcctgagcgaagcccacaaccccgccgggcacatgtgaaaggtatgcctccgtgggacgagccacccgctttcagccctgtgctctggccccagaacggccactcgagaccccgggcttcatccacatccacacctcacacacctgttgtcagcatcgagccaacaccaacctgacaaggttcggagtgatgggggcggccaaggtgacactgggtccaggagctccctggggccctggcctaccactcactggcctcgctccccctgtccccgaatctcagccaccgtgtcactctgtgacctgtcccatggatcctgaaactgcatcttggccctgttgcctgggctgacaggagcattttttttttttccagtaaacaaaacctgaaagcaagcaacaaaacatacactttgtcagagaagaaaaaaatgccttaactataaaaagcggagaaatggaaacatatcactcaagggggatgctgtggaaacctggcttattcttctaaagccaccagcaaattgtgcctaagcgaaatattttttttaaggaaaataaaaacattagttacaagattttttttttcttaatgtagatgaaaattagcaaggatgctgcctttggtctctggtttttttaagctttttttgcatatgttttgtaagcaacaaatttttttgtataaaagtcccgtgtctctcgctatttctgctgctgttcctagactgagcattgcatttcttgatcaaccagatgattaaacgttgtattaaaaagaccccgtgtaaacctgagcccccccgtccccccccccccccggaagccactgcacacagacagaacggggacaggcggcgggtcttttgtttttttgatgttgggggttctcttggttttgtcatgtggaaagtgatgcgtgggcgttccctgatgaaggcaccttggggcttccctgccgcatcctctcccctcaggaaggggactgacctgggcttgggggaagggacgtcagcaaggtggctctgaccctcccaggtgactctgccaagcagctgtggcccccagggctaccctacacaacgccctccccaggcccccctaagctgctctcccttggaacctgcacagctctctgaaatggggcattttgttgggaccagtgacccctggcatggggaccacaccctggagcccggtgctggggacctcctggacaccctgtccttcactcctttgccccagggacccaggctcatgctctgaactctggctgagaggatgctgctcaggagccagcacaggacaccccccaccccaccccaccatgtccccattacaccagagggccatcgtgacgtagacaggatgccaggggcctggccagcctcccccaatgctggggagcatccctgggcctggggccacacctgctgccctccctctgtgtggtccaagggcaagagtggctggagccgggggactgtgctggtctgagccccacgaaggccttgggctgtgcgtccgaccctgctgcagaaccagcagggtgtcccctcgggcccatctgtgtcccatgtcccagcacccaggcctctctccaggtctccttttctggtcttttgccatgagggtaaccagctcttcccagctggctggggactgtcttgggtttaaaactgcaagtctcctaccctgggatcccatccagttccacacgaactagggcagtggtcactgtggcacccaggtgtgggcctggctagctgggggccttcatgtgcccttcatgcccctccctgcattgaggccttgtggacccctgggctggctgtgttcatccccgctgcaggtcgggcgtctccccccgtgccactcctgagactcccaccgttacccccaggagatcctggactgcctgactcccctccccagactggcttgggagcctgggccccatggtagatgcaagggaaacctcaaggccagctcaatgcctggtatctgcccccagtccaggccaggcggaggggaggggctgtccggctgcctctcccttctcggtggcttcccctacgccctgggagtttgatctcttaagggaacttgcctctccctcttgttttgctcctggccctgcccctaggtctgggtgggcagtggccccatagcctctggaactgtgcgttctgcatagaattcaaacgagattcacccagcgcgaggaggaagaaacagcagttcctgggaaccacaattatggggggtggggggtgtgatctgagtgcctcaagatggttttcaaaaaaatttttttaaagaaaataattgtatacgtgtcaacacagctggctggatgattgggactttaaaacgaccctctttcaggtggattcagagacctgtcctgtatataacagcactgtagcaataaacgtgacattttataacgat

SEQ ID NO: 300778 - DNA, 4107 bp, Homo sapiens
ggcacgagggtgccggccgcgcccagagggtttccaggcctgaggtgcccgccctggccccaggagaatgaaccagccgcagaggatggcgcctgtgggcacagacaaggagctcagtgacctcctggacttcagcatgatgttcccgctgcctgtcaccaacgggaagggccggcccgcctccctggccggggcgcagttcggaggttcaggtcttgaggaccggcccagctcaggctcctggggcagcggcgaccagagcagctcctcctttgaccccagccggaccttcagcgagggcacccacttcactgagtcgcacagcagcctctcttcatccacattcctgggaccgggactcggaggcaagagcggtgagcggggcgcctatgcctccttcgggagagacgcaggcgtgggcggcctgactcaggctggcttcctgtcaggcgagctggccctcaacagccccgggcccctgtccccttcgggcatgaaggggacctcccagtactacccctcctactccggcagctcccggcggagagcggcagacggcagcctagacacgcagcccaagaaggtccggaaggtcccgccgggtcttccatcctcggtgtacccacccagctcaggtgaggactacggcagggatgccaccgcctacccgtccgccaagacccccagcagcacctatcccgcccccttctacgtggcagatggcagcctgcacccctcagccgagctctggagtcccccgggccaggcgggcttcgggcccatgctgggtgggggctcatccccgctgcccctcccgcccggtagcggcccggtgggcagcagtggaagcagcagcacgtttggtggcctgcaccagcacgagcgtatgggctaccagctgcatggagcagaggtgaacggtgggctcccatctgcatcctccttctcctcagcccccggagccacgtacggcggcgtctccagccacacgccgcctgtcagcggggccgacagcctcctgggctcccgagggaccacagctggcagctccggggatgccctcggcaaagcactggcctcgatctactccccggatcactcaagcaataacttctcgtccagcccttctacccccgtgggctccccccagggcctggcaggaacgtcacagtggcctcgagcaggagcccccggtgccttatcgcccagctacgacgggggtctccacggcctgcagagtaagatagaagaccacctggacgaggccatccacgtgctccgcagccacgccgtgggcacagccggcgacatgcacacgctgctgcctggccacggggcgctggcctcaggtttcaccggccccatgtcgctgggcgggcggcacgcaggcctggttggaggcagccaccccgaggacggcctcgcaggcagcaccagcctcatgcacaaccacgcggccctccccagccagccaggcaccctccctgacctgtctcggcctcccgactcctacagtgggctagggcgagcaggtgccacggcggccgccagcgagatcaagcgggaggagaaggaggacgaggagaacacgtcagcggctgaccactcggaggaggagaagaaggagctgaaggccccccgggcccggaccagcagtacggacgaggtgctgtccctggaggagaaagacctgagggaccgggagaggcgcatggccaataacgcgcgggagcgggtgcgcgtgcgggatattaacgaggccttccgggagctggggcgcatgtgccagatgcacctcaagtcggacaaagcgcagaccaagctgctcatcctgcagcaggccgtgcaggtcatcctggggctggagcagcaggtgcgagagcggaacctgaatcccaaagcagcctgtttgaaacggcgagaagaggaaaaggtgtcaggtgtggttggagacccccagatggtgctttcagctccccacccaggcctgagcgaagcccacaaccccgccgggcacatgtgaaagcagtaaacaaaacctgaaagcaagcaacaaaacatacactttgtcagagaagaaaaaaatgccttaactataaaaagcggagaaatggaaacatatcactcaagggggatgctgtggaaacctggcttattcttctaaagccaccagcaaattgtgcctaagcgaaatattttttttaaggaaaataaaaacattagttacaagattttttttttcttaatgtagatgaaaattagcaaggatgctgcctttggtctctggtttttttaagctttttttgcatatgttttgtaagcaacaaatttttttgtataaaagtcccgtgtctctcgctatttctgctgctgttcctagactgagcattgcatttcttgatcaaccagatgattaaacgttgtattaaaaagaccccgtgtaaacctgagcccccccgtccccccccccccccggaagccactgcacacagacagaacggggacaggcggcgggtcttttgtttttttgatgttgggggttctcttggttttgtcatgtggaaagtgatgcgtgggcgttccctgatgaaggcaccttggggcttccctgccgcatcctctcccctcaggaaggggactgacctgggcttgggggaagggacgtcagcaaggtggctctgaccctcccaggtgactctgccaagcagctgtggcccccagggctaccctacacaacgccctccccaggcccccctaagctgctctcccttggaacctgcacagctctctgaaatggggcattttgttgggaccagtgacccctggcatggggaccacaccctggagcccggtgctggggacctcctggacaccctgtccttcactcctttgccccagggacccaggctcatgctctgaactctggctgagaggatgctgctcaggagccagcacaggacaccccccaccccaccccaccatgtccccattacaccagagggccatcgtgacgtagacaggatgccaggggcctggccagcctcccccaatgctggggagcatccctgggcctggggccacacctgctgccctccctctgtgtggtccaagggcaagagtggctggagccgggggactgtgctggtctgagccccacgaaggccttgggctgtgcgtccgaccctgctgcagaaccagcagggtgtcccctcgggcccatctgtgtcccatgtcccagcacccaggcctctctccaggtctccttttctggtcttttgccatgagggtaaccagctcttcccagctggctggggactgtcttgggtttaaaactgcaagtctcctaccctgggatcccatccagttccacacgaactagggcagtggtcactgtggcacccaggtgtgggcctggctagctgggggccttcatgtgcccttcatgcccctccctgcattgaggccttgtggacccctgggctggctgtgttcatccccgctgcaggtcgggcgtctccccccgtgccactcctgagactcccaccgttacccccaggagatcctggactgcctgactcccctccccagactggcttgggagcctgggccccatggtagatgcaagggaaacctcaaggccagctcaatgcctggtatctgcccccagtccaggccaggcggaggggaggggctgtccggctgcctctcccttctcggtggcttcccctacgccctgggagtttgatctcttaagggaacttgcctctccctcttgttttgctcctggccctgcccctaggtctgggtgggcagtggccccatagcctctggaactgtgcgttctgcatagaattcaaacgagattcacccagcgcgaggaggaagaaacagcagttcctgggaaccacaattatggggggtggggggtgtgatctgagtgcctcaagatggttttcaaaaaaatttttttaaagaaaataattgtatacgtgtcaacacagctggctggatgattgggactttaaaacgaccctctttcaggtggattcagagacctgtcctgtatataacagcactgtagcaataaacgtgacattttataacgat

SEQ ID NO: 300779 - DNA, 3624 bp, Homo sapiens
ggcacgagggtgccggccgcgcccagagggtttccaggcctgaggtgcccgccctggccccaggagaatgaaccagccgcagaggatggcgcctgtgggcacagacaaggagctcagtgacctcctggacttcagcatgatgttcccgctgcctgtcaccaacgggaagggccggcccgcctccctggccggggcgcagttcggaggttcaggtcttgaggaccggcccagctcaggctcctggggcagcggcgaccagagcagctcctcctttgaccccagccggaccttcagcgagggcacccacttcactgagtcgcacagcagcctctcttcatccacattcctgggaccgggactcggaggcaagagcggtgagcggggcgcctatgcctccttcgggagagacgcaggcgtgggcggcctgactcaggctggcttcctgtcaggcgagctggccctcaacagccccgggcccctgtccccttcgggcatgaaggggacctcccagtactacccctcctactccggcagctcccggcggagagcggcagacggcagcctagacacgcagcccaagaaggtccggaaggtcccgccgggtcttccatcctcggtgtacccacccagctcaggtgaggactacggcagggatgccaccgcctacccgtccgccaagacccccagcagcacctatcccgcccccttctacgtggcagatggcagcctgcacccctcagccgagctctggagtcccccgggccaggcgggcttcgggcccatgctgggtgggggctcatccccgctgcccctcccgcccggtagcggcccggtgggcagcagtggaagcagcagcacgtttggtggcctgcaccagcacgagcgtatgggctaccagctgcatggagcagaggtgaacggtgggctcccatctgcatcctccttctcctcagcccccggagccacgtacggcggcgtctccagccacacgccgcctgtcagcggggccgacagcctcctgggctcccgagggaccacagctggcagctccggggatgccctcggcaaagcactggcctcgatctactccccggatcactcaagcaataacttctcgtccagcccttctacccccgtgggctccccccagggcctggcaggaacgtcacagtggcctcgagcaggagcccccggtgccttatcgcccagctacgacgggggtctccacggcctgcagagtaagatagaagaccacctggacgaggccatccacgtgctccgcagccacgccgtgggcacagccggcgacatgcacacgctgctgcctggccacggggcgctggcctcaggtttcaccggccccatgtcgctgggcgggcggcacgcaggcctggttggaggcagccaccccgaggacggcctcgcaggcagcaccagcctcatgcacaaccacgcggccctccccagccagccaggcaccctccctgacctgtctcggcctcccgactcctacagtgggctagggcgagcaggtgccacggcggccgccagcgagatcaagcgggaggagaaggaggacgaggagaacacgtcagcggctgaccactcggaggaggagaagaaggagctgaaggccccccgggcccggaccagcccagacgaggacgaggacgaccttctccccccagagcagaaggccgagcgggagaaggagcgccgggtggccaataacgcccgggagcggctgcgggtccgtgacatcaacgaggcctttaaggagctggggcgcatgtgccaactgcacctcaacagcgagaagccccagaccaaactgctcatcctgcaccaggctgtctcggtcatcctgaacttggagcagcaagtgcgagagcggaacctgaatcccaaagcagcctgtttgaaacggcgagaagaggaaaaggtgtcaggtgtggttggagacccccagatggtgctttcagctccccacccaggcctgagcgaagcccacaaccccgccgggcacatgtgaaaggtatgcctccgtgggacgagccacccgctttcagccctgtgctctggccccagaacggccactcgagaccccgggcttcatccacatccacacctcacacacctgttgtcagcatcgagccaacaccaacctgacaaggttcggagtgatgggggcggccaaggtgacactgggtccaggagctccctggggccctggcctaccactcactggcctcgctccccctgtccccgaatctcagccaccgtgtcactctgtgacctgtcccatggatcctgaaactgcatcttggccctgttgcctgggctgacaggagcattttttttttttccagtaaacaaaacctgaaagcaagcaacaaaacatacactttgtcagagaagaaaaaaatgccttaactataaaaagcggagaaatggaaacatatcactcaagggggatgctgtggaaacctggcttattcttctaaagccaccagcaaattgtgcctaagcgaaatattttttttaaggaaaataaaaacattagttacaagattttttttttcttaatgtagatgaaaattagcaaggatgctgcctttggtctctggtttttttaagctttttttgcatatgttttgtaagcaacaaatttttttgtataaaagtcccgtgtctctcgctatttctgctgctgttcctagactgagcattgcatttcttgatcaaccagatgattaaacgttgtattaaaaagaccccgtgtaaacctgagcccccccgtccccccccccccccggaagccactgcacacagacagaacggggacaggcggcgggtcttttgtttttttgatgttgggggttctcttggttttgtcatgtggaaagtgatgcgtgggcgttccctgatgaaggcaccttggggcttccctgccgcatcctctcccctcaggaaggggactgacctgggcttgggggaagggacgtcagcaaggtggctctgaccctcccaggtgactctgccaagcagctgtggcccccagggctaccctacacaacgccctccccaggcccccctaagctgctctcccttggaacctgcacagctctctgaaatggggcattttgttgggaccagtgacccctggcatggggaccacaccctggagcccggtgctggggacctcctggacaccctgtccttcactcctttgccccagggacccaggctcatgctctgaactctggctgagaggatgctgctcaggagccagcacaggacaccccccaccccaccccaccatgtccccattacaccagaggcctctggaactgtgcgttctgcatagaattcaaacgagattcacccagcgcgaggaggaagaaacagcagttcctgggaaccacaattatggggggtggggggtgtgatctgagtgcctcaagatggttttcaaaaaaatttttttaaagaaaataattgtatacgtgtcaacacagctggctggatgattgggactttaaaacgaccctctttcaggtggattcagagacctgtcctgtatataacagcactgtagcaataaacgtgacattttataacgat

SEQ ID NO: 300780 - DNA, 4528 bp, Homo sapiens
ggcacgagggtgccggccgcgcccagagggtttccaggcctgaggtgcccgccctggccccaggagaatgaaccagccgcagaggatggcgcctgtgggcacagacaaggagctcagtgacctcctggacttcagcatgatgttcccgctgcctgtcaccaacgggaagggccggcccgcctccctggccggggcgcagttcggaggttcaggtcttgaggaccggcccagctcaggctcctggggcagcggcgaccagagcagctcctcctttgaccccagccggaccttcagcgagggcacccacttcactgagtcgcacagcagcctctcttcatccacattcctgggaccgggactcggaggcaagagcggtgagcggggcgcctatgcctccttcgggagagacgcaggcgtgggcggcctgactcaggctggcttcctgtcaggcgagctggccctcaacagccccgggcccctgtccccttcgggcatgaaggggacctcccagtactacccctcctactccggcagctcccggcggagagcggcagacggcagcctagacacgcagcccaagaaggtccggaaggtcccgccgggtcttccatcctcggtgtacccacccagctcaggtgaggactacggcagggatgccaccgcctacccgtccgccaagacccccagcagcacctatcccgcccccttctacgtggcagatggcagcctgcacccctcagccgagctctggagtcccccgggccaggcgggcttcgggcccatgctgggtgggggctcatccccgctgcccctcccgcccggtagcggcccggtgggcagcagtggaagcagcagcacgtttggtggcctgcaccagcacgagcgtatgggctaccagctgcatggagcagaggtgaacggtgggctcccatctgcatcctccttctcctcagcccccggagccacgtacggcggcgtctccagccacacgccgcctgtcagcggggccgacagcctcctgggctcccgagggaccacagctggcagctccggggatgccctcggcaaagcactggcctcgatctactccccggatcactcaagcaataacttctcgtccagcccttctacccccgtgggctccccccagggcctggcaggaacgtcacagtggcctcgagcaggagcccccggtgccttatcgcccagctacgacgggggtctccacggcctgcagagtaagatagaagaccacctggacgaggccatccacgtgctccgcagccacgccgtgggcacagccggcgacatgcacacgctgctgcctggccacggggcgctggcctcaggtttcaccggccccatgtcgctgggcgggcggcacgcaggcctggtgagcgctgggcgagggtggagctgggcagtgggcggggacccggctccccctgatgcacccgtctccccacgcctgcaggttggaggcagccaccccgaggacggcctcgcaggcagcaccagcctcatgcacaaccacgcggccctccccagccagccaggcaccctccctgacctgtctcggcctcccgactcctacagtgggctagggcgagcaggtgccacggcggccgccagcgagatcaagcgggaggagaaggaggacgaggagaacacgtcagcggctgaccactcggaggaggagaagaaggagctgaaggccccccgggcccggaccagcccagacgaggacgaggacgaccttctccccccagagcagaaggccgagcgggagaaggagcgccgggtggccaataacgcccgggagcggctgcgggtccgtgacatcaacgaggcctttaaggagctggggcgcatgtgccaactgcacctcaacagcgagaagccccagaccaaactgctcatcctgcaccaggctgtctcggtcatcctgaacttggagcagcaagtgcgagagcggaacctgaatcccaaagcagcctgtttgaaacggcgagaagaggaaaaggtgtcaggtgtggttggagacccccagatggtgctttcagctccccacccaggcctgagcgaagcccacaaccccgccgggcacatgtgaaaggtatgcctccgtgggacgagccacccgctttcagccctgtgctctggccccagaacggccactcgagaccccgggcttcatccacatccacacctcacacacctgttgtcagcatcgagccaacaccaacctgacaaggttcggagtgatgggggcggccaaggtgacactgggtccaggagctccctggggccctggcctaccactcactggcctcgctccccctgtccccgaatctcagccaccgtgtcactctgtgacctgtcccatggatcctgaaactgcatcttggccctgttgcctgggctgacaggagcattttttttttttccagtaaacaaaacctgaaagcaagcaacaaaacatacactttgtcagagaagaaaaaaatgccttaactataaaaagcggagaaatggaaacatatcactcaagggggatgctgtggaaacctggcttattcttctaaagccaccagcaaattgtgcctaagcgaaatattttttttaaggaaaataaaaacattagttacaagattttttttttcttaatgtagatgaaaattagcaaggatgctgcctttggtctctggtttttttaagctttttttgcatatgttttgtaagcaacaaatttttttgtataaaagtcccgtgtctctcgctatttctgctgctgttcctagactgagcattgcatttcttgatcaaccagatgattaaacgttgtattaaaaagaccccgtgtaaacctgagcccccccgtccccccccccccccggaagccactgcacacagacagaacggggacaggcggcgggtcttttgtttttttgatgttgggggttctcttggttttgtcatgtggaaagtgatgcgtgggcgttccctgatgaaggcaccttggggcttccctgccgcatcctctcccctcaggaaggggactgacctgggcttgggggaagggacgtcagcaaggtggctctgaccctcccaggtgactctgccaagcagctgtggcccccagggctaccctacacaacgccctccccaggcccccctaagctgctctcccttggaacctgcacagctctctgaaatggggcattttgttgggaccagtgacccctggcatggggaccacaccctggagcccggtgctggggacctcctggacaccctgtccttcactcctttgccccagggacccaggctcatgctctgaactctggctgagaggatgctgctcaggagccagcacaggacaccccccaccccaccccaccatgtccccattacaccagagggccatcgtgacgtagacaggatgccaggggcctggccagcctcccccaatgctggggagcatccctgggcctggggccacacctgctgccctccctctgtgtggtccaagggcaagagtggctggagccgggggactgtgctggtctgagccccacgaaggccttgggctgtgcgtccgaccctgctgcagaaccagcagggtgtcccctcgggcccatctgtgtcccatgtcccagcacccaggcctctctccaggtctccttttctggtcttttgccatgagggtaaccagctcttcccagctggctggggactgtcttgggtttaaaactgcaagtctcctaccctgggatcccatccagttccacacgaactagggcagtggtcactgtggcacccaggtgtgggcctggctagctgggggccttcatgtgcccttcatgcccctccctgcattgaggccttgtggacccctgggctggctgtgttcatccccgctgcaggtcgggcgtctccccccgtgccactcctgagactcccaccgttacccccaggagatcctggactgcctgactcccctccccagactggcttgggagcctgggccccatggtagatgcaagggaaacctcaaggccagctcaatgcctggtatctgcccccagtccaggccaggcggaggggaggggctgtccggctgcctctcccttctcggtggcttcccctacgccctgggagtttgatctcttaagggaacttgcctctccctcttgttttgctcctggccctgcccctaggtctgggtgggcagtggccccatagcctctggaactgtgcgttctgcatagaattcaaacgagattcacccagcgcgaggaggaagaaacagcagttcctgggaaccacaattatggggggtggggggtgtgatctgagtgcctcaagatggttttcaaaaaaatttttttaaagaaaataattgtatacgtgtcaacacagctggctggatgattgggactttaaaacgaccctctttcaggtggattcagagacctgtcctgtatataacagcactgtagcaataaacgtgacattttataacgat

SEQ ID NO: 300781 - DNA, 2772 bp, Homo sapiens
ggcacgagggtgccggccgcgcccagagggtttccaggcctgaggtgcccgccctggccccaggagaatgaaccagccgcagaggatggcgcctgtgggcacagacaaggagctcagtgacctcctggacttcagcatgatgttcccgctgcctgtcaccaacgggaagggccggcccgcctccctggccggggcgcagttcggaggttcaggtcttgaggaccggcccagctcaggctcctggggcagcggcgaccagagcagctcctcctttgaccccagccggaccttcagcgagggcacccacttcactgagtcgcacagcagcctctcttcatccacattcctgggaccgggactcggaggcaagagcggtgagcggggcgcctatgcctccttcgggagagacgcaggcgtgggcggcctgactcaggctggcttcctgtcaggcgagctggccctcaacagccccgggcccctgtccccttcgggcatgaaggggacctcccagtactacccctcctactccggcagctcccggcggagagcggcagacggcagcctagacacgcagcccaagaaggtccggaaggtcccgccgggtcttccatcctcggtgtacccacccagctcaggtgaggactacggcagggatgccaccgcctacccgtccgccaagacccccagcagcacctatcccgcccccttctacgtggcagatggcagcctgcacccctcagccgagctctggagtcccccgggccaggcgggcttcgggcccatgctgggtgggggctcatccccgctgcccctcccgcccggtagcggcccggtgggcagcagtggaagcagcagcacgtttggtggcctgcaccagcacgagcgtatgggctaccagctgcatggagcagaggtgaacggtgggctcccatctgcatcctccttctcctcagcccccggagccacgtacggcggcgtctccagccacacgccgcctgtcagcggggccgacagcctcctgggctcccgagggaccacagctggcagctccggggatgccctcggcaaagcactggcctcgatctactccccggatcactcaagcaataacttctcgtccagcccttctacccccgtgggctccccccagggcctggcaggaacgtcacagtggcctcgagcaggagcccccggtgccttatcgcccagctacgacgggggtctccacggcctgcagagtaagatagaagaccacctggacgaggccatccacgtgctccgcagccacgccgtgggcacagccggcgacatgcacacgctgctgcctggccacggggcgctggcctcaggtttcaccggccccatgtcgctgggcgggcggcacgcaggcctggttggaggcagccaccccgaggacggcctcgcaggcagcaccagcctcatgcacaaccacgcggccctccccagccagccaggcaccctccctgacctgtctcggcctcccgactcctacagtgggctagggcgagcaggtgccacggcggccgccagcgagatcaagcgggaggagaaggaggacgaggagaacacgtcagcggctgaccactcggaggaggagaagaaggagctgaaggccccccgggcccggaccagcccagacgaggacgaggacgaccttctccccccagagcagaaggccgagcgggagaaggagcgccgggtggccaataacgcccgggagcggctgcgggtccgtgacatcaacgaggcctttaaggagctggggcgcatgtgccaactgcacctcaacagcgagaagccccagaccaaactgctcatcctgcaccaggctgtctcggtcatcctgaacttggagcagcaagtgcgagagcggaacctgaatcccaaagcagcctgtttgaaacggcgagaagaggaaaaggtgtcaggtgtggttggagacccccagatggtgctttcagctccccacccaggcctgagcgaagcccacaaccccgccgggcacatgtgaaaggtatgcctccgtgggacgagccacccgctttcagccctgtgctctggccccagaacggccactcgagaccccgggcttcatccacatccacacctcacacacctgttgtcagcatcgagccaacaccaacctgacaaggttcggagtgatgggggcggccaaggtgacactgggtccaggagctccctggggccctggcctaccactcactggcctcgctccccctgtccccgaatctcagccaccgtgtcactctgtgacctgtcccatggatcctgaaactgcatcttggccctgttgcctgggctgacaggagcattttttttttttccagtaaacaaaacctgaaagcaagcaacaaaacatacactttgtcagagaagaaaaaaatgccttaactataaaaagcggagaaatggaaacatatcactcaagggggatgctgtggaaacctggcttattcttctaaagccaccagcaaattgtgcctaagcgaaatattttttttaaggaaaataaaaacattagttacaagattttttttttcttaatgtagatgaaaattagcaaggatgctgcctttggtctctggtttttttaagctttttttgcatatgttttgtaagcaacaaatttttttgtataaaagtcccgtgtctctcgctatttctgctgctgttcctagactgagcattgcatttcttgatcaaccagatgattaaacgttgtattaaaaa

SEQ ID NO: 300782 - DNA, 3962 bp, Homo sapiens
ggcacgagggtgccggccgcgcccagagggtttccaggcctgaggtgcccgccctggccccaggagaatgaaccagccgcagaggatggcgcctgtgggcacagacaaggagctcagtgacctcctggacttcagcatgatgttcccgctgcctgtcaccaacgggaagggccggcccgcctccctggccggggcgcagttcggaggttcaggtcttgaggaccggcccagctcaggctcctggggcagcggcgaccagagcagctcctcctttgaccccagccggaccttcagcgagggcacccacttcactgagtcgcacagcagcctctcttcatccacattcctgggaccgggactcggaggcaagagcggtgagcggggcgcctatgcctccttcgggagagacgcaggcgtgggcggcctgactcaggctggcttcctgtcaggcgagctggccctcaacagccccgggcccctgtccccttcgggcatgaaggggacctcccagtactacccctcctactccggcagctcccggcggagagcggcagacggcagcctagacacgcagcccaagaaggtccggaaggtcccgccgggtcttccatcctcggtgtacccacccagctcaggtgaggactacggcagggatgccaccgcctacccgtccgccaagacccccagcagcacctatcccgcccccttctacgtggcagatggcagcctgcacccctcagccgagctctggagtcccccgggccaggcgggcttcgggcccatgctgggtgggggctcatccccgctgcccctcccgcccggtagcggcccggtgggcagcagtggaagcagcagcacgtttggtggcctgcaccagcacgagcgtatgggctaccagctgcatggagcagaggtgaacggtgggctcccatctgcatcctccttctcctcagcccccggagccacgtacggcggcgtctccagccacacgccgcctgtcagcggggccgacagcctcctgggctcccgagggaccacagctggcagctccggggatgccctcggcaaagcactggcctcgatctactccccggatcactcaagcaataacttctcgtccagcccttctacccccgtgggctccccccagggcctggcaggaacgtcacagtggcctcgagcaggagcccccggtgccttatcgcccagctacgacgggggtctccacggcctgcagagtaagatagaagaccacctggacgaggccatccacgtgctccgcagccacgccgtgggcacagccggcgacatgcacacgctgctgcctggccacggggcgctggcctcaggtttcaccggccccatgtcgctgggcgggcggcacgcaggcctggttggaggcagccaccccgaggacggcctcgcaggcagcaccagcctcatgcacaaccacgcggccctccccagccagccaggcaccctccctgacctgtctcggcctcccgactcctacagtgggctagggcgagcaggtgccacggcggccgccagcgagatcaagcgggaggagaaggaggacgaggagaacacgtcagcggctgaccactcggaggaggagaagaaggagctgaaggccccccgggcccggaccagcagtacggacgaggtgctgtccctggaggagaaagacctgagggaccgggagaggcgcatggccaataacgcgcgggagcgggtgcgcgtgcgggatattaacgaggccttccgggagctggggcgcatgtgccagatgcacctcaagtcggacaaagcgcagaccaagctgctcatcctgcagcaggccgtgcaggtcatcctggggctggagcagcaggtgcgagagcggaacctgaatcccaaagcagcctgtttgaaacggcgagaagaggaaaaggtgtcaggtgtggttggagacccccagatggtgctttcagctccccacccaggcctgagcgaagcccacaaccccgccgggcacatgtgaaagcagtaaacaaaacctgaaagcaagcaacaaaacatacactttgtcagagaagaaaaaaatgccttaactataaaaagcggagaaatggaaacatatcactcaagggggatgctgtggaaacctggcttattcttctaaagccaccagcaaattgtgcctaagcgaaataaaagtcccgtgtctctcgctatttctgctgctgttcctagactgagcattgcatttcttgatcaaccagatgattaaacgttgtattaaaaagaccccgtgtaaacctgagcccccccgtccccccccccccccggaagccactgcacacagacagaacggggacaggcggcgggtcttttgtttttttgatgttgggggttctcttggttttgtcatgtggaaagtgatgcgtgggcgttccctgatgaaggcaccttggggcttccctgccgcatcctctcccctcaggaaggggactgacctgggcttgggggaagggacgtcagcaaggtggctctgaccctcccaggtgactctgccaagcagctgtggcccccagggctaccctacacaacgccctccccaggcccccctaagctgctctcccttggaacctgcacagctctctgaaatggggcattttgttgggaccagtgacccctggcatggggaccacaccctggagcccggtgctggggacctcctggacaccctgtccttcactcctttgccccagggacccaggctcatgctctgaactctggctgagaggatgctgctcaggagccagcacaggacaccccccaccccaccccaccatgtccccattacaccagagggccatcgtgacgtagacaggatgccaggggcctggccagcctcccccaatgctggggagcatccctgggcctggggccacacctgctgccctccctctgtgtggtccaagggcaagagtggctggagccgggggactgtgctggtctgagccccacgaaggccttgggctgtgcgtccgaccctgctgcagaaccagcagggtgtcccctcgggcccatctgtgtcccatgtcccagcacccaggcctctctccaggtctccttttctggtcttttgccatgagggtaaccagctcttcccagctggctggggactgtcttgggtttaaaactgcaagtctcctaccctgggatcccatccagttccacacgaactagggcagtggtcactgtggcacccaggtgtgggcctggctagctgggggccttcatgtgcccttcatgcccctccctgcattgaggccttgtggacccctgggctggctgtgttcatccccgctgcaggtcgggcgtctccccccgtgccactcctgagactcccaccgttacccccaggagatcctggactgcctgactcccctccccagactggcttgggagcctgggccccatggtagatgcaagggaaacctcaaggccagctcaatgcctggtatctgcccccagtccaggccaggcggaggggaggggctgtccggctgcctctcccttctcggtggcttcccctacgccctgggagtttgatctcttaagggaacttgcctctccctcttgttttgctcctggccctgcccctaggtctgggtgggcagtggccccatagcctctggaactgtgcgttctgcatagaattcaaacgagattcacccagcgcgaggaggaagaaacagcagttcctgggaaccacaattatggggggtggggggtgtgatctgagtgcctcaagatggttttcaaaaaaatttttttaaagaaaataattgtatacgtgtcaacacagctggctggatgattgggactttaaaacgaccctctttcaggtggattcagagacctgtcctgtatataacagcactgtagcaataaacgtgacattttataacgat

SEQ ID NO: 300783 - DNA, 4288 bp, Homo sapiens
ggcacgagggtgccggccgcgcccagagggtttccaggcctgaggtgcccgccctggccccaggagaatgaaccagccgcagaggatggcgcctgtgggcacagacaaggagctcagtgacctcctggacttcagcatgatgttcccgctgcctgtcaccaacgggaagggccggcccgcctccctggccggggcgcagttcggaggttcaggtcttgaggaccggcccagctcaggctcctggggcagcggcgaccagagcagctcctcctttgaccccagccggaccttcagcgagggcacccacttcactgagtcgcacagcagcctctcttcatccacattcctgggaccgggactcggaggcaagagcggtgagcggggcgcctatgcctccttcgggagagacgcaggcgtgggcggcctgactcaggctggcttcctgtcaggcgagctggccctcaacagccccgggcccctgtccccttcgggcatgaaggggacctcccagtactacccctcctactccggcagctcccggcggagagcggcagacggcagcctagacacgcagcccaagaaggtccggaaggtcccgccgggtcttccatcctcggtgtacccacccagctcaggtgaggactacggcagggatgccaccgcctacccgtccgccaagacccccagcagcacctatcccgcccccttctacgtggcagatggcagcctgcacccctcagccgagctctggagtcccccgggccaggcgggcttcgggcccatgctgggtgggggctcatccccgctgcccctcccgcccggtagcggcccggtgggcagcagtggaagcagcagcacgtttggtggcctgcaccagcacgagcgtatgggctaccagctgcatggagcagaggtgaacggtgggctcccatctgcatcctccttctcctcagcccccggagccacgtacggcggcgtctccagccacacgccgcctgtcagcggggccgacagcctcctgggctcccgagggaccacagctggcagctccggggatgccctcggcaaagcactggcctcgatctactccccggatcactcaagcaataacttctcgtccagcccttctacccccgtgggctccccccagggcctggcaggaacgtcacagtggcctcgagcaggagcccccggtgccttatcgcccagctacgacgggggtctccacggcctggttggaggcagccaccccgaggacggcctcgcaggcagcaccagcctcatgcacaaccacgcggccctccccagccagccaggcaccctccctgacctgtctcggcctcccgactcctacagtgggctagggcgagcaggtgccacggcggccgccagcgagatcaagcgggaggagaaggaggacgaggagaacacgtcagcggctgaccactcggaggaggagaagaaggagctgaaggccccccgggcccggaccagcccagacgaggacgaggacgaccttctccccccagagcagaaggccgagcgggagaaggagcgccgggtggccaataacgcccgggagcggctgcgggtccgtgacatcaacgaggcctttaaggagctggggcgcatgtgccaactgcacctcaacagcgagaagccccagaccaaactgctcatcctgcaccaggctgtctcggtcatcctgaacttggagcagcaagtgcgagagcggaacctgaatcccaaagcagcctgtttgaaacggcgagaagaggaaaaggtgtcaggtgtggttggagacccccagatggtgctttcagctccccacccaggcctgagcgaagcccacaaccccgccgggcacatgtgaaaggtatgcctccgtgggacgagccacccgctttcagccctgtgctctggccccagaacggccactcgagaccccgggcttcatccacatccacacctcacacacctgttgtcagcatcgagccaacaccaacctgacaaggttcggagtgatgggggcggccaaggtgacactgggtccaggagctccctggggccctggcctaccactcactggcctcgctccccctgtccccgaatctcagccaccgtgtcactctgtgacctgtcccatggatcctgaaactgcatcttggccctgttgcctgggctgacaggagcattttttttttttccagtaaacaaaacctgaaagcaagcaacaaaacatacactttgtcagagaagaaaaaaatgccttaactataaaaagcggagaaatggaaacatatcactcaagggggatgctgtggaaacctggcttattcttctaaagccaccagcaaattgtgcctaagcgaaatattttttttaaggaaaataaaaacattagttacaagattttttttttcttaatgtagatgaaaattagcaaggatgctgcctttggtctctggtttttttaagctttttttgcatatgttttgtaagcaacaaatttttttgtataaaagtcccgtgtctctcgctatttctgctgctgttcctagactgagcattgcatttcttgatcaaccagatgattaaacgttgtattaaaaagaccccgtgtaaacctgagcccccccgtccccccccccccccggaagccactgcacacagacagaacggggacaggcggcgggtcttttgtttttttgatgttgggggttctcttggttttgtcatgtggaaagtgatgcgtgggcgttccctgatgaaggcaccttggggcttccctgccgcatcctctcccctcaggaaggggactgacctgggcttgggggaagggacgtcagcaaggtggctctgaccctcccaggtgactctgccaagcagctgtggcccccagggctaccctacacaacgccctccccaggcccccctaagctgctctcccttggaacctgcacagctctctgaaatggggcattttgttgggaccagtgacccctggcatggggaccacaccctggagcccggtgctggggacctcctggacaccctgtccttcactcctttgccccagggacccaggctcatgctctgaactctggctgagaggatgctgctcaggagccagcacaggacaccccccaccccaccccaccatgtccccattacaccagagggccatcgtgacgtagacaggatgccaggggcctggccagcctcccccaatgctggggagcatccctgggcctggggccacacctgctgccctccctctgtgtggtccaagggcaagagtggctggagccgggggactgtgctggtctgagccccacgaaggccttgggctgtgcgtccgaccctgctgcagaaccagcagggtgtcccctcgggcccatctgtgtcccatgtcccagcacccaggcctctctccaggtctccttttctggtcttttgccatgagggtaaccagctcttcccagctggctggggactgtcttgggtttaaaactgcaagtctcctaccctgggatcccatccagttccacacgaactagggcagtggtcactgtggcacccaggtgtgggcctggctagctgggggccttcatgtgcccttcatgcccctccctgcattgaggccttgtggacccctgggctggctgtgttcatccccgctgcaggtcgggcgtctccccccgtgccactcctgagactcccaccgttacccccaggagatcctggactgcctgactcccctccccagactggcttgggagcctgggccccatggtagatgcaagggaaacctcaaggccagctcaatgcctggtatctgcccccagtccaggccaggcggaggggaggggctgtccggctgcctctcccttctcggtggcttcccctacgccctgggagtttgatctcttaagggaacttgcctctccctcttgttttgctcctggccctgcccctaggtctgggtgggcagtggccccatagcctctggaactgtgcgttctgcatagaattcaaacgagattcacccagcgcgaggaggaagaaacagcagttcctgggaaccacaattatggggggtggggggtgtgatctgagtgcctcaagatggttttcaaaaaaatttttttaaagaaaataattgtatacgtgtcaacacagctggctggatgattgggactttaaaacgaccctctttcaggtggattcagagacctgtcctgtatataacagcactgtagcaataaacgtgacattttataacgat

SEQ ID NO: 300784 - DNA, 3051 bp, Homo sapiens
ggcacgagggtgccggccgcgcccagagggtttccaggcctgaggtgcccgccctggccccaggagaatgaaccagccgcagaggatggcgcctgtgggcacagacaaggagctcagtgacctcctggacttcagcatgatgttcccgctgcctgtcaccaacgggaagggccggcccgcctccctggccggggcgcagttcggaggttcaggtcttgaggaccggcccagctcaggctcctggggcagcggcgaccagagcagctcctcctttgaccccagccggaccttcagcgagggcacccacttcactgagtcgcacagcagcctctcttcatccacattcctgggaccgggactcggaggcaagagcggtgagcggggcgcctatgcctccttcgggagagacgcaggcgtgggcggcctgactcaggctggcttcctgtcaggcgagctggccctcaacagccccgggcccctgtccccttcgggcatgaaggggacctcccagtactacccctcctactccggcagctcccggcggagagcggcagacggcagcctagacacgcagcccaagaaggtccggaaggtcccgccgggtcttccatcctcggtgtacccacccagctcaggtgaggactacggcagggatgccaccgcctacccgtccgccaagacccccagcagcacctatcccgcccccttctacgtggcagatggcagcctgcacccctcagccgagctctggagtcccccgggccaggcgggcttcgggcccatgctgggtgggggctcatccccgctgcccctcccgcccggtagcggcccggtgggcagcagtggaagcagcagcacgtttggtggcctgcaccagcacgagcgtatgggctaccagctgcatggagcagaggtgaacggtgggctcccatctgcatcctccttctcctcagcccccggagccacgtacggcggcgtctccagccacacgccgcctgtcagcggggccgacagcctcctgggctcccgagggaccacagctggcagctccggggatgccctcggcaaagcactggcctcgatctactccccggatcactcaagcaataacttctcgtccagcccttctacccccgtgggctccccccagggcctggcaggaacgtcacagtggcctcgagcaggagcccccggtgccttatcgcccagctacgacgggggtctccacggcctgcagagtaagatagaagaccacctggacgaggccatccacgtgctccgcagccacgccgtgggcacagccggcgacatgcacacgctgctgcctggccacggggcgctggcctcaggtttcaccggccccatgtcgctgggcgggcggcacgcaggcctggttggaggcagccaccccgaggacggcctcgcaggcagcaccagcctcatgcacaaccacgcggccctccccagccagccaggcaccctccctgacctgtctcggcctcccgactcctacagtgggctagggcgagcaggtgccacggcggccgccagcgagatcaagcgggaggagaaggaggacgaggagaacacgtcagcggctgaccactcggaggaggagaagaaggagctgaaggccccccgggcccggaccagcccagacgaggacgaggacgaccttctccccccagagcagaaggccgagcgggagaaggagcgccgggtggccaataacgcccgggagcggctgcgggtccgtgacatcaacgaggcctttaaggagctggggcgcatgtgccaactgcacctcaacagcgagaagccccagaccaaactgctcatcctgcaccaggctgtctcggtcatcctgaacttggagcagcaagtgcgagagcggaacctgaatcccaaagcagcctgtttgaaacggcgagaagaggaaaaggtgtcaggtgtggttggagacccccagatggtgctttcagctccccacccaggcctgagcgaagcccacaaccccgccgggcacatgtgaaaggtatgcctccgtgggacgagccacccgctttcagccctgtgctctggccccagaacggccactcgagaccccgggcttcatccacatccacacctcacacacctgttgtcagcatcgagccaacaccaacctgacaaggttcggagtgatgggggcggccaaggtgacactgggtccaggagctccctggggccctggcctaccactcactggcctcgctccccctgtccccgaatctcagccaccgtgtcactctgtgacctgtcccatggatcctgaaactgcatcttggccctgttgcctgggctgacaggagcattttttttttttccagtaaacaaaacctgaaagcaagcaacaaaacatacactttgtcagagaagaaaaaaatgccttaactataaaaagcggagaaatggaaacatatcactcaagggggatgctgtggaaacctggcttattcttctaaagccaccagcaaattgtgcctaagcgaaatattttttttaaggaaaataaaaacattagttacaagattttttttttcttaatgtagatgaaaattagcaaggatgctgcctttggtctctggtttttttaagctttttttgcatatgttttgtaagcaacaaatttttttgtataaaagtcccgtgtctctcgctatttctgctgctgttcctagactgagcattgcatttcttgatcaaccagatgattaaacgttgtattaaaaaaaaaaaggagaaggagcgccgggtggccaataacgcccgggagcggctgcgggtccgtgacatcaacgaggccttaaggagctggggcgcatgtgccaactgcacctcaacagcgagaagccccagaccaaactgctcatcctgcaccaggctgtctcggtcatcctgaacttggagcagcaggtgcgaggtaggctccccggccagggctgccccagcaccctctcccttccccgcacccaggtgcagatgctggggtcctccgtgtgcttgccgccc

SEQ ID NO: 300785 - DNA, 2571 bp, Homo sapiens
ggcacgagggtgccggccgcgcccagagggtttccaggcctgaggtgcccgccctggccccaggagaatgaaccagccgcagaggatggcgcctgtgggcacagacaaggagctcagtgacctcctggacttcagcatgatgttcccgctgcctgtcaccaacgggaagggccggcccgcctccctggccggggcgcagttcggaggttcaggtcttgaggaccggcccagctcaggctcctggggcagcggcgaccagagcagctcctcctttgaccccagccggaccttcagcgagggcacccacttcactgagtcgcacagcagcctctcttcatccacattcctgggaccgggactcggaggcaagagcggtgagcggggcgcctatgcctccttcgggagagacgcaggcgtgggcggcctgactcaggctggcttcctgtcaggcgagctggccctcaacagccccgggcccctgtccccttcgggcatgaaggggacctcccagtactacccctcctactccggcagctcccggcggagagcggcagacggcagcctagacacgcagcccaagaaggtccggaaggtcccgccgggtcttccatcctcggtgtacccacccagctcaggtgaggactacggcagggatgccaccgcctacccgtccgccaagacccccagcagcacctatcccgcccccttctacgtggcagatggcagcctgcacccctcagccgagctctggagtcccccgggccaggcgggcttcgggcccatgctgggtgggggctcatccccgctgcccctcccgcccggtagcggcccggtgggcagcagtggaagcagcagcacgtttggtggcctgcaccagcacgagcgtatgggctaccagctgcatggagcagaggtgaacggtgggctcccatctgcatcctccttctcctcagcccccggagccacgtacggcggcgtctccagccacacgccgcctgtcagcggggccgacagcctcctgggctcccgagggaccacagctggcagctccggggatgccctcggcaaagcactggcctcgatctactccccggatcactcaagcaataacttctcgtccagcccttctacccccgtgggctccccccagggcctggcaggaacgtcacagtggcctcgagcaggagcccccggtgccttatcgcccagctacgacgggggtctccacggcctgcagagtaagatagaagaccacctggacgaggccatccacgtgctccgcagccacgccgtgggcacagccggcgacatgcacacgctgctgcctggccacggggcgctggcctcaggtttcaccggccccatgtcgctgggcgggcggcacgcaggcctggttggaggcagccaccccgaggacggcctcgcaggcagcaccagcctcatgcacaaccacgcggccctccccagccagccaggcaccctccctgacctgtctcggcctcccgactcctacagtgggctagggcgagcaggtgccacggcggccgccagcgagatcaagcgggaggagaaggaggacgaggagaacacgtcagcggctgaccactcggaggaggagaagaaggagctgaaggccccccgggcccggaccagcccagacgaggacgaggacgaccttctccccccagagcagaaggccgagcgggagaaggagcgccgggtggccaataacgcccgggagcggctgcgggtccgtgacatcaacgaggcctttaaggagctggggcgcatgtgccaactgcacctcaacagcgagaagccccagaccaaactgctcatcctgcaccaggctgtctcggtcatcctgaacttggagcagcaagtgcgagagcggaacctgaatcccaaagcagcctgtttgaaacggcgagaagaggaaaaggtgtcaggtgtggttggagacccccagatggtgctttcagctccccacccaggcctgagcgaagcccacaaccccgccgggcacatgtgaaaggtatgcctccgtgggacgagccacccgctttcagccctgtgctctggccccagaacggccactcgagaccccgggcttcatccacatccacacctcacacacctgttgtcagcatcgagccaacaccaacctgacaaggttcggagtgatgggggcggccaaggtgacactgggtccaggagctccctggggccctggcctaccactcactggcctcgctccccctgtccccgaatctcagccaccgtgtcactctgtgacctgtcccatggatcctgaaactgcatcttggccctgttgcctgggctgacaggagcattttttttttttccagtaaacaaaacctgaaagcaagcaacaaaacatacactttgtcagagaagaaaaaaatgccttaactataaaaagcggagaaatggaaacatatcactcaagggggatgctgtggaaacctggcttattcttctaaagccaccagcaaattgtgcctaagcgaaatattttttttaaggaaaataaaaacattagttacaaga

SEQ ID NO: 300786 - DNA, 3541 bp, Homo sapiens
ggcacgagggtgccggccgcgcccagagggtttccaggcctgaggtgcccgccctggccccaggagaatgaaccagccgcagaggatggcgcctgtgggcacagacaaggagctcagtgacctcctggacttcagcatgatgttcccgctgcctgtcaccaacgggaagggccggcccgcctccctggccggggcgcagttcggaggttcaggtcttgaggaccggcccagctcaggctcctggggcagcggcgaccagagcagctcctcctttgaccccagccgggtaggagtccccgtgaggcctgagaccctgagtttcctgtccccagagttgggggcgaggggtgtggggaaactgaggctgagagaaggggccagccttccaggggtttggactgggggacatgggtttgagtcctgcctctccagctgtaatgcggggtggagggggggcctgtgaagccccagcacctctcatccccaccccatctcccctagaccttcagcgagggcacccacttcactgagtcgcacagcagcctctcttcatccacattcctgggaccgggactcggagggaggtgagtgcctggcctggtgcggtccctctgctgtgcacagatgtgcagacgtgggccttggcatggtcagtgcacgcacagcgccaggcaagagcggtgagcggggcgcctatgcctccttcgggagagacgcaggcgtgggcggcctgactcaggctggcttcctgtcaggcgagctggccctcaacagccccgggcccctgtccccttcgggcatgaaggggacctcccagtactacccctcctactccggcagctcccggcggagagcggcagacggcagcctagacacgcagcccaagaaggtccggaaggtcccgccgggtcttccatcctcggtgtacccacccagctcaggtgaggactacggcagggatgccaccgcctacccgtccgccaagacccccagcagcacctatcccgcccccttctacgtggcagatggcagcctgcacccctcagccgagctctggagtcccccgggccaggcgggcttcgggcccatgctgggtgggggctcatccccgctgcccctcccgcccggtagcggcccggtgggcagcagtggaagcagcagcacgtttggtggcctgcaccagcacgagcgtatgggctaccagctgcatggagcagaggtgaacggtgggctcccatctgcatcctccttctcctcagcccccggagccacgtacggcggcgtctccagccacacgccgcctgtcagcggggccgacagcctcctgggctcccgagggaccacagctggcagctccggggatgccctcggcaaagcactggcctcgatctactccccggatcactcaagcaataacttctcgtccagcccttctacccccgtgggctccccccagggcctggcaggaacgtcacagtggcctcgagcaggagcccccggtgccttatcgcccagctacgacgggggtctccacggcctgcagagtaagatagaagaccacctggacgaggccatccacgtgctccgcagccacgccgtgggcacagccggcgacatgcacacgctgctgcctggccacggggcgctggcctcaggtttcaccggccccatgtcgctgggcgggcggcacgcaggcctggttggaggcagccaccccgaggacggcctcgcaggcagcaccagcctcatgcacaaccacgcggccctccccagccagccaggcaccctccctgacctgtctcggcctcccgactcctacagtgggctagggcgagcaggtgccacggcggccgccagcgagatcaagcgggaggagaaggaggacgaggagaacacgtcagcggctgaccactcggaggaggagaagaaggagctgaaggccccccgggcccggaccagcagtacggacgaggtgctgtccctggaggagaaagacctgagggaccgggagaggcgcatggccaataacgcgcgggagcgggtgcgcgtgcgggatattaacgaggccttccgggagctggggcgcatgtgccagatgcacctcaagtcggacaaagcgcagaccaagctgctcatcctgcagcaggccgtgcaggtcatcctggggctggagcagcaggtgcgagagcggaacctgaatcccaaagcagcctgtttgaaacggcgagaagaggaaaaggtgtcaggtgtggttggagacccccagatggtgctttcagctccccacccaggcctgagcgaagcccacaaccccgccgggcacatgtgaaagggacccaggctcatgctctgaactctggctgagaggatgctgctcaggagccagcacaggacaccccccaccccaccccaccatgtccccattacaccagagggccatcgtgacgtagacaggatgccaggggcctggccagcctcccccaatgctggggagcatccctgggcctggggccacacctgctgccctccctctgtgtggtccaagggcaagagtggctggagccgggggactgtgctggtctgagccccacgaaggccttgggctgtgcgtccgaccctgctgcagaaccagcagggtgtcccctcgggcccatctgtgtcccatgtcccagcacccaggcctctctccaggtctccttttctggtcttttgccatgagggtaaccagctcttcccagctggctggggactgtcttgggtttaaaactgcaagtctcctaccctgggatcccatccagttccacacgaactagggcagtggtcactgtggcacccaggtgtgggcctggctagctgggggccttcatgtgcccttcatgcccctccctgcattgaggccttgtggacccctgggctggctgtgttcatccccgctgcaggtcgggcgtctccccccgtgccactcctgagactcccaccgttacccccaggagatcctggactgcctgactcccctccccagactggcttgggagcctgggccccatggtagatgcaagggaaacctcaaggccagctcaatgcctggtatctgcccccagtccaggccaggcggaggggaggggctgtccggctgcctctcccttctcggtggcttcccctacgccctgggagtttgatctcttaagggaacttgcctctccctcttgttttgctcctggccctgcccctaggtctgggtgggcagtggccccatagcctctggaactgtgcgttctgcatagaattcaaacgagattcacccagcgcgaggaggaagaaacagcagttcctgggaaccacaattatggggggtggggggtgtgatctgagtgcctcaagatggttttcaaaaaaatttttttaaagaaaataattgtatacgtgtcaacacagctggctggatgattgggactttaaaacgaccctctttcaggtggattcagagacctgtcctgtatataacagcactgtagcaataaacgtgacattttataacgat

SEQ ID NO: 300787 - DNA, 2441 bp, Homo sapiens
ggcacgagggtgccggccgcgcccagagggtttccaggcctgaggtgcccgccctggccccaggagaatgaaccagccgcagaggatggcgcctgtgggcacagacaaggagctcagtgacctcctggacttcagcatgatgttcccgctgcctgtcaccaacgggaagggccggcccgcctccctggccggggcgcagttcggaggttcaggtcttgaggaccggcccagctcaggctcctggggcagcggcgaccagagcagctcctcctttgaccccagccggaccttcagcgagggcacccacttcactgagtcgcacagcagcctctcttcatccacattcctgggaccgggactcggaggcaagagcggtgagcggggcgcctatgcctccttcgggagagacgcaggcgtgggcggcctgactcaggctggcttcctgtcaggcgagctggccctcaacagccccgggcccctgtccccttcgggcatgaaggggacctcccagtactacccctcctactccggcagctcccggcggagagcggcagacggcagcctagacacgcagcccaagaaggtccggaaggtcccgccgggtcttccatcctcggtgtacccacccagctcaggtgaggactacggcagggatgccaccgcctacccgtccgccaagacccccagcagcacctatcccgcccccttctacgtggcagatggcagcctgcacccctcagccgagctctggagtcccccgggccaggcgggcttcgggcccatgctgggtgggggctcatccccgctgcccctcccgcccggtagcggcccggtgggcagcagtggaagcagcagcacgtttggtggcctgcaccagcacgagcgtatgggctaccagctgcatggagcagaggtgaacggtgggctcccatctgcatcctccttctcctcagcccccggagccacgtacggcggcgtctccagccacacgccgcctgtcagcggggccgacagcctcctgggctcccgagggaccacagctggcagctccggggatgccctcggcaaagcactggcctcgatctactccccggatcactcaagcaataacttctcgtccagcccttctacccccgtgggctccccccagggcctggcaggaacgtcacagtggcctcgagcaggagcccccggtgccttatcgcccagctacgacgggggtctccacggcctgcagagtaagatagaagaccacctggacgaggccatccacgtgctccgcagccacgccgtgggcacagccggcgacatgcacacgctgctgcctggccacggggcgctggcctcaggtttcaccggccccatgtcgctgggcgggcggcacgcaggcctggttggaggcagccaccccgaggacggcctcgcaggcagcaccagcctcatgcacaaccacgcggccctccccagccagccaggcaccctccctgacctgtctcggcctcccgactcctacagtgggctagggcgagcaggtgccacggcggccgccagcgagatcaagcgggaggagaaggaggacgaggagaacacgtcagcggctgaccactcggaggaggagaagaaggagctgaaggccccccgggcccggaccagcccagacgaggacgaggacgaccttctccccccagagcagaaggccgagcgggagaaggagcgccgggtggccaataacgcccgggagcggctgcgggtccgtgacatcaacgaggcctttaaggagctggggcgcatgtgccaactgcacctcaacagcgagaagccccagaccaaactgctcatcctgcaccaggctgtctcggtcatcctgaacttggagcagcaagtgcgagagcggaacctgaatcccaaagcagcctgtttgaaacggcgagaagaggaaaaggtgtcaggtgtggttggagacccccagatggtgctttcagctccccacccaggcctgagcgaagcccacaaccccgccgggcacatgtgaaagcagtaaacaaaacctgaaagcaagcaacaaaacatacactttgtcagagaagaaaaaaatgccttaactataaaaagcggagaaatggaaacatatcactcaagggggatgctgtggaaacctggcttattcttctaaagccaccagcaaattgtgcctaagcgaaatattttttttaaggaaaataaaaacattagttacaagattttttttttcttaatgtagatgaaaattagcaaggatgctgcctttggtctctggtttttttaagctttttttgcatatgttttgtaagcaacaaatttttttgtataaaagtcccgtgtctctcgctatttctgctgctgttcctagactgagcattgcatttcttgatcaaccagatgattaaacgttgtattaaaaa

SEQ ID NO: 300788 - DNA, 2240 bp, Homo sapiens
ggcacgagggtgccggccgcgcccagagggtttccaggcctgaggtgcccgccctggccccaggagaatgaaccagccgcagaggatggcgcctgtgggcacagacaaggagctcagtgacctcctggacttcagcatgatgttcccgctgcctgtcaccaacgggaagggccggcccgcctccctggccggggcgcagttcggaggttcaggtcttgaggaccggcccagctcaggctcctggggcagcggcgaccagagcagctcctcctttgaccccagccggaccttcagcgagggcacccacttcactgagtcgcacagcagcctctcttcatccacattcctgggaccgggactcggaggcaagagcggtgagcggggcgcctatgcctccttcgggagagacgcaggcgtgggcggcctgactcaggctggcttcctgtcaggcgagctggccctcaacagccccgggcccctgtccccttcgggcatgaaggggacctcccagtactacccctcctactccggcagctcccggcggagagcggcagacggcagcctagacacgcagcccaagaaggtccggaaggtcccgccgggtcttccatcctcggtgtacccacccagctcaggtgaggactacggcagggatgccaccgcctacccgtccgccaagacccccagcagcacctatcccgcccccttctacgtggcagatggcagcctgcacccctcagccgagctctggagtcccccgggccaggcgggcttcgggcccatgctgggtgggggctcatccccgctgcccctcccgcccggtagcggcccggtgggcagcagtggaagcagcagcacgtttggtggcctgcaccagcacgagcgtatgggctaccagctgcatggagcagaggtgaacggtgggctcccatctgcatcctccttctcctcagcccccggagccacgtacggcggcgtctccagccacacgccgcctgtcagcggggccgacagcctcctgggctcccgagggaccacagctggcagctccggggatgccctcggcaaagcactggcctcgatctactccccggatcactcaagcaataacttctcgtccagcccttctacccccgtgggctccccccagggcctggcaggaacgtcacagtggcctcgagcaggagcccccggtgccttatcgcccagctacgacgggggtctccacggcctgcagagtaagatagaagaccacctggacgaggccatccacgtgctccgcagccacgccgtgggcacagccggcgacatgcacacgctgctgcctggccacggggcgctggcctcaggtttcaccggccccatgtcgctgggcgggcggcacgcaggcctggttggaggcagccaccccgaggacggcctcgcaggcagcaccagcctcatgcacaaccacgcggccctccccagccagccaggcaccctccctgacctgtctcggcctcccgactcctacagtgggctagggcgagcaggtgccacggcggccgccagcgagatcaagcgggaggagaaggaggacgaggagaacacgtcagcggctgaccactcggaggaggagaagaaggagctgaaggccccccgggcccggaccagcccagacgaggacgaggacgaccttctccccccagagcagaaggccgagcgggagaaggagcgccgggtggccaataacgcccgggagcggctgcgggtccgtgacatcaacgaggcctttaaggagctggggcgcatgtgccaactgcacctcaacagcgagaagccccagaccaaactgctcatcctgcaccaggctgtctcggtcatcctgaacttggagcagcaagtgcgagagcggaacctgaatcccaaagcagcctgtttgaaacggcgagaagaggaaaaggtgtcaggtgtggttggagacccccagatggtgctttcagctccccacccaggcctgagcgaagcccacaaccccgccgggcacatgtgaaagcagtaaacaaaacctgaaagcaagcaacaaaacatacactttgtcagagaagaaaaaaatgccttaactataaaaagcggagaaatggaaacatatcactcaagggggatgctgtggaaacctggcttattcttctaaagccaccagcaaattgtgcctaagcgaaatattttttttaaggaaaataaaaacattagttacaaga

SEQ ID NO: 300789 - DNA, 2343 bp, Homo sapiens
ggcacgagggtgccggccgcgcccagagggtttccaggcctgaggtgcccgccctggccccaggagaatgaaccagccgcagaggatggcgcctgtgggcacagacaaggagctcagtgacctcctggacttcagcatgatgttcccgctgcctgtcaccaacgggaagggccggcccgcctccctggccggggcgcagttcggaggttcaggtcttgaggaccggcccagctcaggctcctggggcagcggcgaccagagcagctcctcctttgaccccagccggaccttcagcgagggcacccacttcactgagtcgcacagcagcctctcttcatccacattcctgggaccgggactcggaggcaagagcggtgagcggggcgcctatgcctccttcgggagagacgcaggcgtgggcggcctgactcaggctggcttcctgtcaggcgagctggccctcaacagccccgggcccctgtccccttcgggcatgaaggggacctcccagtactacccctcctactccggcagctcccggcggagagcggcagacggcagcctagacacgcagcccaagaaggtccggaaggtcccgccgggtcttccatcctcggtgtacccacccagctcaggtgaggactacggcagggatgccaccgcctacccgtccgccaagacccccagcagcacctatcccgcccccttctacgtggcagatggcagcctgcacccctcagccgagctctggagtcccccgggccaggcgggcttcgggcccatgctgggtgggggctcatccccgctgcccctcccgcccggtagcggcccggtgggcagcagtggaagcagcagcacgtttggtggcctgcaccagcacgagcgtatgggctaccagctgcatggagcagaggtgaacggtgggctcccatctgcatcctccttctcctcagcccccggagccacgtacggcggcgtctccagccacacgccgcctgtcagcggggccgacagcctcctgggctcccgagggaccacagctggcagctccggggatgccctcggcaaagcactggcctcgatctactccccggatcactcaagcaataacttctcgtccagcccttctacccccgtgggctccccccagggcctggcaggaacgtcacagtggcctcgagcaggagcccccggtgccttatcgcccagctacgacgggggtctccacggcctgcagagtaagatagaagaccacctggacgaggccatccacgtgctccgcagccacgccgtgggcacagccggcgacatgcacacgctgctgcctggccacggggcgctggcctcaggtttcaccggccccatgtcgctgggcgggcggcacgcaggcctggttggaggcagccaccccgaggacggcctcgcaggcagcaccagcctcatgcacaaccacgcggccctccccagccagccaggcaccctccctgacctgtctcggcctcccgactcctacagtgggctagggcgagcaggtgccacggcggccgccagcgagatcaagcgggaggagaaggaggacgaggagaacacgtcagcggctgaccactcggaggaggagaagaaggagctgaaggccccccgggcccggaccagcccagacgaggacgaggacgaccttctccccccagagcagaaggccgagcgggagaaggagcgccgggtggccaataacgcccgggagcggctgcgggtccgtgacatcaacgaggcctttaaggagctggggcgcatgtgccaactgcacctcaacagcgagaagccccagaccaaactgctcatcctgcaccaggctgtctcggtcatcctgaacttggagcagcaagtgcgagagcggaacctgaatcccaaagcagcctgtttgaaacggcgagaagaggaaaaggtgtcaggtgtggttggagacccccagatggtgctttcagctccccacccaggcctgagcgaagcccacaaccccgccgggcacatgtgaaaggtctgggtgggcagtggccccatagcctctggaactgtgcgttctgcatagaattcaaacgagattcacccagcgcgaggaggaagaaacagcagttcctgggaaccacaattatggggggtggggggtgtgatctgagtgcctcaagatggttttcaaaaaaatttttttaaagaaaataattgtatacgtgtcaacacagctggctggatgattgggactttaaaacgaccctctttcaggtggattcagagacctgtcctgtatataacagcactgtagcaataaacgtgacattttataacgat

SEQ ID NO: 300790 - DNA, 2296 bp, Homo sapiens
ggcacgagggtgccggccgcgcccagagggtttccaggcctgaggtgcccgccctggccccaggagaatgaaccagccgcagaggatggcgcctgtgggcacagacaaggagctcagtgacctcctggacttcagcatgatgttcccgctgcctgtcaccaacgggaagggccggcccgcctccctggccggggcgcagttcggaggttcaggtcttgaggaccggcccagctcaggctcctggggcagcggcgaccagagcagctcctcctttgaccccagccggaccttcagcgagggcacccacttcactgagtcgcacagcagcctctcttcatccacattcctgggaccgggactcggaggcaagagcggtgagcggggcgcctatgcctccttcgggagagacgcaggcgtgggcggcctgactcaggctggcttcctgtcaggcgagctggccctcaacagccccgggcccctgtccccttcgggcatgaaggggacctcccagtactacccctcctactccggcagctcccggcggagagcggcagacggcagcctagacacgcagcccaagaaggtccggaaggtcccgccgggtcttccatcctcggtgtacccacccagctcaggtgaggactacggcagggatgccaccgcctacccgtccgccaagacccccagcagcacctatcccgcccccttctacgtggcagatggcagcctgcacccctcagccgagctctggagtcccccgggccaggcgggcttcgggcccatgctgggtgggggctcatccccgctgcccctcccgcccggtagcggcccggtgggcagcagtggaagcagcagcacgtttggtggcctgcaccagcacgagcgtatgggctaccagctgcatggagcagaggtgaacggtgggctcccatctgcatcctccttctcctcagcccccggagccacgtacggcggcgtctccagccacacgccgcctgtcagcggggccgacagcctcctgggctcccgagggaccacagctggcagctccggggatgccctcggcaaagcactggcctcgatctactccccggatcactcaagcaataacttctcgtccagcccttctacccccgtgggctccccccagggcctggcaggaacgtcacagtggcctcgagcaggagcccccggtgccttatcgcccagctacgacgggggtctccacggcctgcagagtaagatagaagaccacctggacgaggccatccacgtgctccgcagccacgccgtgggcacagccggcgacatgcacacgctgctgcctggccacggggcgctggcctcaggtttcaccggccccatgtcgctgggcgggcggcacgcaggcctggttggaggcagccaccccgaggacggcctcgcaggcagcaccagcctcatgcacaaccacgcggccctccccagccagccaggcaccctccctgacctgtctcggcctcccgactcctacagtgggctagggcgagcaggtgccacggcggccgccagcgagatcaagcgggaggagaaggaggacgaggagaacacgtcagcggctgaccactcggaggaggagaagaaggagctgaaggccccccgggcccggaccagcccagacgaggacgaggacgaccttctccccccagagcagaaggccgagcgggagaaggagcgccgggtggccaataacgcccgggagcggctgcgggtccgtgacatcaacgaggcctttaaggagctggggcgcatgtgccaactgcacctcaacagcgagaagccccagaccaaactgctcatcctgcaccaggctgtctcggtcatcctgaacttggagcagcaagtgcgagagcggaacctgaatcccaaagcagcctgtttgaaacggcgagaagaggaaaaggtgtcaggtgtggttggagacccccagatggtgctttcagctccccacccaggcctgagcgaagcccacaaccccgccgggcacatgtgaaagcagtaaacaaaacctgaaagcaagcaacaaaacatacactttgtcagagaagaaaaaaatgccttaactataaaaagcggagaaatggaaacatatcactcaagggggatgctgtggaaacctggcttattcttctaaagccaccagcaaattgtgcctaagcgaaataaaagtcccgtgtctctcgctatttctgctgctgttcctagactgagcattgcatttcttgatcaaccagatgattaaacgttgtattaaaaa

SEQ ID NO: 300791 - DNA, 2570 bp, Homo sapiens
ggcacgagggtgccggccgcgcccagagggtttccaggcctgaggtgcccgccctggccccaggagaatgaaccagccgcagaggatggcgcctgtgggcacagacaaggagctcagtgacctcctggacttcagcatgatgttcccgctgcctgtcaccaacgggaagggccggcccgcctccctggccggggcgcagttcggaggttcaggtcttgaggaccggcccagctcaggctcctggggcagcggcgaccagagcagctcctcctttgaccccagccggaccttcagcgagggcacccacttcactgagtcgcacagcagcctctcttcatccacattcctgggaccgggactcggaggcaagagcggtgagcggggcgcctatgcctccttcgggagagacgcaggcgtgggcggcctgactcaggctggcttcctgtcaggcgagctggccctcaacagccccgggcccctgtccccttcgggcatgaaggggacctcccagtactacccctcctactccggcagctcccggcggagagcggcagacggcagcctagacacgcagcccaagaaggtccggaaggtcccgccgggtcttccatcctcggtgtacccacccagctcaggtgaggactacggcagggatgccaccgcctacccgtccgccaagacccccagcagcacctatcccgcccccttctacgtggcagatggcagcctgcacccctcagccgagctctggagtcccccgggccaggcgggcttcgggcccatgctgggtgggggctcatccccgctgcccctcccgcccggtagcggcccggtgggcagcagtggaagcagcagcacgtttggtggcctgcaccagcacgagcgtatgggctaccagctgcatggagcagaggtgaacggtgggctcccatctgcatcctccttctcctcagcccccggagccacgtacggcggcgtctccagccacacgccgcctgtcagcggggccgacagcctcctgggctcccgagggaccacagctggcagctccggggatgccctcggcaaagcactggcctcgatctactccccggatcactcaagcaataacttctcgtccagcccttctacccccgtgggctccccccagggcctggcaggaacgtcacagtggcctcgagcaggagcccccggtgccttatcgcccagctacgacgggggtctccacggcctgcagagtaagatagaagaccacctggacgaggccatccacgtgctccgcagccacgccgtgggcacagccggcgacatgcacacgctgctgcctggccacggggcgctggcctcaggtttcaccggccccatgtcgctgggcgggcggcacgcaggcctggttggaggcagccaccccgaggacggcctcgcaggcagcaccagcctcatgcacaaccacgcggccctccccagccagccaggcaccctccctgacctgtctcggcctcccgactcctacagtgggctagggcgagcaggtgccacggcggccgccagcgagatcaagcgggaggagaaggaggacgaggagaacacgtcagcggctgaccactcggaggaggagaagaaggagctgaaggccccccgggcccggaccagcccagacgaggacgaggacgaccttctccccccagagcagaaggccgagcgggagaaggagcgccgggtggccaataacgcccgggagcggctgcgggtccgtgacatcaacgaggcctttaaggagctggggcgcatgtgccaactgcacctcaacagcgagaagccccagaccaaactgctcatcctgcaccaggctgtctcggtcatcctgaacttggagcagcaagtgcgagcagtacggacgaggtgctgtccctggaggagaaagacctgagggaccgggagaggcgcatggccaataacgcgcgggagcgggtgcgcgtgcgggatattaacgaggccttccgggagctggggcgcatgtgccagatgcacctcaagtcggacaaagcgcagaccaagctgctcatcctgcagcaggccgtgcaggtcatcctggggctggagcagcaggtgcgagagcggaacctgaatcccaaagcagcctgtttgaaacggcgagaagaggaaaaggtgtcaggtgtggttggagacccccagatggtgctttcagctccccacccaggcctgagcgaagcccacaaccccgccgggcacatgtgaaaggtctgggtgggcagtggccccatagcctctggaactgtgcgttctgcatagaattcaaacgagattcacccagcgcgaggaggaagaaacagcagttcctgggaaccacaattatggggggtggggggtgtgatctgagtgcctcaagatggttttcaaaaaaatttttttaaagaaaataattgtatacgtgtcaacacagctggctggatgattgggactttaaaacgaccctctttcaggtggattcagagacctgtcctgtatataacagcactgtagcaataaacgtgacattttataacgat

SEQ ID NO: 300792 - DNA, 2490 bp, Homo sapiens
ggcacgagggtgccggccgcgcccagagggtttccaggcctgaggtgcccgccctggccccaggagaatgaaccagccgcagaggatggcgcctgtgggcacagacaaggagctcagtgacctcctggacttcagcatgatgttcccgctgcctgtcaccaacgggaagggccggcccgcctccctggccggggcgcagttcggaggttcaggtcttgaggaccggcccagctcaggctcctggggcagcggcgaccagagcagctcctcctttgaccccagccggaccttcagcgagggcacccacttcactgagtcgcacagcagcctctcttcatccacattcctgggaccgggactcggaggcaagagcggtgagcggggcgcctatgcctccttcgggagagacgcaggcgtgggcggcctgactcaggctggcttcctgtcaggcgagctggccctcaacagccccgggcccctgtccccttcgggcatgaaggggacctcccagtactacccctcctactccggcagctcccggcggagagcggcagacggcagcctagacacgcagcccaagaaggtccggaaggtcccgccgggtcttccatcctcggtgtacccacccagctcaggtgaggactacggcagggatgccaccgcctacccgtccgccaagacccccagcagcacctatcccgcccccttctacgtggcagatggcagcctgcacccctcagccgagctctggagtcccccgggccaggcgggcttcgggcccatgctgggtgggggctcatccccgctgcccctcccgcccggtagcggcccggtgggcagcagtggaagcagcagcacgtttggtggcctgcaccagcacgagcgtatgggctaccagctgcatggagcagaggtgaacggtgggctcccatctgcatcctccttctcctcagcccccggagccacgtacggcggcgtctccagccacacgccgcctgtcagcggggccgacagcctcctgggctcccgagggaccacagctggcagctccggggatgccctcggcaaagcactggcctcgatctactccccggatcactcaagcaataacttctcgtccagcccttctacccccgtgggctccccccagggcctggcaggaacgtcacagtggcctcgagcaggagcccccggtgccttatcgcccagctacgacgggggtctccacggcctgcagagtaagatagaagaccacctggacgaggccatccacgtgctccgcagccacgccgtgggcacagccggcgacatgcacacgctgctgcctggccacggggcgctggcctcaggtttcaccggccccatgtcgctgggcgggcggcacgcaggcctggttggaggcagccaccccgaggacggcctcgcaggcagcaccagcctcatgcacaaccacgcggccctccccagccagccaggcaccctccctgacctgtctcggcctcccgactcctacagtgggctagggcgagcaggtgccacggcggccgccagcgagatcaagcgggaggagaaggaggacgaggagaacacgtcagcggctgaccactcggaggaggagaagaaggagctgaaggccccccgggcccggaccagcccagacgaggacgaggacgaccttctccccccagagcagaaggccgagcgggagaaggagcgccgggtggccaataacgcccgggagcggctgcgggtccgtgacatcaacgaggcctttaaggagctggggcgcatgtgccaactgcacctcaacagcgagaagccccagaccaaactgctcatcctgcaccaggctgtctcggtcatcctgaacttggagcagcaagtgcgagcagtacggacgaggtgctgtccctggaggagaaagacctgagggaccgggagaggcgcatggccaataacgcgcgggagcgggtgcgcgtgcgggatattaacgaggccttccgggagctggggcgcatgtgccagatgcacctcaagtcggacaaagcgcagaccaagctgctcatcctgcagcaggccgtgcaggtcatcctggggctggagcagcaggtgcgagagcggaacctgaatcccaaagcagcctgtttgaaacggcgagaagaggaaaaggtgtcaggtgtggttggagacccccagatggtgctttcagctccccacccaggcctgagcgaagcccacaaccccgccgggcacatgtgaaaggtctgggtgggcagtggccccatagcctctggaactgtgcgttctgcatagaattcaaacgagattcacccagcgcgaggaggaagaaacagcagttcctgggaaccacaattatggggggtggggggtggatttcctttcttaaacaagtttgtttctaatgtatttctttgcatccatgacagtttcctaaaattacacttataatcttttacttataaagaattt

SEQ ID NO: 300793 - DNA, 4030 bp, Homo sapiens
ggcacgagggtgccggccgcgcccagagggtttccaggcctgaggtgcccgccctggccccaggagaatgaaccagccgcagaggatggcgcctgtgggcacagacaaggagctcagtgacctcctggacttcagcatgatgttcccgctgcctgtcaccaacgggaagggccggcccgcctccctggccggggcgcagttcggaggttcaggtcttgaggaccggcccagctcaggctcctggggcagcggcgaccagagcagctcctcctttgaccccagccggaccttcagcgagggcacccacttcactgagtcgcacagcagcctctcttcatccacattcctgggaccgggactcggaggcaagagcggtgagcggggcgcctatgcctccttcgggagagacgcaggcgtgggcggcctgactcaggctggcttcctgtcaggcgagctggccctcaacagccccgggcccctgtccccttcgggcatgaaggggacctcccagtactacccctcctactccggcagctcccggcggagagcggcagacggcagcctagacacgcagcccaagaaggtccggaaggtcccgccgggtcttccatcctcggtgtacccacccagctcaggtgaggactacggcagggatgccaccgcctacccgtccgccaagacccccagcagcacctatcccgcccccttctacgtggcagatggcagcctgcacccctcagccgagctctggagtcccccgggccaggcgggcttcgggcccatgctgggtgggggctcatccccgctgcccctcccgcccggtagcggcccggtgggcagcagtggaagcagcagcacgtttggtggcctgcaccagcacgagcgtatgggctaccagctgcatggagcagaggtgaacggtgggctcccatctgcatcctccttctcctcagcccccggagccacgtacggcggcgtctccagccacacgccgcctgtcagcggggccgacagcctcctgggctcccgagggaccacagctggcagctccggggatgccctcggcaaagcactggcctcgatctactccccggatcactcaagcaataacttctcgtccagcccttctacccccgtgggctccccccagggcctggcaggaacgtcacagtggcctcgagcaggagcccccggtgccttatcgcccagctacgacgggggtctccacggcctgcagagtaagatagaagaccacctggacgaggccatccacgtgctccgcagccacgccgtgggcacagccggcgacatgcacacgctgctgcctggccacggggcgctggcctcaggtttcaccggccccatgtcgctgggcgggcggcacgcaggcctggttggaggcagccaccccgaggacggcctcgcaggcagcaccagcctcatgcacaaccacgcggccctccccagccagccaggcaccctccctgacctgtctcggcctcccgactcctacagtgggctagggcgagcaggtgccacggcggccgccagcgagatcaagcgggaggagaaggaggacgaggagaacacgtcagcggctgaccactcggaggaggagaagaaggagctgaaggccccccgggcccggaccagcccagacgaggacgaggacgaccttctccccccagagcagaaggccgagcgggagaaggagcgccgggtggccaataacgcccgggagcggctgcgggtccgtgacatcaacgaggcctttaaggagctggggcgcatgtgccaactgcacctcaacagcgagaagccccagaccaaactgctcatcctgcaccaggctgtctcggtcatcctgaacttggagcagcaagtgcgagcagtacggacgaggtgctgtccctggaggagaaagacctgagggaccgggagaggcgcatggccaataacgcgcgggagcgggtgcgcgtgcgggatattaacgaggccttccgggagctggggcgcatgtgccagatgcacctcaagtcggacaaagcgcagaccaagctgctcatcctgcagcaggccgtgcaggtcatcctggggctggagcagcaggtgcgagagcggaacctgaatcccaaagcagcctgtttgaaacggcgagaagaggaaaaggtgtcaggtgtggttggagacccccagatggtgctttcagctccccacccaggcctgagcgaagcccacaaccccgccgggcacatgtgaaagctgggtgggcagtggccccatagcctctggaactgctgtttcttccgccagaacacaggtgtcgtgaaaactacccctaaaagccaaaatgggaaaggaaaagactcatatcaacattgtcgtcattggacacgtagattcgggcaagtccaccactactggccatctgatctataaatgcggtggcatcgacaaaagaaccattgaaaaaatttgagaaggaggctgctgagatgggaaagggctccttcaagtatgcctgggtcttggataaactgaaagctgagcgtgaacgtggtatcaccattgatatctccttgtggaaatttgagaccagcaagtactatgtgactatcattgatgccccaggacacagagactttatcaaaaacatgattacagggacatctcaggctgactgtgctgtcctgattgttgctgctggtgttggtgaatttgaagctggtatctccaagaatgggcagacccgagagcatgcccttctggcttacacactgggtgtgaaacaactaattgtcggtgttaacaaaatggattccactgagccaccctacagccagaagagatatgaggaaattgttaaggaagtcagcacttacattaagaaaattggctacaaccccgacacagtagcatttgtgccaatttctggttggaatggtgacaacatgctggagccaagtgctaacatgccttggttcaagggatggaaagtcacccgtaaggatggcaatgccagtggaaccacgctgcttgaggctctggactgcatcctaccaccaactcgtccaactgacaagcccttgcgcctgcctctccaggatgtctacaaaattggtggtattggtactgttcctgttggccgagtggagactggtgttctcaaacccggtatggtggtcacctttgctccagtcaacgttacaacggaagtaaaatctgtcgaaatgcaccatgaagctttgagtgaagctcttcctggggacaatgtgggcttcaatgtcaagaatgtgtctgtcaaggatgttcgtcgtggcaacgttgctggtgacagcaaaaatgacccaccaatggaagcagctggcttcactgctcaggtgattatcctgaaccatccaggccaaataagcgccggctatgcccctgtattggattgccacacggctcacattgcatgcaagtttgctgagctgaaggaaaagattgatcgccgttctggtaaaaagctggaagatggccctaaattcttgaagtctggtgatgctgccattgttgatatggttcctggcaagcccatgtgtgttgagagcttctcagactatccacctttgggtcgctttgctgttcgtgatatgagacagacagttgcggtgggtgtcatcaaagcagtggacaagaaggctgctggagctggcaaggtcaccaagtctgcccagaaagctcagaaggctaaatgaatattatccctaatacctgccaccccactcttaatcagtggtggaagaacggtctcagaactgtttgtttcaattggccatttaagtttagtagtaaaagactggttaatgataacaatgcatcgtaaaaccttcagaaggaaaggagaatgttttgtggaccactttggttttcttttttgcgtgtggcagttttaagttattagtttttaaaatcagtactttttaatggaaacaacttgaccaaaaatttgtcacagaattttgagacccattaaaaaagttaaatg

SEQ ID NO: 300794 - DNA, 2446 bp, Homo sapiens
ggcacgagggtgccggccgcgcccagagggtttccaggcctgaggtgcccgccctggccccaggagaatgaaccagccgcagaggatggcgcctgtgggcacagacaaggagctcagtgacctcctggacttcagcatgatgttcccgctgcctgtcaccaacgggaagggccggcccgcctccctggccggggcgcagttcggaggttcaggtcttgaggaccggcccagctcaggctcctggggcagcggcgaccagagcagctcctcctttgaccccagccggaccttcagcgagggcacccacttcactgagtcgcacagcagcctctcttcatccacattcctgggaccgggactcggaggcaagagcggtgagcggggcgcctatgcctccttcgggagagacgcaggcgtgggcggcctgactcaggctggcttcctgtcaggcgagctggccctcaacagccccgggcccctgtccccttcgggcatgaaggggacctcccagtactacccctcctactccggcagctcccggcggagagcggcagacggcagcctagacacgcagcccaagaaggtccggaaggtcccgccgggtcttccatcctcggtgtacccacccagctcaggtgaggactacggcagggatgccaccgcctacccgtccgccaagacccccagcagcacctatcccgcccccttctacgtggcagatggcagcctgcacccctcagccgagctctggagtcccccgggccaggcgggcttcgggcccatgctgggtgggggctcatccccgctgcccctcccgcccggtagcggcccggtgggcagcagtggaagcagcagcacgtttggtggcctgcaccagcacgagcgtatgggctaccagctgcatggagcagaggtgaacggtgggctcccatctgcatcctccttctcctcagcccccggagccacgtacggcggcgtctccagccacacgccgcctgtcagcggggccgacagcctcctgggctcccgagggaccacagctggcagctccggggatgccctcggcaaagcactggcctcgatctactccccggatcactcaagcaataacttctcgtccagcccttctacccccgtgggctccccccagggcctggcaggaacgtcacagtggcctcgagcaggagcccccggtgccttatcgcccagctacgacgggggtctccacggcctgcagagtaagatagaagaccacctggacgaggccatccacgtgctccgcagccacgccgtgggcacagccggcgacatgcacacgctgctgcctggccacggggcgctggcctcaggtttcaccggccccatgtcgctgggcgggcggcacgcaggcctggttggaggcagccaccccgaggacggcctcgcaggcagcaccagcctcatgcacaaccacgcggccctccccagccagccaggcaccctccctgacctgtctcggcctcccgactcctacagtgggctagggcgagcaggtgccacggcggccgccagcgagatcaagcgggaggagaaggaggacgaggagaacacgtcagcggctgaccactcggaggaggagaagaaggagctgaaggccccccgggcccggaccagcccagacgaggacgaggacgaccttctccccccagagcagaaggccgagcgggagaaggagcgccgggtggccaataacgcccgggagcggctgcgggtccgtgacatcaacgaggcctttaaggagctggggcgcatgtgccaactgcacctcaacagcgagaagccccagaccaaactgctcatcctgcaccaggctgtctcggtcatcctgaacttggagcagcaagtgcgagcagtacggacgaggtgctgtccctggaggagaaagacctgagggaccgggagaggcgcatggccaataacgcgcgggagcgggtgcgcgtgcgggatattaacgaggccttccgggagctggggcgcatgtgccagatgcacctcaagtcggacaaagcgcagaccaagctgctcatcctgcagcaggccgtgcaggtcatcctggggctggagcagcaggtgcgagagcggaacctgaatcccaaagcagcctgtttgaaacggcgagaagaggaaaaggtgtcaggcggggtcttcacacctggagcagctttttccaaatcaaagttgattgacagactcaacaaacacggtattgagtttagtgttattagcagctctgaagtctaaacactggaagaattacctgaagtcataacgtgcgtgaattaacagcttctctatttgatatttgaaattcttctgtaagcttgtctcagtgtatgtggaaacgattgtcaaatctaaaatatctatatattaaaaagtaggaacccgccctagcttaccctaaaaa

SEQ ID NO: 300795 - DNA, 4447 bp, Homo sapiens
ggcacgagggtgccggccgcgcccagagggtttccaggcctgaggtgcccgccctggccccaggagaatgaaccagccgcagaggatggcgcctgtgggcacagacaaggagctcagtgacctcctggacttcagcatgatgttcccgctgcctgtcaccaacgggaagggccggcccgcctccctggccggggcgcagttcggaggttcaggtcttgaggaccggcccagctcaggctcctggggcagcggcgaccagagcagctcctcctttgaccccagccggaccttcagcgagggcacccacttcactgagtcgcacagcagcctctcttcatccacattcctgggaccgggactcggaggcaagagcggtgagcggggcgcctatgcctccttcgggagagacgcaggcgtgggcggcctgactcaggctggcttcctgtcaggcgagctggccctcaacagccccgggcccctgtccccttcgggcatgaaggggacctcccagtactacccctcctactccggcagctcccggcggagagcggcagacggcagcctagacacgcagcccaagaaggtccggaaggtcccgccgggtcttccatcctcggtgtacccacccagctcaggtgaggactacggcagggatgccaccgcctacccgtccgccaagacccccagcagcacctatcccgcccccttctacgtggcagatggcagcctgcacccctcagccgagctctggagtcccccgggccaggcgggcttcgggcccatgctgggtgggggctcatccccgctgcccctcccgcccggtagcggcccggtgggcagcagtggaagcagcagcacgtttggtggcctgcaccagcacgagcgtatgggctaccagctgcatggagcagaggtgaacggtgggctcccatctgcatcctccttctcctcagcccccggagccacgtacggcggcgtctccagccacacgccgcctgtcagcggggccgacagcctcctgggctcccgagggaccacagctggcagctccggggatgccctcggcaaagcactggcctcgatctactccccggatcactcaagcaataacttctcgtccagcccttctacccccgtgggctccccccagggcctggcaggaacgtcacagtggcctcgagcaggagcccccggtgccttatcgcccagctacgacgggggtctccacggcctgcagagtaagatagaagaccacctggacgaggccatccacgtgctccgcagccacgccgtgggcacagccggcgacatgcacacgctgctgcctggccacggggcgctggcctcaggtttcaccggccccatgtcgctgggcgggcggcacgcaggcctggttggaggcagccaccccgaggacggcctcgcaggcagcaccagcctcatgcacaaccacgcggccctccccagccagccaggcaccctccctgacctgtctcggcctcccgactcctacagtggccagggcatctcaccgcagcttggtcccctctccacctcgatctacttgctcacccaggatgacaagtactgggcaaggcgcagaaagaacaacatggcagccaagcgctcccgcgacgcccggaggctgaaagagaaccagatcgccatccgggcctcgttcctggagaaggagaactcggccctccgccaggaggtggctgacttgaggaaggagctgggcaaatgcaagaacatacttgccaagtatgaggccaggcacgggcccctgtaggatggcatttttgcaggctggctttggaatagatggacagtttgtttcctgtctgatagcaccacacgcaaaccaacctttctgacatcagcactttaccagaggcataaacacaactgactcccattttggtgtgcatctgtgtgtgtgtgcgtgtatatgtgcttgtgctcatgtgtgtggtcagcggtatgtgcgtgtgcgtgttcctttgctcttgccattttaaggtagccctctcatcgtcttttagttccaacaaagaaaggtgccatgtctttactagactgaggagccctctcgcgggtctcccatcccctccctccttcactcctgcctcctcagctttgcttcatgttcgagcttacctactcttccaggactctctgcttggattcactaaaaagggccctggtaaaatagtggatctcagtttttaagagtacaagctcttgtttctgtttagtccgtaagttaccatgctaatgaggtgcacacaataacttagcactactccgcagctctagtcctttataagttgctttcctcttactttcagttttggtgataatcgtcttcaaattaaagtgctgtttagatttattagatcccatatttacttactgctatctactaagtttccttttaattctaccaaccccagataagtaagagtactattaatagaacacagagtgtgtttttgcactgtctgtacctaaagcaataatcctattgtacgctagagcatgctgcctgagtattactagtggacgtaggatattttccctacctaagaatttcactgtcttttaaaaaacaaaaagtaaagtaatgcatttgagcatggccagactattccctaggacaaggaagcagagggaaatgggaggtctaaggatgaggggttaatttatcagtacatgagccaaaaactgcgtcttggattagcctttgacattgatgtgttcggttttgttgttccccttccctcacaccctgcctcgcccccacttttctagttaactttttccatatccctcttgacattcaaaacagttacttaagattcagttttcccactttttggtaatatatatatttttgtgaattatactttgttgtttttaaaaagaaaatcagttgattaagttaataagttgatgttttctaaggccctttttcctagtggtgtcatttttgaatgcctcataaattaatgattctgaagcttatgtttcttattctctgtttgcttttgaacgtatgtgctcttataaagtggacttctgaaaaatgaatgtaaaagacactggtgtatctcagaaggggatggtgttgtcacaaactgtggttaatccaatcaatttaaatgtttactatagaccaaaaggagagattattaaatcgtttaatgtttatacagagtaattataggaagttcttttttgtacagtatttttcagatataaatactgacaatgtattttggaagacatatattatatatagaaaagaggagaggaaaactattccatgttttaaaattatatagcaaagatatatattcaccaatgttgtacagagaagaagtgcttgggggtttttgaagtctttaatattttaagccctatcactgacacatcagcatgttttctgctttaaattaaaattttatgacagtatcgaggcttgtgatgacgaatcctgctctaaaatacacaaggagctttcttgtttcttattaggcctcagaaagaagtcagttaacgtcacccaaaagcacaaaatggattttagtcaaatatttattggatgatacagtgttttttaggaaaagcatctgccacaaaaatgttcacttcgaaattctgagttcctggaatggcacgttgctgccagtgccccagacagttcttttctaccctgcgggcccgcacgttttatgaggttgatatcggtgctatgtgtttggtttataatttgatagatgtttgactttaaagatgattgttcttttgtttcattaagttgtaaaatgtcaagaaattctgctgttacgacaaagaaacattttacgctagattaaaatatcctttcatcaatgggattttctagtttcctgccttcagagtatctaatcctttaatgatctggtggtctcctcgtcaatccatcagcaatgcttctctcatagtgtcatagacttgggaaacccaaccagtaggatatttctacaaggtgttcattttgtcacaagctgtagataacagcaagagatgggggtgtattggaattgcaatacattgttcaggtgaataataaaatcaaaaacttttgcaatcttaagcagagataaataaaagatagcaatatgagacacaggtggacgtagagttggcctttttacaggcaaagaggcgaattgtagaattgttagatggcaatagtcattaaaaacatagaaaaatgatgtctttaagtggagaattgtggaaggattgtaacatggaccatccaaatttatggccgtatcaaatggtagctgaaaaaactatatttgagcactggtctctcttggaattagatgtttatatcaaatgagcatctcaaatgttttctgcagaaaaaaataaaaagattctaataaaaaaa

SEQ ID NO: 300796 - DNA, 739 bp, Homo sapiens
ggcacgagggtgccggccgcgcccagagggtttccaggcctgaggtgcccgccctggccccaggagaatgaaccagccgcagaggatggcgcctgtgggcacagacaaggagctcagtgacctcctggacttcagcatgatgttcccgctgcctgtcaccaacgggaagggccggcccgcctccctggccggggcgcagttcggaggttcaggtcttgaggaccggcccagctcaggctcctggggcagcggcgaccagagcagctcctcctttgaccccagccggaccttcagcgagggcacccacttcactgagtcgcacagcagcctctcttcatccacattcctgggaccgggactcggaggcaagagcggtgagcggggcgcctatgcctccttcgggagagacgcaggcgtgggcggcctgactcaggctggcttcctgtcaggcgagctggccctcaacagccccgggcccctgtccccttcgggcatgaaggggacctcccagtactacccctcctactccggcagcagtaaacaaaacctgaaagcaagcaacaaaacatacactttgtcagagaagaaaaaaatgccttaactataaaaagcggagaaatggaaacatatcactcaagggggatgctgtggaaacctggcttattcttctaaagccaccagcaaattgtgcctaagcgaaatattttttttaaggaaaataaaaacattagttacaaga

SEQ ID NO: 300797 - DNA, 711 bp, Homo sapiens
ggctccatcccgtgtcttcctcgacctgctgcctgtctgagcctcggcttccccttttgccaagcaaacccatacccagccctggtagggggacactgggccctaccccccgctccagggaccccctgctccagggcctgccatgcggggccagtgcacacacaggaaacgaggagtcagccagggctcaggcatccggggactctccacatgtccacctgttgagtgtaaacctctcacttttcagagctgaaacgtaaagacaactttgtatcactgtcaagagctgataagttgtatccttcgcctaatgggatacccctccccccagagcaaaggcagggggaacagcgagttttcagcggcagggactctgcctggcggtacagcggggtcatcgtctggagttttctcactctgggcgtgggtgtccagggtgcagcgtcacttgagggcacgcgagtcctcagagtcttctggtctgtgatggggcggagcaggacgggccgggcctagatggagcgcagtctcaggttcccgggtgtccccagctctgctcccagcttgggtttgaacccgggactgtagggtttggtttgccacccgccccgctcacgtctcccctcccctccctgcagatgttcccgctgcctgtcaccaacgggaagggccggcccgcctccctggccggggcgcagttcggaggttcag

SEQ ID NO: 300798 - DNA, 277 bp, Homo sapiens
ggagaaagacctgagggaccgggagaggcgcatggccaataacgcgcgggagcgggtgcgcgtgcgggatattaacgaggccttccgggagctggggcgcatgtgccagatgcacctcaagtcggacaaagcgcagaccaagctgctcatcctgcagcaggccgtgcaggtcatcctggggctggagcagcaggtgcgaggtaggctccccggccagggctgccccagcaccctctcccttccccacacccaggtgcagatgctggggtcctcctgt

SEQ ID NO: 300799 - DNA, 6320 bp, Homo sapiens
acatgagaggtatgattggtggtggattttttccgtggatctatcaattcacaattcgaatttggaagaaagaaggaaaacatgacgtctccagccaaattcaaaaaggataaggagatcatagcagagtacgatactcaggtcaaagagatccgtgctcagctcacagagcagatgaaatgcctggaccagcagtgtgagcttcgggtgcaactgttgcaggacctccaggacttcttccgaaagaaggcagagattgagatggactactcccgcaacctggagaagctggcagaacacttcctggccaagacacgcagcaccaaggaccagcaattcaagaaggatcagaatgttctctctccagtcaactgctggaatctcctcttaaaccaggtgaagtgggaaagcagggaccataccaccctgagtgacatctacctgaataatatcattcctcgatttgtacaagtcagcgaggactcaggaagactctttaaaaagagtaaagaagtcggccagcagctccaagatgatttgatgaaggtcctgaacgagctctactcggtcatgaagacatatcacatgtacaatgccgacagcatcagtgctcagagcaaactaaaggaggcggagaagcaggaggagaagcaaattggtaaatcggtaaagcaggaggaccggcagaccccacgctcccctgactccacggccaacgttcgcattgaggagaaacatgtccggaggagctcagtgaagaagattgagaagatgaaggagaagcgtcaagccaagtacacggagaataagctgaaggccatcaaagcccggaatgagtacttgctggctttggaggcaaccaatgcatctgtcttcaagtactacatccatgacctatctgaccttattgatcagtgttgtgacttaggctaccatgcaagtctgaaccgggctctacgcaccttcctctctgctgagttaaacctggaacagtcgaagcatgagggtctggatgccatcgagaatgcagtagaaaacctggatgccaccagtgacaagcagcgcctcatggagatgtacaacaacgtcttctgcccccctatgaagtttgagtttcagccccacatgggggatatggcttcccagctctgtgcccagcagcctgtccagagtgagctggtacagagatgccaacaactgcagtctcgcttatccactctaaagattgaaaacgaagaggtaaagaagacaatggaggccaccctgcaaaccatccaggacattgtgactgtcgaggactttgatgtgtctgactgcttccagtacagcaactccatggagtccgtcaagtccacggtctctgaaaccttcatgagcaagcccagcattgctaagaggagagccaaccagcaagagacagagcagttttatttcacaaaaatgaaagagtacctggagggcaggaacctcatcaccaagttacaagccaagcatgaccttctgcagaaaaccctgggagaaagtcagcggacagattgcagtctagccaggcgcagctcaactgtgaggaaacaggactccagccaggcaattcctctggtggtggaaagctgtatccggtttatcagcagacacggactacagcatgaaggaattttccgggtgtcaggatcccaggtggaagtgaatgacatcaaaaatgcctttgagagaggagaggaccccctggctggggaccagaacgaccatgacatggattccatagctggtgtcctgaagctttacttccgggggctggaacaccctctcttccccaaggacatctttcatgacctgatggcctgcgtcacaatggacaacctgcaggagagagctctgcacatccggaaagtcctcctagtcctgcccaaaaccactctgattatcatgagatacctctttgccttcctcaatcatttatcacagttcagtgaagagaacatgatggacccctacaacctcgccatctgcttcgggccctcgctaatgtcagtgccagagggccacgaccaggtgtcctgccaagcccacgtgaatgagctgatcaaaaccatcatcatccagcatgagaacatcttcccaagccccagggagctggagggccctgtctacagcagaggaggaagcatggaggattactgtgatagccctcatggagagactacctcggttgaagactcaacccaggatgtgaccgcagagcaccacacgagcgatgacgaatgtgagcccatcgaggccattgccaagtttgactacgtgggccggacagcccgagagctgtcctttaagaagggagcatccctgctgctttaccagcgggcttccgacgactggtgggaaggccggcacaatggcatcgacggactcatcccccatcagtacatcgtggtccaagacaccgaggacggtgtcgtggagaggtccagccccaagtctgagattgaggtcatttctgagccacctgaagaaaaggtgacagccagagcgggggccagctgtcccagtgggggtcatgtagccgatatttatcttgcaaacatcaacaagcaaaggaagcgtccagaatctgggagcatccggaaaacttttcggagtgacagccatgggctgagcagttccctgactgactcctcctccccaggggtgggggctagctgccgcccatcctcccagcccatcatgagccagagcctccccaaagaagggccagataagtgttccatcagtgggcacgggagcctcaactccatcagccgccactcatccctgaagaatcggctggatagtccacagatccggaagactgccacagcgggaaggtcaaaaagcttcaataaccatcggcccatggaccctgaggtcattgctcaggatattgaggcaacaatgaactcggccctgaatgagctacgggaactagaacggcagagcagtgtcaaacacacccctgacgtggttctggacaccttggagcccctcaaaacctccccagtggtggcccccacgtcagagccctccagccctctgcacacccagctcctcaaggaccccgagcccgccttccagcgcagcgccagtactgctggggacatcgcctgcgccttccggcctgtcaagtctgtcaagatggctgccccggtcaaaccaccagccacacggcccaagcccactgtcttccccaaaacaaatgccactagccctggtgtcaactcatcaacttccccacagtctactgacaagtcttgtactgtctgagggataataatttaattgttctagacaaggggactatagggactgactgttattaaaatcttcctatttaactagcttggggacttcagttgaaaattaggttctaagttgttcttgcaggaattagcctccccgtctcccaaaaccttgagaatgaagcccttggtatcgcctctcccttcccactgccctctgcttcccccagtcgtcgtaattcagccagctgcagtccgtaccgttcttaggttagccagagacaggttttcattatcaggtcactgtgaaatctggtaaggcagtcctgaggacatgggctcaagtctcagtcccctcagaccacggtgatgccttgaccagatggttggctactgccatccagctttcagtggcatcttgttttgggaactgattatagagaatcatatatagtccagtcttcattttacatacacacacatattttacacacacacacattttacacacacacacacacacacacacacatatgtttttctagtctctggcatgtgtagcctctcctggtcatagaccagtctctttgtaagttattgtggcagttcacacagtagccaccaggggtctctgtttccatcacaaactttgttctgtctgggccagagaacctagcctttgaaatctctccatcatatgaaacataacgggatgggacaatcccgtaacctgtttggggttgggggctttctctctgtgttctttccattgatgtgaattggtcattggtgtttgctcttgcctctcctccatcccctagaagtacacccccgtcttattaaggagcttttaaagtttttctgaatgtatagacatttctcgggttcctacctttgtctctgatggaccattttccatttaagacattttcctgtataagacagttttatagctggttccttttagggtaaagagtcttaagagagttttattgtgtctatggcaggtttgggaaaggtaagaaatgggtcctttttcctcctaatgtttttggcacttaaaacataaaattcattatcctattaaaaaattaaattcagctttgctaatccagaaattgttcccaaatgaaaacttgttttaagtccaccccttagtttccttattttacaaggtctctcttcagggaccaacaggggcttagagagccttagttagattaaagggagaccctacctcttaaaaccagttttcatttatgcaaacaaggacaattaagggaaccctgaccccacaggctctcaagtcttcccaaggccagaatcgaaagaaaattaaaatttgaatgctgaatattctggctctactctggccttttttctggttcccttccaaaatgcacaaatcatacccttgtctgctccaattcagtctccaaacctggtgcctgtgctcctggcccccctagcatcatgctatcccaggagtatcaggaccagacacatccacagccaggctcatgggtctcagacagcaacttgagttaaagctgaaactcatccttcttctctgtgttttctggtttaaaagctgcacttatattttagccttattattttctgtagttccggagagatggtgggttgccattctggtaggaaaatctgagttttcttatctttgacctagaagagattctttttggaccaacctgcgaaattggtagttaggtctatggaaagtggtaggatttttttttttttaatcctgtgcaaaggaaaagaggtgctttgtgggaaatcactaatgagaaggctaacctgcagcaccagagaaacctttccaagtgctaggcaggagaactgaagaactctttcagtgaagtgagtcagcctagaagaggcaacccacagtcttgatttttgttgctgtttcctgacctgttcttgcctgtcacctgggcctacacaggtcccgagccaacggggctttcatacccaaggatctgtttccttgctgaaaatgaaaccctatctttcactttacattcctttcaatccaactgatcaaaactggtacccacacttgccctttctccctctctccagcacactcccctctaagaaagtaaaagcaaagctttcttaatggcaacactttgggcctgttctgttgctcctgccttatttctctttcaaccctgtacatgactcgtgttcaccatccccttgatcagtgtccatccgcgctaatttgcatcatgaactgaacagtgtgtgagtggtcacctactaaacccagctctgggggcagagctgtcttccccatctctggtgctcctaacacctgtgagatggtcctgtcgagaggactaggaaccgataggaggagagtccttctcggcagagctcactgcaaacaactggaattgaggttgcacactgtgatttttacaccgaaaagccaaaaggagctggccatccagggcctagggagaccagccttcctcagctatgcttgccgaaaccagcatgatgcttcaaagagccctgctccacccctcatggcatggatccttttcctggtgtggactctgaagggtcagtcttcggggaagagaggtggggtggggctactagcatcccaatttagaaaacagaggagtttgtagccagcagcctgtaaactggaaacactggtctcagccaacctcctcagggcgccctggcttctccccaaggagatgaggagcggtgatgccagcaccgggatgcgcagagcactggaagggctggtgcagatctacttcccatgcagaagagaagtcacatcttccagggaatcgcaatgttgtggcgtctgacttgtatgtcacatttgtgtaaaatggtatattctttaaaatagtgttgataactggaatattgtatgtatgcttggagatgctttgtgtgaacctaagactgtcactcaacagatgttggattggggaaaatccaaagcacaacttcaaaataaaatacatttttaggtttcaaaaaaaaaaa

SEQ ID NO: 300800 - DNA, 519 bp, Homo sapiens
agcattgtgtttctggagccggagctgcctgaggcactcttctccagcctcctcagccttccatggagctgcagaccctacatagacctacccctgccaggctccaaacagatccccctacccattcctttcatgtactgtttggtcctggaagaggctcacacaagttggctttgggttttgcttcaacatagaaaccacgagccttataccttgaatatgggtagtttcattgccagtaatgggaactctggaactgccaaagggactgtatcctctttctgacctggtgttgctttcttttgttaggcttcccagctctgtgcccagcagcctgtccagagtgagctggtacagagatgccaacaactgcagtctcgcttatccactctaaagattgaaaacgaagaggtgagtttcttccttaggaggctcaaagccacactcttagtttccctgttgaaacttttgctgctgcccgtctgggagcaggtggaaggagcatgcagagaatgtccg

SEQ ID NO: 300801 - DNA, 6100 bp, Homo sapiens
acatgagaggtatgattggtggtggattttttccgtggatctatcaattcacaattcgaatttggaagaaagaaggaaaacatgacgtctccagccaaattcaaaaaggataaggagatcatagcagagtacgatactcaggtcaaagagatccgtgctcagctcacagagcagatgaaatgcctggaccagcagtgtgagcttcgggtgcaactgttgcaggacctccaggacttcttccgaaagaaggcagagattgagatggactactcccgcaacctggagaagctggcagaacacttcctggccaagacacgcagcaccaaggaccagcaattcaagaaggatcagaatgttctctctccagtcaactgctggaatctcctcttaaaccaggtgaagtgggaaagcagggaccataccaccctgagtgacatctacctgaataatatcattcctcgatttgtacaagtcagcgaggactcaggaagactctttaaaaagagtaaagaagtcggccagcagctccaagatgatttgatgaaggtcctgaacgagctctactcggtcatgaagacatatcacatgtacaatgccgacagcatcagtgctcagagcaaactaaaggaggcggagaagcaggaggagaagcaaattggtaaatcggtaaagcaggaggaccggcagaccccacgctcccctgactccacggccaacgttcgcattgaggagaaacatgtccggaggagctcagtgaagaagattgagaagatgaaggagaagcgtcaagccaagtacacggagaataagctgaaggccatcaaagcccggaatgagtacttgctggctttggaggcaaccaatgcatctgtcttcaagtactacatccatgacctatctgaccttattgatcagtgttgtgacttaggctaccatgcaagtctgaaccgggctctacgcaccttcctctctgctgagttaaacctggaacagtcgaagcatgagggtctggatgccatcgagaatgcagtagaaaacctggatgccaccagtgacaagcagcgcctcatggagatgtacaacaacgtcttctgcccccctatgaagtttgagtttcagccccacatgggggatatggcttcccagctctgtgcccagcagcctgtccagagtgagctggtacagagatgccaacaactgcagtctcgcttatccactctaaagattgaaaacgaagaggtaaagaagacaatggaggccaccctgcaaaccatccaggacattgtgactgtcgaggactttgatgtgtctgactgcttccagtacagcaactccatggagtccgtcaagtccacggtctctgaaaccttcatgagcaagcccagcattgctaagaggagagccaaccagcaagagacagagcagttttatttcacagtaagggagtgctatggcttttaaagagcgtcagcatgcactgcagcactcaagggagatttggaactcagagtccttgttaagtgtctgaaggacaggcattgaatatcttagatacgaatgtgggcatactcagagaccatccctacacttaaaggtgcaaacattaaaagttgtatatgtctaacagggatccgcccaagagaaaggatgctcccaagtatacaactaagaagattttcttttttaagaaatttttaactagctagtaggctttcactggaaagtttccttctcaggcacaggggatcctgaaaggggaacttcatcttttagttcttggagagtacatacaaatattcataataacacatattttgtttataaaaatctataatctcttctaggtgatatgatgacattattttataacttttattgttgggaaactattttttctaattattgctaaaacttaaaggatgggtaatatgcagcattactattttgcacataattccaaaacatcgtattttcttattcatgtatctctagtcttcttttagacagttggacccttttttctttttcttttttttttttttttttaagtattgttaacaatcctttggaagtcactactggtctttgtgtgctgctttttaataattgagttattttgagcttgccaagtaggatctattgcctggactaaaatttatttcctaatcttctgatgaccaagaaaggaaaaattaagtttgcagatgtgagatgaaatatagccagtgaatatgcatactgattctgaatgaaaggaattaacttttcagtcaagaaacagtctgcatgcagtaaattgaatttttcctgcaactggaatgatttgtttaattcttctttgaacactgccctttctccagtaagaacactaatgatttgctaatattttttaaagaaatctgtttttttaattagttaagctcagacttcctcttattttttatcctagagaaaactgctaaaagggaatgatatatcagtactattcttctaaaacaactttttaaaaatgattatacaaagccaaatatgctcattatataaaatttagaagcaaaaagaaggaaataaaaattttccataattctaccagctagagataatggtgttagaatatattcctttctaatctgttttctatgcatgcacaaacacatatgtgagcacatatttataattttattctaaaaaataggacactgctgtacatattgttttacaatctaagtcatataattataatattctttaagcatatttatgagtaaaatattaaaacctatacaaaaaaataatagaatggcattttagctcattcattgatttttataaaatatttaacacactccctggtttgtagttagcgttcaataaatgctaaaaatttatcttcaccatcatcattaatttatttattaatcattattaaattattcattgatcattttttgaggatttactattgccagacactgtgctacaagctgggaatgctgacagtataagataaagagggaaatgatgggggatgggtcatgtaaagggagaactttcatttttacttcatatatatctaagcagttataataggttgatttttgtaatttaaaaaatgtaaaaatgcatacatgcactagtgcatgaatggcagccaggatgagtggaattggagaagcatcacacacacagtgacttttgtgtttgatcttgaagaatgagcgaaccaggcagggagtcggggaggagaatcgcattccttgaggaaagagcagcatgtgggaaaacataaatgcacgcaataacctggctcacatgttaagagaactttctgactataatgagggatgtgttgctgccccaagcttcattatctaaggagtttgttgaacactctctagaggcttttaataataggattgtttagctggtctgtctggactggttagatataacactatttaaatgacccaatctcattacattgtgaagatttccattttttaggttacgtaagaaattttggacctaaaaatcttgcattttaagacagtctttgtcagaattactttttggctctaaatgaattctgtaacatttgtattctaaattgacctttagtaaaagcaggaatggccatattcaaactggtaacctcgcaaatcctgcccaccctttcactttctgtctcaatacattgatgtcctctaacccatttcctgtcttatgtggctttagtgccacttatcaaaattgtgtgcaaatttccttggctaacagtaacagtttttgtctgggcttgtctagcagtggaattctgcctgagttcatcatttttgtgactggtacttgaagtgcatcagatgattaatttcatgataagagggctttttggggtggtgaaatagacatttatggaaaatgggatacccacattaagcagggtgactacctgtttaccatacaacccacacaaagccaatacaactatagatgtgctttctttagtctgttgcctctgcaaacattgcccgtgtgtttctctatgcccttcaaaaacatcagagcagcacatcctggaagatcctatcttttgtaagtttaagaagcagcctcttgtcacaggttgactcctaggtagtgtgcctagtgaccaagagggctgctaagaaagctttctgaccacttgtggctgtcattggactgatttgcccagatgacatcaattgggaatttgaggcatgacctataaagatcagttgcttgcaagagtctcaggaaaataattgtggagttaagaaacttgaagcgatttttaaaaattacctaacccaaccttctcatttgaaaaattaaaaaataaataggccagatatggcggctcatgcctgtaatcccagcgctgtgggagcctgaggcgggtgggtctcttgaggccaggagttcaagaccagcctggacaatgtggtgaaaccctgtctctactaaaaacacaaaaattagctgggtgtggtggcaggcgcctgtaatcccagctactcaggaggctaaggtgggaggattacttgaaccggggaggcataggttgtagtgagccaagatcgtgtcactgcactccagcctgggtgacagagtaagactctgcctaaaaaaaaaaaaagaaagattaaaaaataaataaatctgctgggcgtggtggctcacgcctgtaatcccagcactttgggaggccgaggcgggtggatcacctgaggtcgggagtttgagaccagcctgatcaacatggagaaacctcgtctctactaaaaacacgaaaaaattagctgggcgtggtggcgcatgcctcattcacgtacatgggagagtctacaaagtcacacgtattcataggttaagccacatgctgacaaatgtcataagaagaccctacacttttaccttggccgatccctcccctcagtgcaagctctgtgcaagagtgaacttgaacttcactcagtgcaagagtgaacacacactttgtgccggctttaaagaacccagcacaaagccagtctgcatggcctacagacatattttgctggacaatgattacttgcttttctttttgtttttcttgtatttgcctgtttgattggctcctgacataccagaaaatcactgtcaaaacattagcttaacatttgttaaggaaacaaaaagacttcggtgaccacaccttataaaccaaacagttttgtaaatcactttggaaaatttcactaaaaaaaaaaatccttaacaatataataagtaaagaaaatttaaaaccacaaaacatcactgtgttgtagggggaggtctgatttacagagtaaccacatagtaattataattattagaatgtccagttttcaaaaaacgttacaaggcatacaaagaatgggaaagtgtggctcattcaaaggaacaaaataaaagtgacagaaaatatccctaaagaaacccagacatcaaacttaccagacaaagactttaaaacaactgtcttcattatactcaaatgtcaaaaggaaaacataaacaaagaaataaaggaatcagaaaaaatattaaaaagtaggaatatcagcaaagagataacaaattctggagtggaaaactacaatgataaaaatttaaaaatcaccagagggatttaagagtatatttgcacacacagaggaagccatgaacttgaagagaagaaaatggaaaatactgtctctgagaaacagaaagaataaaaaataaacaatgagcagagactaatgaatttgtgggacatcatcaaatagaccaacattcatattctagaaggataaattatgttgttaaaaagtttaccattctttctttttcacctttcttccttcttccttccccctcctcctttttacttttcttcctcttcctttctcttcttcttttctcttataaccttgggtctcttttccttttctttttcttaattaatctaaaatgtagcgccggtgggaaggatgtccggtctttgatagtcaaagaaacacaaggcacggcgcccatgggggcggctcatgagtgaaagcacggcattctagga

SEQ ID NO: 300802 - DNA, 6065 bp, Homo sapiens
acatgagaggtatgattggtggtggattttttccgtggatctatcaattcacaattcgaatttggaagaaagaaggaaaacatgacgtctccagccaaattcaaaaaggataaggagatcatagcagagtacgatactcaggtcaaagagatccgtgctcagctcacagagcagatgaaatgcctggaccagcagtgtgagcttcgggtgcaactgttgcaggacctccaggacttcttccgaaagaaggcagagattgagatggactactcccgcaacctggagaagctggcagaacacttcctggccaagacacgcagcaccaaggaccagcaattcaagaaggatcagaatgttctctctccagtcaactgctggaatctcctcttaaaccaggtgaagtgggaaagcagggaccataccaccctgagtgacatctacctgaataatatcattcctcgatttgtacaagtcagcgaggactcaggaagactctttaaaaagagtaaagaagtcggccagcagctccaagatgatttgatgaaggtcctgaacgagctctactcgcatcagtgctcagagcaaactaaaggaggcggagaagcaggaggagaagcaaattggtaaatcggtaaagcaggaggaccggcagaccccacgctcccctgactccacggccaacgttcgcattgaggagaaacatgtccggaggagctcagtgaagaagattgagaagatgaaggagaagcgtcaagccaagtacacggagaataagctgaaggccatcaaagcccggaatgagtacttgctggctttggaggcaaccaatgcatctgtcttcaagtactacatccatgacctatctgaccttattgatcagtgttgtgacttaggctaccatgcaagtctgaaccgggctctacgcaccttcctctctgctgagttaaacctggaacagtcgaagcatgagggtctggatgccatcgagaatgcagtagaaaacctggatgccaccagtgacaagcagcgcctcatggagatgtacaacaacgtcttctgcccccctatgaagtttgagtttcagccccacatgggggatatggcttcccagctctgtgcccagcagcctgtccagagtgagctggtacagagatgccaacaactgcagtctcgcttatccactctaaagattgaaaacgaagaggtaaagaagacaatggaggccaccctgcaaaccatccaggacattgtgactgtcgaggactttgatgtgtctgactgcttccagtacagcaactccatggagtccgtcaagtccacggtctctgaaaccttcatgagcaagcccagcattgctaagaggagagccaaccagcaagagacagagcagttttatttcacagtaagggagtgctatggcttttaaagagcgtcagcatgcactgcagcactcaagggagatttggaactcagagtccttgttaagtgtctgaaggacaggcattgaatatcttagatacgaatgtgggcatactcagagaccatccctacacttaaaggtgcaaacattaaaagttgtatatgtctaacagggatccgcccaagagaaaggatgctcccaagtatacaactaagaagattttcttttttaagaaatttttaactagctagtaggctttcactggaaagtttccttctcaggcacaggggatcctgaaaggggaacttcatcttttagttcttggagagtacatacaaatattcataataacacatattttgtttataaaaatctataatctcttctaggtgatatgatgacattattttataacttttattgttgggaaactattttttctaattattgctaaaacttaaaggatgggtaatatgcagcattactattttgcacataattccaaaacatcgtattttcttattcatgtatctctagtcttcttttagacagttggacccttttttctttttcttttttttttttttttttaagtattgttaacaatcctttggaagtcactactggtctttgtgtgctgctttttaataattgagttattttgagcttgccaagtaggatctattgcctggactaaaatttatttcctaatcttctgatgaccaagaaaggaaaaattaagtttgcagatgtgagatgaaatatagccagtgaatatgcatactgattctgaatgaaaggaattaacttttcagtcaagaaacagtctgcatgcagtaaattgaatttttcctgcaactggaatgatttgtttaattcttctttgaacactgccctttctccagtaagaacactaatgatttgctaatattttttaaagaaatctgtttttttaattagttaagctcagacttcctcttattttttatcctagagaaaactgctaaaagggaatgatatatcagtactattcttctaaaacaactttttaaaaatgattatacaaagccaaatatgctcattatataaaatttagaagcaaaaagaaggaaataaaaattttccataattctaccagctagagataatggtgttagaatatattcctttctaatctgttttctatgcatgcacaaacacatatgtgagcacatatttataattttattctaaaaaataggacactgctgtacatattgttttacaatctaagtcatataattataatattctttaagcatatttatgagtaaaatattaaaacctatacaaaaaaataatagaatggcattttagctcattcattgatttttataaaatatttaacacactccctggtttgtagttagcgttcaataaatgctaaaaatttatcttcaccatcatcattaatttatttattaatcattattaaattattcattgatcattttttgaggatttactattgccagacactgtgctacaagctgggaatgctgacagtataagataaagagggaaatgatgggggatgggtcatgtaaagggagaactttcatttttacttcatatatatctaagcagttataataggttgatttttgtaatttaaaaaatgtaaaaatgcatacatgcactagtgcatgaatggcagccaggatgagtggaattggagaagcatcacacacacagtgacttttgtgtttgatcttgaagaatgagcgaaccaggcagggagtcggggaggagaatcgcattccttgaggaaagagcagcatgtgggaaaacataaatgcacgcaataacctggctcacatgttaagagaactttctgactataatgagggatgtgttgctgccccaagcttcattatctaaggagtttgttgaacactctctagaggcttttaataataggattgtttagctggtctgtctggactggttagatataacactatttaaatgacccaatctcattacattgtgaagatttccattttttaggttacgtaagaaattttggacctaaaaatcttgcattttaagacagtctttgtcagaattactttttggctctaaatgaattctgtaacatttgtattctaaattgacctttagtaaaagcaggaatggccatattcaaactggtaacctcgcaaatcctgcccaccctttcactttctgtctcaatacattgatgtcctctaacccatttcctgtcttatgtggctttagtgccacttatcaaaattgtgtgcaaatttccttggctaacagtaacagtttttgtctgggcttgtctagcagtggaattctgcctgagttcatcatttttgtgactggtacttgaagtgcatcagatgattaatttcatgataagagggctttttggggtggtgaaatagacatttatggaaaatgggatacccacattaagcagggtgactacctgtttaccatacaacccacacaaagccaatacaactatagatgtgctttctttagtctgttgcctctgcaaacattgcccgtgtgtttctctatgcccttcaaaaacatcagagcagcacatcctggaagatcctatcttttgtaagtttaagaagcagcctcttgtcacaggttgactcctaggtagtgtgcctagtgaccaagagggctgctaagaaagctttctgaccacttgtggctgtcattggactgatttgcccagatgacatcaattgggaatttgaggcatgacctataaagatcagttgcttgcaagagtctcaggaaaataattgtggagttaagaaacttgaagcgatttttaaaaattacctaacccaaccttctcatttgaaaaattaaaaaataaataggccagatatggcggctcatgcctgtaatcccagcgctgtgggagcctgaggcgggtgggtctcttgaggccaggagttcaagaccagcctggacaatgtggtgaaaccctgtctctactaaaaacacaaaaattagctgggtgtggtggcaggcgcctgtaatcccagctactcaggaggctaaggtgggaggattacttgaaccggggaggcataggttgtagtgagccaagatcgtgtcactgcactccagcctgggtgacagagtaagactctgcctaaaaaaaaaaaaagaaagattaaaaaataaataaatctgctgggcgtggtggctcacgcctgtaatcccagcactttgggaggccgaggcgggtggatcacctgaggtcgggagtttgagaccagcctgatcaacatggagaaacctcgtctctactaaaaacacgaaaaaattagctgggcgtggtggcgcatgcctcattcacgtacatgggagagtctacaaagtcacacgtattcataggttaagccacatgctgacaaatgtcataagaagaccctacacttttaccttggccgatccctcccctcagtgcaagctctgtgcaagagtgaacttgaacttcactcagtgcaagagtgaacacacactttgtgccggctttaaagaacccagcacaaagccagtctgcatggcctacagacatattttgctggacaatgattacttgcttttctttttgtttttcttgtatttgcctgtttgattggctcctgacataccagaaaatcactgtcaaaacattagcttaacatttgttaaggaaacaaaaagacttcggtgaccacaccttataaaccaaacagttttgtaaatcactttggaaaatttcactaaaaaaaaaaatccttaacaatataataagtaaagaaaatttaaaaccacaaaacatcactgtgttgtagggggaggtctgatttacagagtaaccacatagtaattataattattagaatgtccagttttcaaaaaacgttacaaggcatacaaagaatgggaaagtgtggctcattcaaaggaacaaaataaaagtgacagaaaatatccctaaagaaacccagacatcaaacttaccagacaaagactttaaaacaactgtcttcattatactcaaatgtcaaaaggaaaacataaacaaagaaataaaggaatcagaaaaaatattaaaaagtaggaatatcagcaaagagataacaaattctggagtggaaaactacaatgataaaaatttaaaaatcaccagagggatttaagagtatatttgcacacacagaggaagccatgaacttgaagagaagaaaatggaaaatactgtctctgagaaacagaaagaataaaaaataaacaatgagcagagactaatgaatttgtgggacatcatcaaatagaccaacattcatattctagaaggataaattatgttgttaaaaagtttaccattctttctttttcacctttcttccttcttccttccccctcctcctttttacttttcttcctcttcctttctcttcttcttttctcttataaccttgggtctcttttccttttctttttcttaattaatctaaaatgtagcgccggtgggaaggatgtccggtctttgatagtcaaagaaacacaaggcacggcgcccatgggggcggctcatgagtgaaagcacggcattctagga

SEQ ID NO: 300803 - DNA, 5502 bp, Homo sapiens
atcgtgacgtctgtactagagtgtgtctcactgcttctcatacagtactcagtgatgtcgtcaagtcatcgtctcttagtaccttcataccgaaccccatgacttgcgttacatcgagatccattcatgaagatacagccctgttttatttcaccgtaaggaaggtttccaatataatcgacatgcgtcaagccaagtacacggagaataagctgaaggccatcaaagcccggaatgagtacttgctggctttggaggcaaccaatgcatctgtcttcaagtactacatccatgacctatctgaccttattgatcagtgttgtgacttaggctaccatgcaagtctgaaccgggctctacgcaccttcctctctgctgagttaaacctggaacagtcgaagcatgagggtctggatgccatcgagaatgcagtagaaaacctggatgccaccagtgacaagcagcgcctcatggagatgtacaacaacgtcttctgcccccctatgaagtttgagtttcagccccacatgggggatatggcttcccagctctgtgcccagcagcctgtccagagtgagctggtacagagatgccaacaactgcagtctcgcttatccactctaaagattgaaaacgaagaggtaaagaagacaatggaggccaccctgcaaaccatccaggacattgtgactgtcgaggactttgatgtgtctgactgcttccagtacagcaactccatggagtccgtcaagtccacggtctctgaaaccttcatgagcaagcccagcattgctaagaggagagccaaccagcaagagacagagcagttttatttcacagtaagggagtgctatggcttttaaagagcgtcagcatgcactgcagcactcaagggagatttggaactcagagtccttgttaagtgtctgaaggacaggcattgaatatcttagatacgaatgtgggcatactcagagaccatccctacacttaaaggtgcaaacattaaaagttgtatatgtctaacagggatccgcccaagagaaaggatgctcccaagtatacaactaagaagattttcttttttaagaaatttttaactagctagtaggctttcactggaaagtttccttctcaggcacaggggatcctgaaaggggaacttcatcttttagttcttggagagtacatacaaatattcataataacacatattttgtttataaaaatctataatctcttctaggtgatatgatgacattattttataacttttattgttgggaaactattttttctaattattgctaaaacttaaaggatgggtaatatgcagcattactattttgcacataattccaaaacatcgtattttcttattcatgtatctctagtcttcttttagacagttggacccttttttctttttcttttttttttttttttttaagtattgttaacaatcctttggaagtcactactggtctttgtgtgctgctttttaataattgagttattttgagcttgccaagtaggatctattgcctggactaaaatttatttcctaatcttctgatgaccaagaaaggaaaaattaagtttgcagatgtgagatgaaatatagccagtgaatatgcatactgattctgaatgaaaggaattaacttttcagtcaagaaacagtctgcatgcagtaaattgaatttttcctgcaactggaatgatttgtttaattcttctttgaacactgccctttctccagtaagaacactaatgatttgctaatattttttaaagaaatctgtttttttaattagttaagctcagacttcctcttattttttatcctagagaaaactgctaaaagggaatgatatatcagtactattcttctaaaacaactttttaaaaatgattatacaaagccaaatatgctcattatataaaatttagaagcaaaaagaaggaaataaaaattttccataattctaccagctagagataatggtgttagaatatattcctttctaatctgttttctatgcatgcacaaacacatatgtgagcacatatttataattttattctaaaaaataggacactgctgtacatattgttttacaatctaagtcatataattataatattctttaagcatatttatgagtaaaatattaaaacctatacaaaaaaataatagaatggcattttagctcattcattgatttttataaaatatttaacacactccctggtttgtagttagcgttcaataaatgctaaaaatttatcttcaccatcatcattaatttatttattaatcattattaaattattcattgatcattttttgaggatttactattgccagacactgtgctacaagctgggaatgctgacagtataagataaagagggaaatgatgggggatgggtcatgtaaagggagaactttcatttttacttcatatatatctaagcagttataataggttgatttttgtaatttaaaaaatgtaaaaatgcatacatgcactagtgcatgaatggcagccaggatgagtggaattggagaagcatcacacacacagtgacttttgtgtttgatcttgaagaatgagcgaaccaggcagggagtcggggaggagaatcgcattccttgaggaaagagcagcatgtgggaaaacataaatgcacgcaataacctggctcacatgttaagagaactttctgactataatgagggatgtgttgctgccccaagcttcattatctaaggagtttgttgaacactctctagaggcttttaataataggattgtttagctggtctgtctggactggttagatataacactatttaaatgacccaatctcattacattgtgaagatttccattttttaggttacgtaagaaattttggacctaaaaatcttgcattttaagacagtctttgtcagaattactttttggctctaaatgaattctgtaacatttgtattctaaattgacctttagtaaaagcaggaatggccatattcaaactggtaacctcgcaaatcctgcccaccctttcactttctgtctcaatacattgatgtcctctaacccatttcctgtcttatgtggctttagtgccacttatcaaaattgtgtgcaaatttccttggctaacagtaacagtttttgtctgggcttgtctagcagtggaattctgcctgagttcatcatttttgtgactggtacttgaagtgcatcagatgattaatttcatgataagagggctttttggggtggtgaaatagacatttatggaaaatgggatacccacattaagcagggtgactacctgtttaccatacaacccacacaaagccaatacaactatagatgtgctttctttagtctgttgcctctgcaaacattgcccgtgtgtttctctatgcccttcaaaaacatcagagcagcacatcctggaagatcctatcttttgtaagtttaagaagcagcctcttgtcacaggttgactcctaggtagtgtgcctagtgaccaagagggctgctaagaaagctttctgaccacttgtggctgtcattggactgatttgcccagatgacatcaattgggaatttgaggcatgacctataaagatcagttgcttgcaagagtctcaggaaaataattgtggagttaagaaacttgaagcgatttttaaaaattacctaacccaaccttctcatttgaaaaattaaaaaataaataggccagatatggcggctcatgcctgtaatcccagcgctgtgggagcctgaggcgggtgggtctcttgaggccaggagttcaagaccagcctggacaatgtggtgaaaccctgtctctactaaaaacacaaaaattagctgggtgtggtggcaggcgcctgtaatcccagctactcaggaggctaaggtgggaggattacttgaaccggggaggcataggttgtagtgagccaagatcgtgtcactgcactccagcctgggtgacagagtaagactctgcctaaaaaaaaaaaaagaaagattaaaaaataaataaatctgctgggcgtggtggctcacgcctgtaatcccagcactttgggaggccgaggcgggtggatcacctgaggtcgggagtttgagaccagcctgatcaacatggagaaacctcgtctctactaaaaacacgaaaaaattagctgggcgtggtggcgcatgcctcattcacgtacatgggagagtctacaaagtcacacgtattcataggttaagccacatgctgacaaatgtcataagaagaccctacacttttaccttggccgatccctcccctcagtgcaagctctgtgcaagagtgaacttgaacttcactcagtgcaagagtgaacacacactttgtgccggctttaaagaacccagcacaaagccagtctgcatggcctacagacatattttgctggacaatgattacttgcttttctttttgtttttcttgtatttgcctgtttgattggctcctgacataccagaaaatcactgtcaaaacattagcttaacatttgttaaggaaacaaaaagacttcggtgaccacaccttataaaccaaacagttttgtaaatcactttggaaaatttcactaaaaaaaaaaatccttaacaatataataagtaaagaaaatttaaaaccacaaaacatcactgtgttgtagggggaggtctgatttacagagtaaccacatagtaattataattattagaatgtccagttttcaaaaaacgttacaaggcatacaaagaatgggaaagtgtggctcattcaaaggaacaaaataaaagtgacagaaaatatccctaaagaaacccagacatcaaacttaccagacaaagactttaaaacaactgtcttcattatactcaaatgtcaaaaggaaaacataaacaaagaaataaaggaatcagaaaaaatattaaaaagtaggaatatcagcaaagagataacaaattctggagtggaaaactacaatgataaaaatttaaaaatcaccagagggatttaagagtatatttgcacacacagaggaagccatgaacttgaagagaagaaaatggaaaatactgtctctgagaaacagaaagaataaaaaataaacaatgagcagagactaatgaatttgtgggacatcatcaaatagaccaacattcatattctagaaggataaattatgttgttaaaaagtttaccattctttctttttcacctttcttccttcttccttccccctcctcctttttacttttcttcctcttcctttctcttcttcttttctcttataaccttgggtctcttttccttttctttttcttaattaatctaaaatgtagcgccggtgggaaggatgtccggtctttgatagtcaaagaaacacaaggcacggcgcccatgggggcggctcatgagtgaaagcacggcattctagga

SEQ ID NO: 300804 - DNA, 5272 bp, Homo sapiens
agcattgtgtttctggagccggagctgcctgaggcactcttctccagcctcctcagccttccatggagctgcagaccctacatagacctacccctgccaggctccaaacagatccccctacccattcctttcatgtactgtttggtcctggaagaggctcacacaagttggctttgggttttgcttcaacatagaaaccacgagccttataccttgaatatgggtagtttcattgccagtaatgggaactctggaactgccaaagggactgtatcctctttctgacctggtgttgctttcttttgttaggcttcccagctctgtgcccagcagcctgtccagagtgagctggtacagagatgccaacaactgcagtctcgcttatccactctaaagattgaaaacgaagaggtaaagaagacaatggaggccaccctgcaaaccatccaggacattgtgactgtcgaggactttgatgtgtctgactgcttccagtacagcaactccatggagtccgtcaagtccacggtctctgaaaccttcatgagcaagcccagcattgctaagaggagagccaaccagcaagagacagagcagttttatttcacagtaagggagtgctatggcttttaaagagcgtcagcatgcactgcagcactcaagggagatttggaactcagagtccttgttaagtgtctgaaggacaggcattgaatatcttagatacgaatgtgggcatactcagagaccatccctacacttaaaggtgcaaacattaaaagttgtatatgtctaacagggatccgcccaagagaaaggatgctcccaagtatacaactaagaagattttcttttttaagaaatttttaactagctagtaggctttcactggaaagtttccttctcaggcacaggggatcctgaaaggggaacttcatcttttagttcttggagagtacatacaaatattcataataacacatattttgtttataaaaatctataatctcttctaggtgatatgatgacattattttataacttttattgttgggaaactattttttctaattattgctaaaacttaaaggatgggtaatatgcagcattactattttgcacataattccaaaacatcgtattttcttattcatgtatctctagtcttcttttagacagttggacccttttttctttttcttttttttttttttttttaagtattgttaacaatcctttggaagtcactactggtctttgtgtgctgctttttaataattgagttattttgagcttgccaagtaggatctattgcctggactaaaatttatttcctaatcttctgatgaccaagaaaggaaaaattaagtttgcagatgtgagatgaaatatagccagtgaatatgcatactgattctgaatgaaaggaattaacttttcagtcaagaaacagtctgcatgcagtaaattgaatttttcctgcaactggaatgatttgtttaattcttctttgaacactgccctttctccagtaagaacactaatgatttgctaatattttttaaagaaatctgtttttttaattagttaagctcagacttcctcttattttttatcctagagaaaactgctaaaagggaatgatatatcagtactattcttctaaaacaactttttaaaaatgattatacaaagccaaatatgctcattatataaaatttagaagcaaaaagaaggaaataaaaattttccataattctaccagctagagataatggtgttagaatatattcctttctaatctgttttctatgcatgcacaaacacatatgtgagcacatatttataattttattctaaaaaataggacactgctgtacatattgttttacaatctaagtcatataattataatattctttaagcatatttatgagtaaaatattaaaacctatacaaaaaaataatagaatggcattttagctcattcattgatttttataaaatatttaacacactccctggtttgtagttagcgttcaataaatgctaaaaatttatcttcaccatcatcattaatttatttattaatcattattaaattattcattgatcattttttgaggatttactattgccagacactgtgctacaagctgggaatgctgacagtataagataaagagggaaatgatgggggatgggtcatgtaaagggagaactttcatttttacttcatatatatctaagcagttataataggttgatttttgtaatttaaaaaatgtaaaaatgcatacatgcactagtgcatgaatggcagccaggatgagtggaattggagaagcatcacacacacagtgacttttgtgtttgatcttgaagaatgagcgaaccaggcagggagtcggggaggagaatcgcattccttgaggaaagagcagcatgtgggaaaacataaatgcacgcaataacctggctcacatgttaagagaactttctgactataatgagggatgtgttgctgccccaagcttcattatctaaggagtttgttgaacactctctagaggcttttaataataggattgtttagctggtctgtctggactggttagatataacactatttaaatgacccaatctcattacattgtgaagatttccattttttaggttacgtaagaaattttggacctaaaaatcttgcattttaagacagtctttgtcagaattactttttggctctaaatgaattctgtaacatttgtattctaaattgacctttagtaaaagcaggaatggccatattcaaactggtaacctcgcaaatcctgcccaccctttcactttctgtctcaatacattgatgtcctctaacccatttcctgtcttatgtggctttagtgccacttatcaaaattgtgtgcaaatttccttggctaacagtaacagtttttgtctgggcttgtctagcagtggaattctgcctgagttcatcatttttgtgactggtacttgaagtgcatcagatgattaatttcatgataagagggctttttggggtggtgaaatagacatttatggaaaatgggatacccacattaagcagggtgactacctgtttaccatacaacccacacaaagccaatacaactatagatgtgctttctttagtctgttgcctctgcaaacattgcccgtgtgtttctctatgcccttcaaaaacatcagagcagcacatcctggaagatcctatcttttgtaagtttaagaagcagcctcttgtcacaggttgactcctaggtagtgtgcctagtgaccaagagggctgctaagaaagctttctgaccacttgtggctgtcattggactgatttgcccagatgacatcaattgggaatttgaggcatgacctataaagatcagttgcttgcaagagtctcaggaaaataattgtggagttaagaaacttgaagcgatttttaaaaattacctaacccaaccttctcatttgaaaaattaaaaaataaataggccagatatggcggctcatgcctgtaatcccagcgctgtgggagcctgaggcgggtgggtctcttgaggccaggagttcaagaccagcctggacaatgtggtgaaaccctgtctctactaaaaacacaaaaattagctgggtgtggtggcaggcgcctgtaatcccagctactcaggaggctaaggtgggaggattacttgaaccggggaggcataggttgtagtgagccaagatcgtgtcactgcactccagcctgggtgacagagtaagactctgcctaaaaaaaaaaaaagaaagattaaaaaataaataaatctgctgggcgtggtggctcacgcctgtaatcccagcactttgggaggccgaggcgggtggatcacctgaggtcgggagtttgagaccagcctgatcaacatggagaaacctcgtctctactaaaaacacgaaaaaattagctgggcgtggtggcgcatgcctcattcacgtacatgggagagtctacaaagtcacacgtattcataggttaagccacatgctgacaaatgtcataagaagaccctacacttttaccttggccgatccctcccctcagtgcaagctctgtgcaagagtgaacttgaacttcactcagtgcaagagtgaacacacactttgtgccggctttaaagaacccagcacaaagccagtctgcatggcctacagacatattttgctggacaatgattacttgcttttctttttgtttttcttgtatttgcctgtttgattggctcctgacataccagaaaatcactgtcaaaacattagcttaacatttgttaaggaaacaaaaagacttcggtgaccacaccttataaaccaaacagttttgtaaatcactttggaaaatttcactaaaaaaaaaaatccttaacaatataataagtaaagaaaatttaaaaccacaaaacatcactgtgttgtagggggaggtctgatttacagagtaaccacatagtaattataattattagaatgtccagttttcaaaaaacgttacaaggcatacaaagaatgggaaagtgtggctcattcaaaggaacaaaataaaagtgacagaaaatatccctaaagaaacccagacatcaaacttaccagacaaagactttaaaacaactgtcttcattatactcaaatgtcaaaaggaaaacataaacaaagaaataaaggaatcagaaaaaatattaaaaagtaggaatatcagcaaagagataacaaattctggagtggaaaactacaatgataaaaatttaaaaatcaccagagggatttaagagtatatttgcacacacagaggaagccatgaacttgaagagaagaaaatggaaaatactgtctctgagaaacagaaagaataaaaaataaacaatgagcagagactaatgaatttgtgggacatcatcaaatagaccaacattcatattctagaaggataaattatgttgttaaaaagtttaccattctttctttttcacctttcttccttcttccttccccctcctcctttttacttttcttcctcttcctttctcttcttcttttctcttataaccttgggtctcttttccttttctttttcttaattaatctaaaatgtagcgccggtgggaaggatgtccggtctttgatagtcaaagaaacacaaggcacggcgcccatgggggcggctcatgagtgaaagcacggcattctagga

SEQ ID NO: 300805 - DNA, 5989 bp, Homo sapiens
acatgagaggtatgattggtggtggattttttccgtggatctatcaattcacaattcgaatttggaagaaagaaggaaaacatgacgtctccagccaaattcaaaaaggataaggagatcatagcagagtacgatactcaggtcaaagagatccgtgctcagctcacagagcagatgaaatgcctggaccagcagtgtgagcttcgggtgcaactgttgcaggacctccaggacttcttccgaaagaaggcagagattgagatggactactcccgcaacctggagaagctggcagaacacttcctggccaagacacgcagcaccaaggaccagcaattcaagaaggatcagaatgttctctctccagtcaactgctggaatctcctcttaaaccaggtgaagtgggaaagcagggaccataccaccctgagtgacatctacctgaataatatcattcctcgatttgtacaagtcagcgaggactcaggaagactctttaaaaagagtaaagaagtcggccagcagctccaagatgatttgatgaaggtcctgaacgagctctactcggtcatgaagacatatcacatgtacaatgccgacagcatcagtgctcagagcaaactaaaggaggcggagaagcaggaggagaagcaaattggtaaatcggtaaagcaggaggaccggcagaccccacgctcccctgactccacggccaacgttcgcattgaggagaaacatgtccggaggagctcagtgaagaagattgagaagatgaaggagaagcgtcaagccaagtacacggagaataagctgaaggccatcaaagcccggaatgagtacttgctggctttggaggcaaccaatgcatctgtcttcaagtactacatccatgacctatctgaccttattgatcagtgttgtgacttaggctaccatgcaagtctgaaccgggctctacgcaccttcctctctgctgagttaaacctggaacagtcgaagcatgagggtctggatgccatcgagaatgcagtagaaaacctggatgccaccagtgacaagcagcgcctcatggagatgtacaacaacgtcttctgcccccctatgaagtttgagtttcagccccacatgggggatatggcttcccagctctgtgcccagcagcctgtccagagtgagctggtacagagatgccaacaactgcagtctcgcttatccactctaaagattgaaaacgaagaggtaaagaagacaatggaggccaccctgcaaaccatccaggacattgtgactgtcgaggactttgatgtgtctgactgcttccagtacagcaactccatggagtccgtcaagtccacggtctctgaaaccttcatgagcaagcccagcattgctaagaggagagccaaccagcaagagacagagcagttttatttcacagtaagggagtgctatggcttttaaagagcgtcagcatgcactgcagcactcaagggagatttggaactcagagtccttgttaagtgtctgaaggacaggcattgaatatcttagatacgaatgtgggcatactcagagaccatccctacacttaaaggtgcaaacattaaaagttgtatatgtctaacagggatccgcccaagagaaaggatgctcccaagtatacaactaagaagattttcttttttaagaaatttttaactagctagtaggctttcactggaaagtttccttctcaggcacaggggatcctgaaaggggaacttcatcttttagttcttggagagtacatacaaatattcataataacacatattttgtttataaaaatctataatctcttctaggtgatatgatgacattattttataacttttattgttgggaaactattttttctaattattgctaaaacttaaaggatgggtaatatgcagcattactattttgcacataattccaaaacatcgtattttcttattcatgtatctctagtcttcttttagacagttggacccttttttctttttcttttttttttttttttttaagtattgttaacaatcctttggaagtcactactggtctttgtgtgctgctttttaataattgagttattttgagcttgccaagtaggatctattgcctggactaaaatttatttcctaatcttctgatgaccaagaaaggaaaaattaagtttgcagatgtgagatgaaatatagccagtgaatatgcatactgattctgaatgaaaggaattaacttttcagtcaagaaacagtctgcatgcagtaaattgaatttttcctgcaactggaatgatttgtttaattcttctttgaacactgccctttctccagtaagaacactaatgatttgctaatattttttaaagaaatctgtttttttaattagttaagctcagacttcctcttattttttatcctagagaaaactgctaaaagggaatgatatatcagtactattcttctaaaacaactttttaaaaatgattatacaaagccaaatatgctcattatataaaatttagaagcaaaaagaaggaaataaaaattttccataattctaccagctagagataatggtgttagaatatattcctttctaatctgttttctatgcatgcacaaacacatatgtgagcacatatttataattttattctaaaaaataggacactgctgtacatattgttttacaatctaagtcatataattataatattctttaagcatatttatgagtaaaatattaaaacctatacaaaaaaataatagaatggcattttagctcattcattgatttttataaaatatttaacacactccctggtttgtagttagcgttcaataaatgctaaaaatttatcttcaccatcatcattaatttatttattaatcattattaaattattcattgatcattttttgaggatttactattgccagacactgtgctacaagctgggaatgctgacagtataagataaagagggaaatgatgggggatgggtcatgtaaagggagaactttcatttttacttcatatatatctaagcagttataataggttgatttttgtaatttaaaaaatgtaaaaatgcatacatgcactagtgcatgaatggcagccaggatgagtggaattggagaagcatcacacacacagtgacttttgtgtttgatcttgaagaatgagcgaaccaggcagggagtcggggaggagaatcgcattccttgaggaaagagcagcatgtgggaaaacataaatgcacgcaataacctggctcacatgttaagagaactttctgactataatgagggatgtgttgctgccccaagcttcattatctaaggagtttgttgaacactctctagaggcttttaataataggattgtttagctggtctgtctggactggttagatataacactatttaaatgacccaatctcattacattgtgaagatttccattttttaggttacgtaagaaattttggacctaaaaatcttgcattttaagacagtctttgtcagaattactttttggctctaaatgaattctgtaacatttgtattctaaattgacctttagtaaaagcaggaatggccatattcaaactggtaacctcgcaaatcctgcccaccctttcactttctgtctcaatacattgatgtcctctaacccatttcctgtcttatgtggctttagtgccacttatcaaaattgtgtgcaaatttccttggctaacagtaacagtttttgtctgggcttgtctagcagtggaattctgcctgagttcatcatttttgtgactggtacttgaagtgcatcagatgattaatttcatgatagatgtgctttctttagtctgttgcctctgcaaacattgcccgtgtgtttctctatgcccttcaaaaacatcagagcagcacatcctggaagatcctatcttttgtaagtttaagaagcagcctcttgtcacaggttgactcctaggtagtgtgcctagtgaccaagagggctgctaagaaagctttctgaccacttgtggctgtcattggactgatttgcccagatgacatcaattgggaatttgaggcatgacctataaagatcagttgcttgcaagagtctcaggaaaataattgtggagttaagaaacttgaagcgatttttaaaaattacctaacccaaccttctcatttgaaaaattaaaaaataaataggccagatatggcggctcatgcctgtaatcccagcgctgtgggagcctgaggcgggtgggtctcttgaggccaggagttcaagaccagcctggacaatgtggtgaaaccctgtctctactaaaaacacaaaaattagctgggtgtggtggcaggcgcctgtaatcccagctactcaggaggctaaggtgggaggattacttgaaccggggaggcataggttgtagtgagccaagatcgtgtcactgcactccagcctgggtgacagagtaagactctgcctaaaaaaaaaaaaagaaagattaaaaaataaataaatctgctgggcgtggtggctcacgcctgtaatcccagcactttgggaggccgaggcgggtggatcacctgaggtcgggagtttgagaccagcctgatcaacatggagaaacctcgtctctactaaaaacacgaaaaaattagctgggcgtggtggcgcatgcctcattcacgtacatgggagagtctacaaagtcacacgtattcataggttaagccacatgctgacaaatgtcataagaagaccctacacttttaccttggccgatccctcccctcagtgcaagctctgtgcaagagtgaacttgaacttcactcagtgcaagagtgaacacacactttgtgccggctttaaagaacccagcacaaagccagtctgcatggcctacagacatattttgctggacaatgattacttgcttttctttttgtttttcttgtatttgcctgtttgattggctcctgacataccagaaaatcactgtcaaaacattagcttaacatttgttaaggaaacaaaaagacttcggtgaccacaccttataaaccaaacagttttgtaaatcactttggaaaatttcactaaaaaaaaaaatccttaacaatataataagtaaagaaaatttaaaaccacaaaacatcactgtgttgtagggggaggtctgatttacagagtaaccacatagtaattataattattagaatgtccagttttcaaaaaacgttacaaggcatacaaagaatgggaaagtgtggctcattcaaaggaacaaaataaaagtgacagaaaatatccctaaagaaacccagacatcaaacttaccagacaaagactttaaaacaactgtcttcattatactcaaatgtcaaaaggaaaacataaacaaagaaataaaggaatcagaaaaaatattaaaaagtaggaatatcagcaaagagataacaaattctggagtggaaaactacaatgataaaaatttaaaaatcaccagagggatttaagagtatatttgcacacacagaggaagccatgaacttgaagagaagaaaatggaaaatactgtctctgagaaacagaaagaataaaaaataaacaatgagcagagactaatgaatttgtgggacatcatcaaatagaccaacattcatattctagaaggataaattatgttgttaaaaagtttaccattctttctttttcacctttcttccttcttccttccccctcctcctttttacttttcttcctcttcctttctcttcttcttttctcttataaccttgggtctcttttccttttctttttcttaattaatctaaaatgtagcgccggtgggaaggatgtccggtctttgatagtcaaagaaacacaaggcacggcgcccatgggggcggctcatgagtgaaagcacggcattctagga

SEQ ID NO: 300806 - DNA, 4182 bp, Homo sapiens
acatgagaggtatgattggtggtggattttttccgtggatctatcaattcacaattcgaatttggaagaaagaaggaaaacatgacgtctccagccaaattcaaaaaggataaggagatcatagcagagtacgatactcaggtcaaagagatccgtgctcagctcacagagcagatgaaatgcctggaccagcagtgtgagcttcgggtgcaactgttgcaggacctccaggacttcttccgaaagaaggcagagattgagatggactactcccgcaacctggagaagctggcagaacacttcctggccaagacacgcagcaccaaggaccagcaattcaagaaggatcagaatgttctctctccagtcaactgctggaatctcctcttaaaccaggtgaagtgggaaagcagggaccataccaccctgagtgacatctacctgaataatatcattcctcgatttgtacaagtcagcgaggactcaggaagactctttaaaaagagtaaagaagtcggccagcagctccaagatgatttgatgaaggtcctgaacgagctctactcggtcatgaagacatatcacatgtacaatgccgacagcatcagtgctcagagcaaactaaaggaggcggagaagcaggaggagaagcaaattggtaaatcggtaaagcaggaggaccggcagaccccacgctcccctgactccacggccaacgttcgcattgaggagaaacatgtccggaggagctcagtgaagaagattgagaagatgaaggagaagcgtcaagccaagtacacggagaataagctgaaggccatcaaagcccggaatgagtacttgctggctttggaggcaaccaatgcatctgtcttcaagtactacatccatgacctatctgaccttattgatcagtgttgtgacttaggctaccatgcaagtctgaaccgggctctacgcaccttcctctctgctgagttaaacctggaacagtcgaagcatgagggtctggatgccatcgagaatgcagtagaaaacctggatgccaccagtgacaagcagcgcctcatggagatgtacaacaacgtcttctgcccccctatgaagtttgagtttcagccccacatgggggatatggcttcccagctctgtgcccagcagcctgtccagagtgagctggtacagagatgccaacaactgcagtctcgcttatccactctaaagattgaaaacgaagaggtaaagaagacaatggaggccaccctgcaaaccatccaggacattgtgactgtcgaggactttgatgtgtctgactgcttccagtacagcaactccatggagtccgtcaagtccacggtctctgaaaccttcatgagcaagcccagcattgctaagaggagagccaaccagcaagagacagagcagttttatttcacaaaaatgaaagagtacctggagggcaggaacctcatcaccaagttacaagccaagcatgaccttctgcagaaaaccctgggagaaagtcagcggacagattgcagtctagccaggcgcagctcaactgtgaggaaacaggactccagccaggcaattcctctggtggtggaaagctgtatccggtttatcagcagacacggactacagcatgaaggaattttccgggtgtcaggatcccaggtggaagtgaatgacatcaaaaatgcctttgagagaggagaggaccccctggctggggaccagaacgaccatgacatggattccatagctggtgtcctgaagctttacttccgggggctggaacaccctctcttccccaaggacatctttcatgacctgatggcctgcgtcacaatggacaacctgcaggagagagctctgcacatccggaaagtcctcctagtcctgcccaaaaccactctgattatcatgagatacctctttgccttcctcaatcatttatcacagttcagtgaagagaacatgatggacccctacaacctcgccatctgcttcgggccctcgctaatgtcagtgccagagggccacgaccaggtgtcctgccaagcccacgtgaatgagctgatcaaaaccatcatcatccagcatgagaacatcttcccaagccccagggagctggagggccctgtctacagcagaggaggaagcatggaggattactgtgatagccctcatggagagactacctcggttgaagactcaacccaggatgtgaccgcagagcaccacacgagcgatgacgaatgtgagcccatcgaggccattgccaagtttgactacgtgggccggacagcccgagagctgtcctttaagaagggagcatccctgctgctttaccagcgggcttccgacgactggtgggaaggccggcacaatggcatcgacggactcatcccccatcagtacatcgtggtccaagacaccgaggacggtgtcgtggagaggtccagccccaagtctgagattgaggtcatttctgagccacctgaagaaaaggtgacagccagagcgggggccagctgtcccagtgggggtcatgtagccgatatttatcttgcaaacatcaacaagtaagctctgcttttcattttctgctcccctgaatgacttgcaacacccagcctcaccctctggcctaacccccatctccattcctgtgctgcacgtagggctcccagctcccccagcctaacagtttgcatgtggtcattgctgctgcaaggcggacagggctgaggatgctgctacaagcctcggggcaggtccaggtctccagctagctgccctcgtgctgtggaagggtgctttactgtgtgttcccgcagtgtctgtccacccagacctttgtggcagtcttacagctaaaactttgaccaaagctttggtcactttatgcaacctggttttgtactgtttctcagaggtgccttcttttttccaatccatactcaaataatagtctttgatgtctgtcttccttgacccgtgttcgtgcaaagattcagagtctgtgtgtggcttctactaggctgatgttacaccaggtgggtttattgagatatcatgtgtctgttcctccccctgtcctgcattcactcctgtggaggaaaggaggccacgatgtccctaaggaaagctttgtcctgagctcttcattcattggctaacccctagctcccttttcttctgccctttcacaccaggagaaataattttccattttgttcctattgctttggccttttgtattattctacccccttagtccctttgcagatccccactcctgctcagcaggctcttacctctgacccccagctttcattgtggctgttagcaacatcctggggtttaaactccacccacgcccgatctggctgtctagagggattctacgcctgcgtgctgccgcctccccaagaggcattcaggttattggagaactaatctcatctcaaggggccagacaccaagtcccaaagcctacagacctctttccgccaggccctgaaacctggccccgtgccagcaggatgacaagccccagggcgctcctgatgaatatggattggagatgatgtacagtttttattcccctctggcttttgaggaatgaaatgatttgcactttgaaaacctgttaaccgtagcctctggacactgagactggaaggagaataaaggatgcttgttgtttttaaactataccaggtttcccagatctcttggcttttttccacccagacggtagcagggggagtggttggggcacgtggctcttttccatctctttcaccctcaagttagtaaagtcgtttattcagatcacttactcagtgtagttataatttaattcagaccagttaaaaaaaaattgagaagtttctgtttccctccagcacactgccctgctgggaggcaagccaatatcaagtaactgtgggctaatcacatttttttccttatttacaattctgtgttaaattgtaaccctacaatcaaaaggtcgtgatcctataattaactcagaaaccaaggcggggttggtggaggaagagttagataattagttaagtacatatttttaagccatcatatatttgatgccatttgtgcatagaaattgtagagagtaataactgaaatggtaaacagaagaagaaa

SEQ ID NO: 300807 - DNA, 7054 bp, Homo sapiens
acatgagaggtatgattggtggtggattttttccgtggatctatcaattcacaattcgaatttggaagaaagaaggaaaacatgacgtctccagccaaattcaaaaaggataaggagatcatagcagagtacgatactcaggtcaaagagatccgtgctcagctcacagagcagatgaaatgcctggaccagcagtgtgagcttcgggtgcaactgttgcaggacctccaggacttcttccgaaagaaggcagagattgagatggactactcccgcaacctggagaagctggcagaacacttcctggccaagacacgcagcaccaaggaccagcaattcaagaaggatcagaatgttctctctccagtcaactgctggaatctcctcttaaaccaggtgaagtgggaaagcagggaccataccaccctgagtgacatctacctgaataatatcattcctcgatttgtacaagtcagcgaggactcaggaagactctttaaaaagagtaaagaagtcggccagcagctccaagatgatttgatgaaggtcctgaacgagctctactcggtcatgaagacatatcacatgtacaatgccgacagcatcagtgctcagagcaaactaaaggaggcggagaagcaggaggagaagcaaattggtaaatcggtaaagcaggaggaccggcagaccccacgctcccctgactccacggccaacgttcgcattgaggagaaacatgtccggaggagctcagtgaagaagattgagaagatgaaggagaagcgtcaagccaagtacacggagaataagctgaaggccatcaaagcccggaatgagtacttgctggctttggaggcaaccaatgcatctgtcttcaagtactacatccatgacctatctgaccttattgatcagtgttgtgacttaggctaccatgcaagtctgaaccgggctctacgcaccttcctctctgctgagttaaacctggaacagtcgaagcatgagggtctggatgccatcgagaatgcagtagaaaacctggatgccaccagtgacaagcagcgcctcatggagatgtacaacaacgtcttctgcccccctatgaagtttgagtttcagccccacatgggggatatggcttcccagctctgtgcccagcagcctgtccagagtgagctggtacagagatgccaacaactgcagtctcgcttatccactctaaagattgaaaacgaagaggtaaagaagacaatggaggccaccctgcaaaccatccaggacattgtgactgtcgaggactttgatgtgtctgactgcttccagtacagcaactccatggagtccgtcaagtccacggtctctgaaaccttcatgagcaagcccagcattgctaagaggagagccaaccagcaagagacagagcagttttatttcacaaaaatgaaagagtacctggagggcaggaacctcatcaccaagttacaagccaagcatgaccttctgcagaaaaccctgggagaaagtcagcggacagattgcagtctagccaggcgcagctcaactgtgaggaaacaggactccagccaggcaattcctctggtggtggaaagctgtatccggtttatcagcagacacggactacagcatgaaggaattttccgggtgtcaggatcccaggtggaagtgaatgacatcaaaaatgcctttgagagaggagaggaccccctggctggggaccagaacgaccatgacatggattccatagctggtgtcctgaagctttacttccgggggctggaacaccctctcttccccaaggacatctttcatgacctgatggcctgcgtcacaatggacaacctgcaggagagagctctgcacatccggaaagtcctcctagtcctgcccaaaaccactctgattatcatgagatacctctttgccttcctcaatcatttatcacagttcagtgaagagaacatgatggacccctacaacctcgccatctgcttcgggccctcgctaatgtcagtgccagagggccacgaccaggtgtcctgccaagcccacgtgaatgagctgatcaaaaccatcatcatccagcatgagaacatcttcccaagccccagggagctggagggccctgtctacagcagaggaggaagcatggaggattactgtgatagccctcatggagagactacctcggttgaagactcaacccaggatgtgaccgcagagcaccacacgagcgatgacgaatgtgagcccatcgaggccattgccaagtttgactacgtgggccggacagcccgagagctgtcctttaagaagggagcatccctgctgctttaccagcgggcttccgacgactggtgggaaggccggcacaatggcatcgacggactcatcccccatcagtacatcgtggtccaagacacgttgatatcctgagtgagtctgcaccctcccagcctcttcccggctcgttctgcagggaaatcctccctctgttgatagcatcgcaaacctggtggcaatctgtgcgtggacaggaccctcccaaatttagcattatgacttcaccacaggatcaagagaagatgaattgtgggggagaaggggctttctttgtcatcagtagccagaggggccaggagagcagtggagagacctgggaccggcttggatgctctgagcggggctagaggcgctacgacagtgtgtggcggtgtcctgccacgacgccgccgtctccagagccaccacacagttgactgtccttacccggcagtgctcaggacctcagccgataaaccacaacctggacttgccgcctccttctccaggaggccgccccagcacggcctccccaggaagcagcatggggtagaaggcagatgcctcgaatccaggtgtcccctagccacgctttcctgaggagctgaggagcccgcagaactcagcggattatttatttttatttaaacgacccttcaaaggcccttaggtttccttgcctctgctcacagaactagtccagccaggtgtcgctgctgcctcagagctgtgtggggtcgcgtgtatgtcggggggccatcttgccgatttaacgctgctttttgtgttgttgttgttttccctcctccctgcctgcctgccccttctcccccagcgaggacggtgtcgtggagaggtccagccccaagtctgagattgaggtcatttctgagccacctgaagaaaaggtgacagccagagcgggggccagctgtcccagtgggggtcatgtagccgatatttatcttgcaaacatcaacaagcaaaggaagcgtccagaatctgggagcatccggaaaacttttcggagtgacagccatgggctgagcagttccctgactgactcctcctccccaggggtgggggctagctgccgcccatcctcccagcccatcatgagccagagcctccccaaagaagggccagataagtgttccatcagtgggcacgggagcctcaactccatcagccgccactcatccctgaagaatcggctggatagtccacagatccggaagactgccacagcgggaaggtcaaaaagcttcaataaccatcggcccatggaccctgaggtcattgctcaggatattgaggcaacaatgaactcggccctgaatgagctacgggaactagaacggcagagcagtgtcaaacacacccctgacgtggttctggacaccttggagcccctcaaaacctccccagtggtggcccccacgtcagagccctccagccctctgcacacccagctcctcaaggaccccgagcccgccttccagcgcagcgccagtactgctggggacatcgcctgcgccttccggcctgtcaagtctgtcaagatggctgccccggtcaaaccaccagccacacggcccaagcccactgtcttccccaaaacaaatgccactagccctggtgtcaactcatcaacttccccacagtctactgacaagtcttgtactgtctgagggataataatttaattgttctagacaaggggactatagggactgactgttattaaaatcttcctatttaactagcttggggacttcagttgaaaattaggttctaagttgttcttgcaggaattagcctccccgtctcccaaaaccttgagaatgaagcccttggtatcgcctctcccttcccactgccctctgcttcccccagtcgtcgtaattcagccagctgcagtccgtaccgttcttaggttagccagagacaggttttcattatcaggtcactgtgaaatctggtaaggcagtcctgaggacatgggctcaagtctcagtcccctcagaccacggtgatgccttgaccagatggttggctactgccatccagctttcagtggcatcttgttttgggaactgattatagagaatcatatatagtccagtcttcattttacatacacacacatattttacacacacacacattttacacacacacacacacacacacacacatatgtttttctagtctctggcatgtgtagcctctcctggtcatagaccagtctctttgtaagttattgtggcagttcacacagtagccaccaggggtctctgtttccatcacaaactttgttctgtctgggccagagaacctagcctttgaaatctctccatcatatgaaacataacgggatgggacaatcccgtaacctgtttggggttgggggctttctctctgtgttctttccattgatgtgaattggtcattggtgtttgctcttgcctctcctccatcccctagaagtacacccccgtcttattaaggagcttttaaagtttttctgaatgtatagacatttctcgggttcctacctttgtctctgatggaccattttccatttaagacattttcctgtataagacagttttatagctggttccttttagggtaaagagtcttaagagagttttattgtgtctatggcaggtttgggaaaggtaagaaatgggtcctttttcctcctaatgtttttggcacttaaaacataaaattcattatcctattaaaaaattaaattcagctttgctaatccagaaattgttcccaaatgaaaacttgttttaagtccaccccttagtttccttattttacaaggtctctcttcagggaccaacaggggcttagagagccttagttagattaaagggagaccctacctcttaaaaccagttttcatttatgcaaacaaggacaattaagggaaccctgaccccacaggctctcaagtcttcccaaggccagaatcgaaagaaaattaaaatttgaatgctgaatattctggctctactctggccttttttctggttcccttccaaaatgcacaaatcatacccttgtctgctccaattcagtctccaaacctggtgcctgtgctcctggcccccctagcatcatgctatcccaggagtatcaggaccagacacatccacagccaggctcatgggtctcagacagcaacttgagttaaagctgaaactcatccttcttctctgtgttttctggtttaaaagctgcacttatattttagccttattattttctgtagttccggagagatggtgggttgccattctggtaggaaaatctgagttttcttatctttgacctagaagagattctttttggaccaacctgcgaaattggtagttaggtctatggaaagtggtaggatttttttttttttaatcctgtgcaaaggaaaagaggtgctttgtgggaaatcactaatgagaaggctaacctgcagcaccagagaaacctttccaagtgctaggcaggagaactgaagaactctttcagtgaagtgagtcagcctagaagaggcaacccacagtcttgatttttgttgctgtttcctgacctgttcttgcctgtcacctgggcctacacaggtcccgagccaacggggctttcatacccaaggatctgtttccttgctgaaaatgaaaccctatctttcactttacattcctttcaatccaactgatcaaaactggtacccacacttgccctttctccctctctccagcacactcccctctaagaaagtaaaagcaaagctttcttaatggcaacactttgggcctgttctgttgctcctgccttatttctctttcaaccctgtacatgactcgtgttcaccatccccttgatcagtgtccatccgcgctaatttgcatcatgaactgaacagtgtgtgagtggtcacctactaaacccagctctgggggcagagctgtcttccccatctctggtgctcctaacacctgtgagatggtcctgtcgagaggactaggaaccgataggaggagagtccttctcggcagagctcactgcaaacaactggaattgaggttgcacactgtgatttttacaccgaaaagccaaaaggagctggccatccagggcctagggagaccagccttcctcagctatgcttgccgaaaccagcatgatgcttcaaagagccctgctccacccctcatggcatggatccttttcctggtgtggactctgaagggtcagtcttcggggaagagaggtggggtggggctactagcatcccaatttagaaaacagaggagtttgtagccagcagcctgtaaactggaaacactggtctcagccaacctcctcagggcgccctggcttctccccaaggagatgaggagcggtgatgccagcaccgggatgcgcagagcactggaagggctggtgcagatctacttcccatgcagaagagaagtcacatcttccagggaatcgcaatgttgtggcgtctgacttgtatgtcacatttgtgtaaaatggtatattctttaaaatagtgttgataactggaatattgtatgtatgcttggagatgctttgtgtgaacctaagactgtcactcaacagatgttggattggggaaaatccaaagcacaacttcaaaataaaatacatttttaggtttcaaaaaaaaaaa

SEQ ID NO: 300808 - DNA, 4916 bp, Homo sapiens
acatgagaggtatgattggtggtggattttttccgtggatctatcaattcacaattcgaatttggaagaaagaaggaaaacatgacgtctccagccaaattcaaaaaggataaggagatcatagcagagtacgatactcaggtcaaagagatccgtgctcagctcacagagcagatgaaatgcctggaccagcagtgtgagcttcgggtgcaactgttgcaggacctccaggacttcttccgaaagaaggcagagattgagatggactactcccgcaacctggagaagctggcagaacacttcctggccaagacacgcagcaccaaggaccagcaattcaagaaggatcagaatgttctctctccagtcaactgctggaatctcctcttaaaccaggtgaagtgggaaagcagggaccataccaccctgagtgacatctacctgaataatatcattcctcgatttgtacaagtcagcgaggactcaggaagactctttaaaaagagtaaagaagtcggccagcagctccaagatgatttgatgaaggtcctgaacgagctctactcggtcatgaagacatatcacatgtacaatgccgacagcatcagtgctcagagcaaactaaaggaggcggagaagcaggaggagaagcaaattggtaaatcggtaaagcaggaggaccggcagaccccacgctcccctgactccacggccaacgttcgcattgaggagaaacatgtccggaggagctcagtgaagaagattgagaagatgaaggagaagcgtcaagccaagtacacggagaataagctgaaggccatcaaagcccggaatgagtacttgctggctttggaggcaaccaatgcatctgtcttcaagtactacatccatgacctatctgaccttattgatcagtgttgtgacttaggctaccatgcaagtctgaaccgggctctacgcaccttcctctctgctgagttaaacctggaacagtcgaagcatgagggtctggatgccatcgagaatgcagtagaaaacctggatgccaccagtgacaagcagcgcctcatggagatgtacaacaacgtcttctgcccccctatgaagtttgagtttcagccccacatgggggatatggcttcccagctctgtgcccagcagcctgtccagagtgagctggtacagagatgccaacaactgcagtctcgcttatccactctaaagattgaaaacgaagaggtaaagaagacaatggaggccaccctgcaaaccatccaggacattgtgactgtcgaggactttgatgtgtctgactgcttccagtacagcaactccatggagtccgtcaagtccacggtctctgaaaccttcatgagcaagcccagcattgctaagaggagagccaaccagcaagagacagagcagttttatttcacaaaaatgaaagagtacctggagggcaggaacctcatcaccaagttacaagccaagcatgaccttctgcagaaaaccctgggagaaagtcagcggacagattgcagtctagccaggcgcagctcaactgtgaggaaacaggactccagccaggcaattcctctggtggtggaaagctgtatccggtttatcagcagacacggactacagcatgaaggaattttccgggtgtcaggatcccaggtggaagtgaatgacatcaaaaatgcctttgagagaggagaggaccccctggctggggaccagaacgaccatgacatggattccatagctggtgtcctgaagctttacttccgggggctggaacaccctctcttccccaaggacatctttcatgacctgatggcctgcgtcacaatggacaacctgcaggagagagctctgcacatccggaaagtcctcctagtcctgcccaaaaccactctgattatcatgagatacctctttgccttcctcaatcatttatcacagttcagtgaagagaacatgatggacccctacaacctcgccatctgcttcgggccctcgctaatgtcagtgccagagggccacgaccaggtgtcctgccaagcccacgtgaatgagctgatcaaaaccatcatcatccagcatgagaacatcttcccaagccccagggagctggagggccctgtctacagcagaggaggaagcatggaggattactgtgatagccctcatggagagactacctcggttgaagactcaacccaggatgtgaccgcagagcaccacacgagcgatgacgaatgtgagcccatcgaggccattgccaagtttgactacgtgggccggacagcccgagagctgtcctttaagaagggagcatccctgctgctttaccagcgggcttccgacgactggtgggaaggccggcacaatggcatcgacggactcatcccccatcagtacatcgtggtccaagacacgttgatatcctgagtgagtctgcaccctcccagcctcttcccggctcgttctgcagggaaatcctccctctgttgatagcatcgcaaacctggtggcaatctgtgcgtggacaggaccctcccaaatttagcattatgacttcaccacaggatcaagagaagatgaattgtgggggagaaggggctttctttgtcatcagtagccagaggggccaggagagcagtggagagacctgggaccggcttggatgctctgagcggggctagaggcgctacgacagtgtgtggcggtgtcctgccacgacgccgccgtctccagagccaccacacagttgactgtccttacccggcagtgctcaggacctcagccgataaaccacaacctggacttgccgcctccttctccaggaggccgccccagcacggcctccccaggaagcagcatggggtagaaggcagatgcctcgaatccaggtgtcccctagccacgctttcctgaggagctgaggagcccgcagaactcagcggattatttatttttatttaaacgacccttcaaaggcccttaggtttccttgcctctgctcacagaactagtccagccaggtgtcgctgctgcctcagagctgtgtggggtcgcgtgtatgtcggggggccatcttgccgatttaacgctgctttttgtgttgttgttgttttccctcctccctgcctgcctgccccttctcccccagcgaggacggtgtcgtggagaggtccagccccaagtctgagattgaggtcatttctgagccacctgaagaaaaggtgacagccagagcgggggccagctgtcccagtgggggtcatgtagccgatatttatcttgcaaacatcaacaagtaagctctgcttttcattttctgctcccctgaatgacttgcaacacccagcctcaccctctggcctaacccccatctccattcctgtgctgcacgtagggctcccagctcccccagcctaacagtttgcatgtggtcattgctgctgcaaggcggacagggctgaggatgctgctacaagcctcggggcaggtccaggtctccagctagctgccctcgtgctgtggaagggtgctttactgtgtgttcccgcagtgtctgtccacccagacctttgtggcagtcttacagctaaaactttgaccaaagctttggtcactttatgcaacctggttttgtactgtttctcagaggtgccttcttttttccaatccatactcaaataatagtctttgatgtctgtcttccttgacccgtgttcgtgcaaagattcagagtctgtgtgtggcttctactaggctgatgttacaccaggtgggtttattgagatatcatgtgtctgttcctccccctgtcctgcattcactcctgtggaggaaaggaggccacgatgtccctaaggaaagctttgtcctgagctcttcattcattggctaacccctagctcccttttcttctgccctttcacaccaggagaaataattttccattttgttcctattgctttggccttttgtattattctacccccttagtccctttgcagatccccactcctgctcagcaggctcttacctctgacccccagctttcattgtggctgttagcaacatcctggggtttaaactccacccacgcccgatctggctgtctagagggattctacgcctgcgtgctgccgcctccccaagaggcattcaggttattggagaactaatctcatctcaaggggccagacaccaagtcccaaagcctacagacctctttccgccaggccctgaaacctggccccgtgccagcaggatgacaagccccagggcgctcctgatgaatatggattggagatgatgtacagtttttattcccctctggcttttgaggaatgaaatgatttgcactttgaaaacctgttaaccgtagcctctggacactgagactggaaggagaataaaggatgcttgttgtttttaaactataccaggtttcccagatctcttggcttttttccacccagacggtagcagggggagtggttggggcacgtggctcttttccatctctttcaccctcaagttagtaaagtcgtttattcagatcacttactcagtgtagttataatttaattcagaccagttaaaaaaaaattgagaagtttctgtttccctccagcacactgccctgctgggaggcaagccaatatcaagtaactgtgggctaatcacatttttttccttatttacaattctgtgttaaattgtaaccctacaatcaaaaggtcgtgatcctataattaactcagaaaccaaggcggggttggtggaggaagagttagataattagttaagtacatatttttaagccatcatatatttgatgccatttgtgcatagaaattgtagagagtaataactgaaatggtaaacagaagaagaaa

SEQ ID NO: 300809 - DNA, 3736 bp, Homo sapiens
gcgctgtagtcgatagtgacacgtggtaaaggacaggtggtcggtcgaattccgtgatccatgggctgagcagttccctgactgactcctcctccccaggggtgggggctagctgccgcccatcctcccagcccatcatgagccagagcctccccaaagaagggccagataagtgttccatcagtgggcacgggagcctcaactccatcagccgccactcatccctgaagaatcggctggatagtccacagatccggaagactgccacagcgggaaggtcaaaaagcttcaataaccatcggcccatggaccctgaggtcattgctcaggatattgaggcaacaatgaactcggccctgaatgagctacgggaactagaacggcagagcagtgtcaaacacacccctgacgtggttctggacaccttggagcccctcaaaacctccccagtggtggcccccacgtcagagccctccagccctctgcacacccagctcctcaaggaccccgagcccgccttccagcgcagcgccagtactgctggggacatcgcctgcgccttccggcctgtcaagtctgtcaagatggctgccccggtcaaaccaccagccacacggcccaagcccactgtcttccccaaaacaaatgccactagccctggtgtcaactcatcaacttccccacagtctactgacaagtcttgtactgtctgagggataataatttaattgttctagacaaggggactatagggactgactgttattaaaatcttcctatttaactagcttggggacttcagttgaaaattaggttctaagttgttcttgcaggaattagcctccccgtctcccaaaaccttgagaatgaagcccttggtatcgcctctcccttcccactgccctctgcttcccccagtcgtcgtaattcagccagctgcagtccgtaccgttcttaggttagccagagacaggttttcattatcaggtcactgtgaaatctggtaaggcagtcctgaggacatgggctcaagtctcagtcccctcagaccacggtgatgccttgaccagatggttggctactgccatccagctttcagtggcatcttgttttgggaactgattatagagaatcatatatagtccagtcttcattttacatacacacacatattttacacacacacacattttacacacacacacacacacacacacacatatgtttttctagtctctggcatgtgtagcctctcctggtcatagaccagtctctttgtaagttattgtggcagttcacacagtagccaccaggggtctctgtttccatcacaaactttgttctgtctgggccagagaacctagcctttgaaatctctccatcatatgaaacataacgggatgggacaatcccgtaacctgtttggggttgggggctttctctctgtgttctttccattgatgtgaattggtcattggtgtttgctcttgcctctcctccatcccctagaagtacacccccgtcttattaaggagcttttaaagtttttctgaatgtatagacatttctcgggttcctacctttgtctctgatggaccattttccatttaagacattttcctgtataagacagttttatagctggttccttttagggtaaagagtcttaagagagttttattgtgtctatggcaggtttgggaaaggtaagaaatgggtcctttttcctcctaatgtttttggcacttaaaacataaaattcattatcctattaaaaaattaaattcagctttgctaatccagaaattgttcccaaatgaaaacttgttttaagtccaccccttagtttccttattttacaaggtctctcttcagggaccaacaggggcttagagagccttagttagattaaagggagaccctacctcttaaaaccagttttcatttatgcaaacaaggacaattaagggaaccctgaccccacaggctctcaagtcttcccaaggccagaatcgaaagaaaattaaaatttgaatgctgaatattctggctctactctggccttttttctggttcccttccaaaatgcacaaatcatacccttgtctgctccaattcagtctccaaacctggtgcctgtgctcctggcccccctagcatcatgctatcccaggagtatcaggaccagacacatccacagccaggctcatgggtctcagacagcaacttgagttaaagctgaaactcatccttcttctctgtgttttctggtttaaaagctgcacttatattttagccttattattttctgtagttccggagagatggtgggttgccattctggtaggaaaatctgagttttcttatctttgacctagaagagattctttttggaccaacctgcgaaattggtagttaggtctatggaaagtggtaggatttttttttttttaatcctgtgcaaaggaaaagaggtgctttgtgggaaatcactaatgagaaggctaacctgcagcaccagagaaacctttccaagtgctaggcaggagaactgaagaactctttcagtgaagtgagtcagcctagaagaggcaacccacagtcttgatttttgttgctgtttcctgacctgttcttgcctgtcacctgggcctacacaggtcccgagccaacggggctttcatacccaaggatctgtttccttgctgaaaatgaaaccctatctttcactttacattcctttcaatccaactgatcaaaactggtacccacacttgccctttctccctctctccagcacactcccctctaagaaagtaaaagcaaagctttcttaatggcaacactttgggcctgttctgttgctcctgccttatttctctttcaaccctgtacatgactcgtgttcaccatccccttgatcagtgtccatccgcgctaatttgcatcatgaactgaacagtgtgtgagtggtcacctactaaacccagctctgggggcagagctgtcttccccatctctggtgctcctaacacctgtgagatggtcctgtcgagaggactaggaaccgataggaggagagtccttctcggcagagctcactgcaaacaactggaattgaggttgcacactgtgatttttacaccgaaaagccaaaaggagctggccatccagggcctagggagaccagccttcctcagctatgcttgccgaaaccagcatgatgcttcaaagagccctgctccacccctcatggcatggatccttttcctggtgtggactctgaagggtcagtcttcggggaagagaggtggggtggggctactagcatcccaatttagaaaacagaggagtttgtagccagcagcctgtaaactggaaacactggtctcagccaacctcctcagggcgccctggcttctccccaaggagatgaggagcggtgatgccagcaccgggatgcgcagagcactggaagggctggtgcagatctacttcccatgcagaagagaagtcacatcttccagggaatcgcaatgttgtggcgtctgacttgtatgtcacatttgtgtaaaatggtatattctttaaaatagtgttgataactggaatattgtatgtatgcttggagatgctttgtgtgaacctaagactgtcactcaacagatgttggattggggaaaatccaaagcacaacttcaaaataaaatacatttttaggtttcaaaaaaaaaaa

SEQ ID NO: 300810 - DNA, 2835 bp, Homo sapiens
cgatcctttcatttgagcacaaacatcttatataatactatctcccttaccttctcccatttattaatcttttttctattctactattttcttccccctacttctattctaaatctttagtatccactcgtctacatctttcttactctgatcgttatcttctccgtcgtgacttggtagctccctgccgtatttaaatgacccaatctcattacattgtgaagatttccattttttaggttacgtaagaaattttggacctaaaaatcttgcattttaagacagtctttgtcagaattactttttggctctaaatgaattctgtaacatttgtattctaaattgacctttagtaaaagcaggaatggccatattcaaactggtaacctcgcaaatcctgcccaccctttcactttctgtctcaatacattgatgtcctctaacccatttcctgtcttatgtggctttagtgccacttatcaaaattgtgtgcaaatttccttggctaacagtaacagtttttgtctgggcttgtctagcagtggaattctgcctgagttcatcatttttgtgactggtacttgaagtgcatcagatgattaatttcatgataagagggctttttggggtggtgaaatagacatttatggaaaatgggatacccacattaagcagggtgactacctgtttaccatacaacccacacaaagccaatacaactatagatgtgctttctttagtctgttgcctctgcaaacattgcccgtgtgtttctctatgcccttcaaaaacatcagagcagcacatcctggaagatcctatcttttgtaagtttaagaagcagcctcttgtcacaggttgactcctaggtagtgtgcctagtgaccaagagggctgctaagaaagctttctgaccacttgtggctgtcattggactgatttgcccagatgacatcaattgggaatttgaggcatgacctataaagatcagttgcttgcaagagtctcaggaaaataattgtggagttaagaaacttgaagcgatttttaaaaattacctaacccaaccttctcatttgaaaaattaaaaaataaataggccagatatggcggctcatgcctgtaatcccagcgctgtgggagcctgaggcgggtgggtctcttgaggccaggagttcaagaccagcctggacaatgtggtgaaaccctgtctctactaaaaacacaaaaattagctgggtgtggtggcaggcgcctgtaatcccagctactcaggaggctaaggtgggaggattacttgaaccggggaggcataggttgtagtgagccaagatcgtgtcactgcactccagcctgggtgacagagtaagactctgcctaaaaaaaaaaaaagaaagattaaaaaataaataaatctgctgggcgtggtggctcacgcctgtaatcccagcactttgggaggccgaggcgggtggatcacctgaggtcgggagtttgagaccagcctgatcaacatggagaaacctcgtctctactaaaaacacgaaaaaattagctgggcgtggtggcgcatgcctcattcacgtacatgggagagtctacaaagtcacacgtattcataggttaagccacatgctgacaaatgtcataagaagaccctacacttttaccttggccgatccctcccctcagtgcaagctctgtgcaagagtgaacttgaacttcactcagtgcaagagtgaacacacactttgtgccggctttaaagaacccagcacaaagccagtctgcatggcctacagacatattttgctggacaatgattacttgcttttctttttgtttttcttgtatttgcctgtttgattggctcctgacataccagaaaatcactgtcaaaacattagcttaacatttgttaaggaaacaaaaagacttcggtgaccacaccttataaaccaaacagttttgtaaatcactttggaaaatttcactaaaaaaaaaaatccttaacaatataataagtaaagaaaatttaaaaccacaaaacatcactgtgttgtagggggaggtctgatttacagagtaaccacatagtaattataattattagaatgtccagttttcaaaaaacgttacaaggcatacaaagaatgggaaagtgtggctcattcaaaggaacaaaataaaagtgacagaaaatatccctaaagaaacccagacatcaaacttaccagacaaagactttaaaacaactgtcttcattatactcaaatgtcaaaaggaaaacataaacaaagaaataaaggaatcagaaaaaatattaaaaagtaggaatatcagcaaagagataacaaattctggagtggaaaactacaatgataaaaatttaaaaatcaccagagggatttaagagtatatttgcacacacagaggaagccatgaacttgaagagaagaaaatggaaaatactgtctctgagaaacagaaagaataaaaaataaacaatgagcagagactaatgaatttgtgggacatcatcaaatagaccaacattcatattctagaaggataaattatgttgttaaaaagtttaccattctttctttttcacctttcttccttcttccttccccctcctcctttttacttttcttcctcttcctttctcttcttcttttctcttataaccttgggtctcttttccttttctttttcttaattaatctaaaatgtagcgccggtgggaaggatgtccggtctttgatagtcaaagaaacacaaggcacggcgcccatgggggcggctcatgagtgaaagcacggcattctagga

SEQ ID NO: 300811 - DNA, 1176 bp, Homo sapiens
gctcggtacccactctgatccagtagaagaggcaacccacagtcttgatttttgttgctgtttcctgacctgttcttgcctgtcacctgggcctacacaggtcccgagccaacggggctttcatacccaaggatctgtttccttgctgaaaatgaaaccctatctttcactttacattcctttcaatccaactgatcaaaactggtacccacacttgccctttctccctctctccagcacactcccctctaagaaagtaaaagcaaagctttcttaatggcaacactttgggcctgttctgttgctcctgccttatttctctttcaaccctgtacatgactcgtgttcaccatccccttgatcagtgtccatccgcgctaatttgcatcatgaactgaacagtgtgtgagtggtcacctactaaacccagctctgggggcagagctgtcttccccatctctggtgctcctaacacctgtgagatggtcctgtcgagaggactaggaaccgataggaggagagtccttctcggcagagctcactgcaaacaactggaattgaggttgcacactgtgatttttacaccgaaaagccaaaaggagctggccatccagggcctagggagaccagccttcctcagctatgcttgccgaaaccagcatgatgcttcaaagagccctgctccacccctcatggcatggatccttttcctggtgtggactctgaagggtcagtcttcggggaagagaggtggggtggggctactagcatcccaatttagaaaacagaggagtttgtagccagcagcctgtaaactggaaacactggtctcagccaacctcctcagggcgccctggcttctccccaaggagatgaggagcggtgatgccagcaccgggatgcgcagagcactggaagggctggtgcagatctacttcccatgcagaagagaagtcacatcttccagggaatcgcaatgttgtggcgtctgacttgtatgtcacatttgtgtaaaatggtatattctttaaaatagtgttgataactggaatattgtatgtatgcttggagatgctttgtgtgaacctaagactgtcactcaacagatgttggattggggaaaatccaaagcacaacttcaaaataaaatacatttttaggtttcaaaaaaaaaaa

SEQ ID NO: 300812 - DNA, 3434 bp, Homo sapiens
acatgagaggtatgattggtggtggattttttccgtggatctatcaattcacaattcgaatttggaagaaagaaggaaaacatgacgtctccagccaaattcaaaaaggataaggagatcatagcagagtacgatactcaggtcaaagagatccgtgctcagctcacagagcagatgaaatgcctggaccagcagtgtgagcttcgggtgcaactgttgcaggacctccaggacttcttccgaaagaaggcagagattgagatggactactcccgcaacctggagaagctggcagaacacttcctggccaagacacgcagcaccaaggaccagcaattcaagaaggatcagaatgttctctctccagtcaactgctggaatctcctcttaaaccaggtgaagtgggaaagcagggaccataccaccctgagtgacatctacctgaataatatcattcctcgatttgtacaagtcagcgaggactcaggaagactctttaaaaagagtaaagaagtcggccagcagctccaagatgatttgatgaaggtcctgaacgagctctactcggtcatgaagacatatcacatgtacaatgccgacagcatcagtgctcagagcaaactaaaggaggcggagaagcaggaggagaagcaaattggtaaatcggtaaagcaggaggaccggcagaccccacgctcccctgactccacggccaacgttcgcattgaggagaaacatgtccggaggagctcagtgaagaagattgagaagatgaaggagaagcgtcaagccaagtacacggagaataagctgaaggccatcaaagcccggaatgagtacttgctggctttggaggcaaccaatgcatctgtcttcaagtactacatccatgacctatctgaccttattgatcagtgttgtgacttaggctaccatgcaagtctgaaccgggctctacgcaccttcctctctgctgagttaaacctggaacagtcgaagcatgagggtctggatgccatcgagaatgcagtagaaaacctggatgccaccagtgacaagcagcgcctcatggagatgtacaacaacgtcttctgcccccctatgaagtttgagtttcagccccacatgggggatatggcttcccagctctgtgcccagcagcctgtccagagtgagctggtacagagatgccaacaactgcagtctcgcttatccactctaaagattgaaaacgaagaggtaaagaagacaatggaggccaccctgcaaaccatccaggacattgtgactgtcgaggactttgatgtgtctgactgcttccagtacagcaactccatggagtccgtcaagtccacggtctctgaaaccttcatgagcaagcccagcattgctaagaggagagccaaccagcaagagacagagcagttttatttcacaaaaatgaaagagtacctggagggcaggaacctcatcaccaagttacaagccaagcatgaccttctgcagaaaaccctgggagaaagtcagcggacagattgcagtctagccaggcgcagctcaactgtgaggaaacaggactccagccaggcaattcctctggtggtggaaagctgtatccggtttatcagcagacacggactacagcatgaaggaattttccgggtgtcaggatcccaggtggaagtgaatgacatcaaaaatgcctttgagagaggagaggaccccctggctggggaccagaacgaccatgacatggattccatagctggtgtcctgaagctttacttccgggggctggaacaccctctcttccccaaggacatctttcatgacctgatggcctgcgtcacaatggacaacctgcaggagagagctctgcacatccggaaagtcctcctagtcctgcccaaaaccactctgattatcatgagatacctctttgccttcctcaatcatttatcacagttcagtgaagagaacatgatggacccctacaacctcgccatctgcttcgggccctcgctaatgtcagtgccagagggccacgaccaggtgtcctgccaagcccacgtgaatgagctgatcaaaaccatcatcatccagcatgagaacatcttcccaagccccagggagctggagggccctgtctacagcagaggaggaagcatggaggattactgtgatagccctcatggagagactacctcggttgaagactcaacccaggatgtgaccgcagagcaccacacgagcgatgacgaatgtgagcccatcgaggccattgccaagtttgactacgtgggccggacagcccgagagctgtcctttaagaagggagcatccctgctgctttaccagcgggcttccgacgactggtgggaaggccggcacaatggcatcgacggactcatcccccatcagtacatcgtggtccaagacaccgaggacggtgtcgtggagaggtccagccccaagtctgagattgaggtcatttctgagccacctgaagaaaaggtgacagccagagcgggggccagctgtcccagtgggggtcatgtagccgatatttatcttgcaaacatcaacaactttcattgtggctgttagcaacatcctggggtttaaactccacccacgcccgatctggctgtctagagggattctacgcctgcgtgctgccgcctccccaagaggcattcaggttattggagaactaatctcatctcaaggggccagacaccaagtcccaaagcctacagacctctttccgccaggccctgaaacctggccccgtgccagcaggatgacaagccccagggcgctcctgatgaatatggattggagatgatgtacagtttttattcccctctggcttttgaggaatgaaatgatttgcactttgaaaacctgttaaccgtagcctctggacactgagactggaaggagaataaaggatgcttgttgtttttaaactataccaggtttcccagatctcttggcttttttccacccagacggtagcagggggagtggttggggcacgtggctcttttccatctctttcaccctcaagttagtaaagtcgtttattcagatcacttactcagtgtagttataatttaattcagaccagttaaaaaaaaattgagaagtttctgtttccctccagcacactgccctgctgggaggcaagccaatatcaagtaactgtgggctaatcacatttttttccttatttacaattctgtgttaaattgtaaccctacaatcaaaaggtcgtgatcctataattaactcagaaaccaaggcggggttggtggaggaagagttagataattagttaagtacatatttttaagccatcatatatttgatgccatttgtgcatagaaattgtagagagtaataactgaaatggtaaacagaagaagaaa

SEQ ID NO: 300813 - DNA, 4022 bp, Homo sapiens
  misc_feature (3957)..(3957): n is a, c, g, or t
acatgagaggtatgattggtggtggattttttccgtggatctatcaattcacaattcgaatttggaagaaagaaggaaaacatgacgtctccagccaaattcaaaaaggataaggagatcatagcagagtacgatactcaggtcaaagagatccgtgctcagctcacagagcagatgaaatgcctggaccagcagtgtgagcttcgggtgcaactgttgcaggacctccaggacttcttccgaaagaaggcagagattgagatggactactcccgcaacctggagaagctggcagaacacttcctggccaagacacgcagcaccaaggaccagcaattcaagaaggatcagaatgttctctctccagtcaactgctggaatctcctcttaaaccaggtgaagtgggaaagcagggaccataccaccctgagtgacatctacctgaataatatcattcctcgatttgtacaagtcagcgaggactcaggaagactctttaaaaagagtaaagaagtcggccagcagctccaagatgatttgatgaaggtcctgaacgagctctactcggtcatgaagacatatcacatgtacaatgccgacagcatcagtgctcagagcaaactaaaggaggcggagaagcaggaggagaagcaaattggtaaatcggtaaagcaggaggaccggcagaccccacgctcccctgactccacggccaacgttcgcattgaggagaaacatgtccggaggagctcagtgaagaagattgagaagatgaaggagaagcgtcaagccaagtacacggagaataagctgaaggccatcaaagcccggaatgagtacttgctggctttggaggcaaccaatgcatctgtcttcaagtactacatccatgacctatctgaccttattgatcagtgttgtgacttaggctaccatgcaagtctgaaccgggctctacgcaccttcctctctgctgagttaaacctggaacagtcgaagcatgagggtctggatgccatcgagaatgcagtagaaaacctggatgccaccagtgacaagcagcgcctcatggagatgtacaacaacgtcttctgcccccctatgaagtttgagtttcagccccacatgggggatatggcttcccagctctgtgcccagcagcctgtccagagtgagctggtacagagatgccaacaactgcagtctcgcttatccactctaaagattgaaaacgaagaggtaaagaagacaatggaggccaccctgcaaaccatccaggacattgtgactgtcgaggactttgatgtgtctgactgcttccagtacagcaactccatggagtccgtcaagtccacggtctctgaaaccttcatgagcaagcccagcattgctaagaggagagccaaccagcaagagacagagcagttttatttcacaaaaatgaaagagtacctggagggcaggaacctcatcaccaagttacaagccaagcatgaccttctgcagaaaaccctgggagaaagtcagcggacagattgcagtctagccaggcgcagctcaactgtgaggaaacaggactccagccaggcaattcctctggtggtggaaagctgtatccggtttatcagcagacacggactacagcatgaaggaattttccgggtgtcaggatcccaggtggaagtgaatgacatcaaaaatgcctttgagagaggagaggaccccctggctggggaccagaacgaccatgacatggattccatagctggtgtcctgaagctttacttccgggggctggaacaccctctcttccccaaggacatctttcatgacctgatggcctgcgtcacaatggacaacctgcaggagagagctctgcacatccggaaagtcctcctagtcctgcccaaaaccactctgattatcatgagatacctctttgccttcctcaatcatttatcacagttcagtgaagagaacatgatggacccctacaacctcgccatctgcttcgggccctcgctaatgtcagtgccagagggccacgaccaggtgtcctgccaagcccacgtgaatgagctgatcaaaaccatcatcatccagcatgagaacatcttcccaagccccagggagctggagggccctgtctacagcagaggaggaagcatggaggattactgtgatagccctcatggagagactacctcggttgaagactcaacccaggatgtgaccgcagagcaccacacgagcgatgacgaatgtgagcccatcgaggccattgccaagtttgactacgtgggccggacagcccgagagctgtcctttaagaagggagcatccctgctgctttaccagcgggcttccgacgactggtgggaaggccggcacaatggcatcgacggactcatcccccatcagtacatcgtggtccaagacacgttgatatcctgagtgagtctgcaccctcccagcctcttcccggctcgttctgcagggaaatcctccctctgttgatagcatcgcaaacctggtggcaatctgtgcgtggacaggaccctcccaaatttagcattatgacttcaccacaggatcaagagaagatgaattgtgggggagaaggggctttctttgtcatcagtagccagaggggccaggagagcagtggagagacctgggaccggcttggatgctctgagcggggctagaggcgctacgacagtgtgtggcggtgtcctgccacgacgccgccgtctccagagccaccacacagttgactgtccttacccggcagtgctcaggacctcagccgataaaccacaacctggacttgccgcctccttctccaggaggccgccccagcacggcctccccaggaagcagcatggggtagaaggcagatgcctcgaatccaggtgtcccctagccacgctttcctgaggagctgaggagcccgcagaactcagcggattatttatttttatttaaacgacccttcaaaggcccttaggtttccttgcctctgctcacagaactagtccagccaggtgtcgctgctgcctcagagctgtgtggggtcgcgtgtatgtcggggggccatcttgccgatttaacgctgctttttgtgttgttgttgttttccctcctccctgcctgcctgccccttctcccccagcgaggacggtgtcgtggagaggtccagccccaagtctgagattgaggtcatttctgagccacctgaagaaaaggtgacagccagagcgggggccagctgtcccagtgggggtcatgtagccgatatttatcttgcaaacatcaacaagtaagctctgcttttcattttctgctcccctgaatgacttgcaacacccagcctcaccctctggcctaacccccatctccattcctgtgctgcacgtagggctcccagctcccccagcctaacagtttgcatgtggtcattgctgctgcaaggcggacagggctgaggatgctgctacaagcctcggggcaggtccaggtctccagctagctgccctcgtgctgtggaagggtgctttactgtgtgttcccgcagtgtctgtccacccagacctttgtggcagtcttacagctaaaactttgaccaaagctttggtcactttatgcaacctggttttgtactgtttctcagaggtgccttcttttttccaatccatactcaaataatagtctttgatgtctgtcttccttgacccgtgttcgtgcaaagattcagagtctgtgtgtggcttctactaggctgatgttacaccaggtgggtttattgagatatcatgtgtctgttcctccccctgtcctgcattcactcctgtggaggaaaggaggccacgatgtccctaaggaaagctttgtcctgagctcttcattcattggctaacccctagctcccttttcttctgccctttccccgggaanatttccttggtcctgggtgggctgggtttttaccctttcctgggaccccggtggggcttcacttc

SEQ ID NO: 300814 - DNA, 1195 bp, Homo sapiens
acatgagaggtatgattggtggtggattttttccgtggatctatcaattcacaattcgaatttggaagaaagaaggaaaacatgacgtctccagccaaattcaaaaaggataaggagatcatagcagagtacgatactcaggtcaaagagatccgtgctcagctcacagagcagatgaaatgcctggaccagcagtgtgagcttcgggtgcaactgttgcaggacctccaggacttcttccgaaagaaggcagagattgagatggactactcccgcaacctggagaagctggcagaacacttcctggccaagacacgcagcaccaaggaccagcaattcaagaaggatcagaatgttctctctccagtcaactgctggaatctcctcttaaaccaggtgaagtgggaaagcagggaccataccaccctgagtgacatctacctgaataatatcattcctcgatttgtacaagtcagcgaggactcaggaagactctttaaaaagagtaaagaagtcggccagcagctccaagatgatttgatgaaggtcctgaacgagctctactcggtcatgaagacatatcacatgtacaatgccgacagcatcagtgctcagagcaaactaaaggaggcggagaagcaggaggagaagcaaattggtaaatcggtaaagcaggaggaccggcagaccccacgctcccctgactccacggccaacgttcgcattgaggagaaacatgtccggaggagctcagtgaagaagattgagaagatgaaggagaagcgtcaagccaagtacacggagaataagctgaaggccatcaaagcccggaatgagtacttgctggctttggaggcaaccaatgcatctgtcttcaagtactacatccatgacctatctgaccttattgatcagtgttgtgacttaggctaccatgcaagtctgaaccgggctctacgcaccttcctctctgctgagttaaacctggaacagtcgaagcatgagggtctggatgccatcgagaatgcagtagaaaacctggatgccaccagtgacaagcagcgcctcatggagatgtacaacaacgtcttctgcccccctatgaagtttgagtttcagccccacatgggggatatggtgaggccctttccctatacccccaccctcaaggggcttgagtggagttgtctagatt

SEQ ID NO: 300815 - DNA, 820 bp, Homo sapiens
acatgagaggtatgattggtggtggattttttccgtggatctatcaattcacaattcgaatttggaagaaagaaggaaaacatgacgtctccagccaaattcaaaaaggataaggagatcatagcagagtacgatactcaggtcaaagagatccgtgctcagctcacagagcagatgaaatgcctggaccagcagtgtgagcttcgggtgcaactgttgcaggacctccaggacttcttccgaaagaaggcagagattgagatggactactcccgcaacctggagaagctggcagaacacttcctggccaagacacgcagcaccaaggaccagcaattcaagaaggatcagaatgttctctctccagtcaactgctggaatctcctcttaaaccaggtgaagtgggaaagcagggaccataccaccctgagtgacatctacctgaataatatcattcctcgatttgtacaagtcagcgaggactcaggaagactctttaaaaagagtaaagaagtcggccagcagctccaagatgatttgatgaaggtcctgaacgagctctactcggtcatgaagacatatcacatgtacaatgccgacagcatcagtgctcagagcaaactaaaggaggcggagaagcaggaggagaagcaaattggtaaatcggtaaagcaggaggaccggcagaccccacgctcccctgactccacggccaacgttcgcattgaggagaaacatgtccggaggagctcagtgaagaagattgagaagatgaaggagaagatggcccagaagcgtcctgcctgcacctgaattctga

SEQ ID NO: 300816 - DNA, 5027 bp, Homo sapiens
  misc_feature (84)..(84): n is a, c, g, or t
  misc_feature (115)..(115): n is a, c, g, or t
atgggtggaaacatgattcaaacttacacaatttttcttgctatttttcaaatatgaatcttactatatattctcggtgaacancaggagactattaaagaggtctgctgttaantgtaaagaaaaaatgctcgtagctatttgcttcctggtattggagcagttcagttgtttagtttataccattggattcaattcattgcaccatggttgccaaaagtgcctgaggtcataatggattgttaaaataactaaattccagtggttggaaactctaggtttgtaccattttttctgctgtgggaaaaaacaacaacaacaacatgatcaaggtaacatcacatttgatgtataatattatactattaatggaatatcagtagacaactgttaacccattagtagcatgagtataaacagtacacctgaataaattggagacattagccactaggtttaacagtggaatcttgatttgcctaggtgacttctgggattactgtttgacaaataagagtaacattttatttcatttcagaatttacgtcacttttagctacaagagtaggaagaaggtaatcggcaaggcagaagagtatactctttgccttaggatagcgtaaactcaggctgagacatacccggcttatagagttcttctagatgtgtagactgtaaatgcccaaatcctctcaactaaagttttagtgattccacaaagcctctcatgtaaatttccagtgattccaccattgcacttgtgaatatgtatccttgttagtacccagggatgtcctcgagcaccagttttattttatctgccattgcatctggattccattacagcctctcagctgttactgcctgtggacagttacttctgcttactgcctgtagagagttacctaacttctcttctcagttcttcctcaggtcctggctattttggcctcagttgaagggagtcttgctctcatctctgagggttttaagtttgtttgatcccattgttgtcttttctagctttgagcatgtttttcagtattcatattttaacttactgagaacattaaagggaaatgataaactcgtggtggggatatggcagacaggtgcttgtttgtttgagagaagtagcagaagagataaaatacaaagtgctatatgtttcagctggagaggaaagagagagaatttattagattatatacttgtcccatggcataccacgtatatgtttaaatagggacacatctccctatgtttaactatacttataaacaactttgatacacattgcgtcttttattctgtcacctgatattttagtgtatctcaagttacagattacatgtgtccttaaactatttctgaatttggacttagttccatatacagaaagaactttagaaaattcattaatttggatcttctattgatagccataaatattatgtttatgtattctaaaacctctttgtttagttagtactgttcatgaatgtaacaagcttcaatttctcatttgtgagtagtacatttgctttttgtttgtttgtttgtttgtttttgagatggagtctcacgctgtcaccaggctggagtgcagtggcgcgatttcagctcactgcaacctccacctcccaggtgcaagtgatgcccctgcctcagcctcccgagtagctgggactacagacacccgccaccacacctggctaatttttgtatttttagtagagacggggtttcaccatgttggctaggctggtctcaaactcttgacctcgtgatttgcccgcctctgcctccccaaagtgctgggattacaggcgtgagccaccacgcccagccgtacatttactttttaaagcagcagactaggtacactaattctcactcaaatattttcatgggaatgtagttatcaccaagtcctaaagtattatttatgccaaaaaaaatttcattttaaggactacaaaaatgattctaattaaacattttataatcaatagtaggttgggtctttagccattatatgtgtatatatacagacacatatgtatacacttacattttgacagggtcttcattgagtcttgatgcactttaaacccagctggctaccagagatgcgaaggtgggctctttgaagattagcaaaatggacgtttctgtcacttgagaaaaggaaagttctttgcctttaaattacacagttttcatcatgcccacaatctatattattggctggttaaacagcactgccctattagcaatgttaacaaaaatgaaattatttattggcggttatagattatctaattcaggaaatttctgagctcaacttttacagcaactgttatgccttctaatttagcaattgagttatgagtaagttttgtgcttaactcctagaccctattgttgataaccagatcaaatatagtctgtacagaggaaaacactgggaacatttagtatttctaaagcctcctttggagttactactgattgtaatttggaactgataataggtagagattgctaacactgttttttttcctggatcttttttatgccagaaattaaacaggttctgctaactcttttttttctcttggttatcaccagaatgaaaatatttaaagtgatgactctagaaaagccatctgtgcctggttaacattgagtttgagtctcttcaatatatattgatcatgtattgattaatctttattttttcatattttggctagacaaattcagatctatataatggaataccccttcttgagtgaactatactactaatctacatgattatatagtaaggaaaaaagaagaaataactgtaataggcatagtgtttgttgttggttgtcttgtcattcatgtgatactactcatttccaaaattcacacaaacttacatgaggtggattatttgttttgttcattatttagttcctatatgttttttctttagaaacagagtctcattctgtcacccaggctggagtccaatggggcggtcatagttcactgcagccttgaactctttggctcatgtgatcctcccatctcagcctcccacagcaggtgagactacaggtacatgccactgtgcctgactttttaatttttttgtagagacgaggtttcagtttgttgcccaagctgatcttgaactcctggtttcaagcgatcctcccacctcggcctcccaaagtagtgggatttcaggcatgaccacctggcctagttcctatacttttcttaattcttcagacttctcacatttagtatagtgcattcatttcatcttgctgtttattagcaccctttgtggccaagggaaataaaaggtggtaaaattcagttttcagtttagttcttgaaagctctgggaaatggaggaaacacaaaactatgaattaaactagggctgttgatttctgaacccccagataaatcagttgacccacattttcattttaggtgttaggtccaaattagcataatgtcttgcattattattaggttcagtgtgaaactttacagtgctgcatttgaagtttagtaactggttattattaatcatttgggaaaaatgaaaatgtgttgggactttctatgactaggcatttgttgattatttttcatgattgctttttgttttctcattgtgtaggatttgtgaacttgtatattacaggaaacaagatactttgtaaaatttactggggaaaatccatttggagtgcatgacatttgccaggataagaaagcagtaatatgtttgtattataaaattacaccctgccagaaaactttctttcctagtaaggtaaatgtagaagggacttttacagcatagtaagttgattaggagccaaaattttattccagttttttttgaactaagaatgttttaaattctgtaatgaacttttatgtttacccattactcatgcattctttcacaatatgtttaatagcctgaggaaataggaaagctgtgaagctactaccattctttacttttaataagaataataggaaagaaaagtcaggtcagtaatccaaatccaaatatgtatactgcaaatgctcaagaagtcacattttttgataaattgtattgagtacagaagaacttatatgaatttattatctgttaataacttagttttgacaacagaataacatttggaaattgtgagaataatcaagctgtttttccattaacagtgtaaattcataacatgtccttcaaaaggtgatattctaagctgtcttaattgtctacggttgataacttttaaataaagtacaggactttctgaaagtgtttggcatgttatgctgccaaaaacaatctgtgttttgaaataccaattaatcagttaatttctgaagactttgtataggacttgatatatgagtcagaatctgtctgtactcattctgtacattgtaactttgaacacttatgaaaaactgtatctgttggtgtgttttgattagttagtgtagatttgtttgcgtatttgaattccgattttagtttaggaagactaaaagtagccatttttgtaaagttcatatgctattttttaatgtcatttttgtttttaatatttatacaatagtgatgttactagtaaaaaatgtttatagataacacgtagagctattaactgttcaaaagcctacatgataggcatattttgtatttcgtgttgcactcgttctgtttcatattggactttttacatcccttttttagcaaaaaaaagagacacatttgaattctctttagcataaagctgtgcattggaaactatgtgactgtatccatacggttagcaaaatactctttgccaccaaaggtaaatgaaactgtaaaatacctctggatatttgtgccaatgaacttttcttagcatattaggattaaagcaaaaataatcttttcagtatgtttcatctaggacttacaataaatgtttaaaccatgaaaa

SEQ ID NO: 300817 - DNA, 4963 bp, Homo sapiens
  misc_feature (84)..(84): n is a, c, g, or t
  misc_feature (115)..(115): n is a, c, g, or t
atgggtggaaacatgattcaaacttacacaatttttcttgctatttttcaaatatgaatcttactatatattctcggtgaacancaggagactattaaagaggtctgctgttaantgtaaagaaaaaatgctcgtagctatttgcttcctggtattggagcagttcagttgtttagtttataccattggattcaattcattgcaccatggttgccaaaagtgcctgaggtcataatggattgttaaaataactaaattccagtggttggaaactctaggtttgtaccattttttctgctgtgggaaaaaacaacaacaacaacatgatcaaggtaacatcacatttgatgtataatattatactattaatggaatatcagtagacaactgttaacccattagtagcatgagtataaacagtacacctgaataaattggagacattagccactaggtttaacagtggaatcttgatttgcctaggtgacttctgggattactgtttgacaaataagagtaacattttatttcatttcagaatttacgtcacttttagctacaagagtaggaagaaggtaatcggcaaggcagaagagtatactctttgccttaggatagcgtaaactcaggctgagacatacccggcttatagagttcttctagatgtgtagactgtaaatgcccaaatcctctcaactaaagttttagtgattccacaaagcctctcatgtaaatttccagtgattccaccattgcacttgtgaatatgtatccttgttagtacccagggatgtcctcgagcaccagttttattttatctgccattgcatctggattccattacagcctctcagctgttactgcctgtggacagttacttctgcttactgcctgtagagagttacctaacttctcttctcagttcttcctcaggtcctggctattttggcctcagttgaagggagtcttgctctcatctctgagggttttaagtttgtttgatcccattgttgtcttttctagctttgagcatgtttttcagtattcatattttaacttactgagaacattaaagggaaatgataaactcgtggtggggatatggcagacaggtgcttgtttgtttgagagaagtagcagaagagataaaatacaaagtgctatatgtttcagctggagaggaaagagagagaatttattagattatatacttgtcccatggcataccacgtatatgtttaaatagggacacatctccctatgtttaactatacttataaacaactttgatacacattgcgtcttttattctgtcacctgatattttagtgtatctcaagttacagattacatgtgtccttaaactatttctgaatttggacttagttccatatacagaaagaactttagaaaattcattaatttggatcttctattgatagccataaatattatgtttatgtattctaaaacctctttgtttagttagtactgttcatgaatgtaacaagcttcaatttctcatttgtgagtagtacatttgctttttgtttgtttgtttgtttgtttttgagatggagtctcacgctgtcaccaggctggagtgcagtggcgcgatttcagctcactgcaacctccacctcccaggtgcaagtgatgcccctgcctcagcctcccgagtagctgggactacagacacccgccaccacacctggctaatttttgtatttttagtagagacggggtttcaccatgttggctaggctggtctcaaactcttgacctcgtgatttgcccgcctctgcctccccaaagtgctgggattacaggcgtgagccaccacgcccagccgtacatttactttttaaagcagcagactaggtacactaattctcactcaaatattttcatgggaatgtagttatcaccaagtcctaaagtattatttatgccaaaaaaaatttcattttaaggactacaaaaatgattctaattaaacattttataatcaatagtaggttgggtctttagccattatatgtgtatatatacagacacatatgtatacacttacattttgacagggtcttcattgagtcttgatgcactttaaacccagctggctaccagagatgcgaaggtgggctctttgaagattagcaaaatggacgtttctgtcacttgagaaaaggaaagttctttgcctttaaattacacagttttcatcatgcccacaatctatattattggctggttaaacagcactgccctattagcaatgttaacaaaaatgaaattatttattggcggttatagattatctaattcaggaaatttctgagctcaacttttacagcaactgttatgccttctaatttagcaattgagttatgagtaagttttgtgcttaactcctagaccctattgttgataaccagatcaaatatagtctgtacagaggaaaacactgggaacatttagtatttctaaagcctcctttggagttactattttatgccagaaattaaacaggttctgctaactcttttttttctcttggttatcaccagaatgaaaatatttaaagtgatgactctagaaaagccatctgtgcctggttaacattgagtttgagtctcttcaatatatattgatcatgtattgattaatctttattttttcatattttggctagacaaattcagatctatataatggaataccccttcttgagtgaactatactactaatctacatgattatatagtaaggaaaaaagaagaaataactgtaataggcatagtgtttgttgttggttgtcttgtcattcatgtgatactactcatttccaaaattcacacaaacttacatgaggtggattatttgttttgttcattatttagttcctatatgttttttctttagaaacagagtctcattctgtcacccaggctggagtccaatggggcggtcatagttcactgcagccttgaactctttggctcatgtgatcctcccatctcagcctcccacagcaggtgagactacaggtacatgccactgtgcctgactttttaatttttttgtagagacgaggtttcagtttgttgcccaagctgatcttgaactcctggtttcaagcgatcctcccacctcggcctcccaaagtagtgggatttcaggcatgaccacctggcctagttcctatacttttcttaattcttcagacttctcacatttagtatagtgcattcatttcatcttgctgtttattagcaccctttgtggccaagggaaataaaaggtggtaaaattcagttttcagtttagttcttgaaagctctgggaaatggaggaaacacaaaactatgaattaaactagggctgttgatttctgaacccccagataaatcagttgacccacattttcattttaggtgttaggtccaaattagcataatgtcttgcattattattaggttcagtgtgaaactttacagtgctgcatttgaagtttagtaactggttattattaatcatttgggaaaaatgaaaatgtgttgggactttctatgactaggcatttgttgattatttttcatgattgctttttgttttctcattgtgtaggatttgtgaacttgtatattacaggaaacaagatactttgtaaaatttactggggaaaatccatttggagtgcatgacatttgccaggataagaaagcagtaatatgtttgtattataaaattacaccctgccagaaaactttctttcctagtaaggtaaatgtagaagggacttttacagcatagtaagttgattaggagccaaaattttattccagttttttttgaactaagaatgttttaaattctgtaatgaacttttatgtttacccattactcatgcattctttcacaatatgtttaatagcctgaggaaataggaaagctgtgaagctactaccattctttacttttaataagaataataggaaagaaaagtcaggtcagtaatccaaatccaaatatgtatactgcaaatgctcaagaagtcacattttttgataaattgtattgagtacagaagaacttatatgaatttattatctgttaataacttagttttgacaacagaataacatttggaaattgtgagaataatcaagctgtttttccattaacagtgtaaattcataacatgtccttcaaaaggtgatattctaagctgtcttaattgtctacggttgataacttttaaataaagtacaggactttctgaaagtgtttggcatgttatgctgccaaaaacaatctgtgttttgaaataccaattaatcagttaatttctgaagactttgtataggacttgatatatgagtcagaatctgtctgtactcattctgtacattgtaactttgaacacttatgaaaaactgtatctgttggtgtgttttgattagttagtgtagatttgtttgcgtatttgaattccgattttagtttaggaagactaaaagtagccatttttgtaaagttcatatgctattttttaatgtcatttttgtttttaatatttatacaatagtgatgttactagtaaaaaatgtttatagataacacgtagagctattaactgttcaaaagcctacatgataggcatattttgtatttcgtgttgcactcgttctgtttcatattggactttttacatcccttttttagcaaaaaaaagagacacatttgaattctctttagcataaagctgtgcattggaaactatgtgactgtatccatacggttagcaaaatactctttgccaccaaaggtaaatgaaactgtaaaatacctctggatatttgtgccaatgaacttttcttagcatattaggattaaagcaaaaataatcttttcagtatgtttcatctaggacttacaataaatgtttaaaccatgaaaa

SEQ ID NO: 300818 - DNA, 5446 bp, Homo sapiens
  misc_feature (84)..(84): n is a, c, g, or t
  misc_feature (115)..(115): n is a, c, g, or t
atgggtggaaacatgattcaaacttacacaatttttcttgctatttttcaaatatgaatcttactatatattctcggtgaacancaggagactattaaagaggtctgctgttaantgtaaagaaaaaatgctcgtagctatttgcttcctggtattggagcagttcagttgtttagtttataccattggattcaattcattgcaccatggttgccaaaagtgcctgaggtcataatggattgttaaaataactaaattccagtggttggaaactctaggtttgtaccattttttctgctgtgggaaaaaacaacaacaacaacatgatcaaggtaacatcacatttgatgtataatattatactattaatggaatatcagtagacaactgttaacccattagtagcatgagtataaacagtacacctgaataaattggagacattagccactaggtttaacagtggaatcttgatttgcctaggtgacttctgggattactgtttgacaaataagagtaacattttatttcatttcagaatttacgtcacttttagctacaagagtaggaagaaggtaatcggcaaggcagaagagtatactctttgccttaggatagcgtaaactcaggctgagacatacccggcttatagagttcttctagatgtgtagactgtaaatgcccaaatcctctcaactaaagttttagtgattccacaaagcctctcatgtaaatttccagtgattccaccattgcacttgtgaatatgtatccttgttagtacccagggatgtcctcgagcaccagttttattttatctgccattgcatctggattccattacagcctctcagctgttactgcctgtggacagttacttctgcttactgcctgtagagagttacctaacttctcttctcagttcttcctcaggtcctggctattttggcctcagttgaagggagtcttgctctcatctctgagggttttaagtttgtttgatcccattgttgtcttttctagctttgagcatgtttttcagtattcatattttaacttactgagaacattaaagggaaatgataaactcgtggtggggatatggcagacaggtgcttgtttgtttgagagaagtagcagaagagataaaatacaaagtgctatatgtttcagctggagaggaaagagagagaatttattagattatatacttgtcccatggcataccacgtatatgtttaaatagggacacatctccctatgtttaactatacttataaacaactttgatacacattgcgtcttttattctgtcacctgatattttagtgtatctcaagttacagattacatgtgtccttaaactatttctgaatttggacttagttccatatacagaaagaactttagaaaattcattaatttggatcttctattgatagccataaatattatgtttatgtattctaaaacctctttgtttagttagtactgttcatgaatgtaacaagcttcaatttctcatttgtgagtagtacatttgctttttgtttgtttgtttgtttgtttttgagatggagtctcacgctgtcaccaggctggagtgcagtggcgcgatttcagctcactgcaacctccacctcccaggtgcaagtgatgcccctgcctcagcctcccgagtagctgggactacagacacccgccaccacacctggctaatttttgtatttttagtagagacggggtttcaccatgttggctaggctggtctcaaactcttgacctcgtgatttgcccgcctctgcctccccaaagtgctgggattacaggcgtgagccaccacgcccagccgtacatttactttttaaagcagcagactaggtacactaattctcactcaaatattttcatgggaatgtagttatcaccaagtcctaaagtattatttatgccaaaaaaaatttcattttaaggactacaaaaatgattctaattaaacattttataatcaatagtaggttgggtctttagccattatatgtgtatatatacagacacatatgtatacacttacattttgacagggtcttcattgagtcttgatgcactttaaacccagctggctaccagagatgcgaaggtgggctctttgaagattagcaaaatggacgtttctgtcacttgagaaaaggaaagttctttgcctttaaattacacagttttcatcatgcccacaatctatattattggctggttaaacagcactgccctattagcaatgttaacaaaaatgaaattatttattggcggttatagattatctaattcaggaaatttctgagctcaacttttacagcaactgttatgccttctaatttagcaattgagttatgagtaagttttgtgcttaactcctagaccctattgttgataaccagatcaaatatagtctgtacagaggaaaacactgggaacatttagtatttctaaagcctcctttggagttactactgattgtaatttggaactgataataggtagagattgctaacactgttttttttcctggatcttttttatgccagaaattaaacaggttctgctaactcttttttttctcttggttatcaccagaatgaaaatatttaaagtgatgactctagaaaagccatctgtgcctggttaacattgagtttgagtctcttcaatatatattgatcatgtattgattaatctttattttttcatattttggctagacaaattcagatctatataatggaataccccttcttgagtgaactatactactaatctacatgattatatagtaaggaaaaaagaagaaataactgtaataggcatagtgtttgttgttggttgtcttgtcattcatgtgatactactcatttccaaaattcacacaaacttacatgaggtggattatttgttttgttcattatttagttcctatatgttttttctttagaaacagagtctcattctgtcacccaggctggagtccaatggggcggtcatagttcactgcagccttgaactctttggctcatgtgatcctcccatctcagcctcccacagcaggtgagactacaggtacatgccactgtgcctgactttttaatttttttgtagagacgaggtttcagtttgttgcccaagctgatcttgaactcctggtttcaagcgatcctcccacctcggcctcccaaagtagtgggatttcaggcatgaccacctggcctagttcctatacttttcttaattcttcagacttctcacatttagtatagtgcattcatttcatcttgctgtttattagcaccctttgtggccaagggaaataaaaggtggtaaaattcagttttcagtttagttcttgaaagctctgggaaatggaggaaacacaaaactatgaattaaactagggctgttgatttctgaacccccagataaatcagttgacccacattttcattttaggtgttaggtccaaattagcataatgtcttgcattattattaggttcagtgtgaaactttacagtgctgcatttgaagtttagtaactggttattattaatcatttgggaaaaatgaaaatgtgttgggactttctatgactaggcatttgttgattatttttcatgattgctttttgttttctcattgtgtaggatttgtgaacttgtatattacaggaaacaagatactttgtaaaatttactggggaaaatccatttggagtgcatgacatttgccaggataagaaagcagtaatatgtttgtattataaaattacaccctgccagaaaactttctttcctagtaaggtaaatgtagaagggacttttacagcatagtaagttgattaggagccaaaattttattccagttttttttgaactaagaatgttttaaattctgtaatgaacttttatgtttacccattactcatgcattctttcacaatatgtttaatagcctgaggaaataggaaagctgtgaagctactaccattctttacttttaataagaataataggaaagaaaagtcaggtcagtaatccaaatccaaatatgtatactgcaaatgctcaagaagtcacattttttgataaattgtattgagtacagaagaacttatatgaatttattatctgttaataacttagttttgacaacagaataacatttggaaattgtgagaataatcaagctgtttttccattaacagtgtaaattcataacatgtccttcaaaaggtgatattctaagctgtcttaattgtctacggttgataacttttaaataaagtacaggactttctgaaagtgtttggcatgttatgctgccaaaaacaatctgtgttttgaaataccaattaatcagttaatttctgaagactttgtataggacttgatatatgagtcagaatctgtctgtactcattctgtacattgtaactttgaacacttatgaaaaactgtatctgttggtgtgttttgattagttagtgtagatttgtttgcgtatttgaattccgattttagtttaggaagactaaaagtagccatttttgtaaagttcatatgctattttttaatgtcatttttgtttttaatatttatacaatagtgatgttactagtaaaaaatgtttatagataacacgtagagctattaactgttcaaaagcctacatgataggcatattttgtatttcgtgttgcactcgttctgtttcatattggactttttacatcccttttttagcaaaaaaaagagacacatttgaattctctttagcataaagctgtgcattggaaactatgtgactgtatccatacggttagcaaaatactctttgccaccaaaggtaaatgaaactgtaaaatacctctggatatttgtgccaatgaacttttcttagcatattaggattaaagcaaaaataatcttttcagtatgtttcatctaggacttacaataaatgtttaaaccatgaaaaaaaaaaaaaaaaaaacaaaaaaaaaaaagaaaacaaaaaaaaaaaatcacccacaaaaaggagcccccaaaaaacacccatcacacaaagaagccaacatagacaaacaagaggaacccataaatcggggcacgccacagtagaaaaccaccaacaagaacatggccactcaccattgaacacacaaaggcaacgaacacccggagcaacaaatggcaaacaccacgacaaccatcgagcggagcacaacagcaacccctccaaacctaactcaagagaggaggaagcacaccacgcgcggaaaccaatggataacgggaaccacaaaatctcggacgagacccaacagaggtcgacgacgaacaaacaacacgcccacggagggttcaacaggacacaaaaaaaagacgggaataccc

SEQ ID NO: 300819 - DNA, 5359 bp, Homo sapiens
  misc_feature (84)..(84): n is a, c, g, or t
  misc_feature (115)..(115): n is a, c, g, or t
atgggtggaaacatgattcaaacttacacaatttttcttgctatttttcaaatatgaatcttactatatattctcggtgaacancaggagactattaaagaggtctgctgttaantgtaaagaaaaaatgctcgtagctatttgcttcctggtattggagcagttcagttgtttagtttataccattggattcaattcattgcaccatggttgccaaaagtgcctgaggtcataatggattgttaaaataactaaattccagtggttggaaactctaggtttgtaccattttttctgctgtgggaaaaaacaacaacaacaacatgatcaaggtaacatcacatttgatgtataatattatactattaatggaatatcagtagacaactgttaacccattagtagcatgagtataaacagtacacctgaataaattggagacattagccactaggtttaacagtggaatcttgatttgcctaggtgacttctgggattactgtttgacaaataagagtaacattttatttcatttcagaatttacgtcacttttagctacaagagtaggaagaaggtaatcggcaaggcagaagagtatactctttgccttaggatagcgtaaactcaggctgagacatacccggcttatagagttcttctagatgtgtagactgtaaatgcccaaatcctctcaactaaagttttagtgattccacaaagcctctcatgtaaatttccagtgattccaccattgcacttgtgaatatgtatccttgttagtacccagggatgtcctcgagcaccagttttattttatctgccattgcatctggattccattacagcctctcagctgttactgcctgtggacagttacttctgcttactgcctgtagagagttacctaacttctcttctcagttcttcctcaggtcctggctattttggcctcagttgaagggagtcttgctctcatctctgagggttttaagtttgtttgatcccattgttgtcttttctagctttgagcatgtttttcagtattcatattttaacttactgagaacattaaagggaaatgataaactcgtggtggggatatggcagacaggtgcttgtttgtttgagagaagtagcagaagagataaaatacaaagtgctatatgtttcagctggagaggaaagagagagaatttattagattatatacttgtcccatggcataccacgtatatgtttaaatagggacacatctccctatgtttaactatacttataaacaactttgatacacattgcgtcttttattctgtcacctgatattttagtgtatctcaagttacagattacatgtgtccttaaactatttctgaatttggacttagttccatatacagaaagaactttagaaaattcattaatttggatcttctattgatagccataaatattatgtttatgtattctaaaacctctttgtttagttagtactgttcatgaatgtaacaagcttcaatttctcatttgtgagtagtacatttgctttttgtttgtttgtttgtttgtttttgagatggagtctcacgctgtcaccaggctggagtgcagtggcgcgatttcagctcactgcaacctccacctcccaggtgcaagtgatgcccctgcctcagcctcccgagtagctgggactacagacacccgccaccacacctggctaatttttgtatttttagtagagacggggtttcaccatgttggctaggctggtctcaaactcttgacctcgtgatttgcccgcctctgcctccccaaagtgctgggattacaggcgtgagccaccacgcccagccgtacatttactttttaaagcagcagactaggtacactaattctcactcaaatattttcatgggaatgtagttatcaccaagtcctaaagtattatttatgccaaaaaaaatttcattttaaggactacaaaaatgattctaattaaacattttataatcaatagtaggttgggtctttagccattatatgtgtatatatacagacacatatgtatacacttacattttgacagggtcttcattgagtcttgatgcactttaaacccagctggctaccagagatgcgaaggtgggctctttgaagattagcaaaatggacgtttctgtcacttgagaaaaggaaagttctttgcctttaaattacacagttttcatcatgcccacaatctatattattggctggttaaacagcactgccctattagcaatgttaacaaaaatgaaattatttattggcggttatagattatctaattcaggaaatttctgagctcaacttttacagcaactgttatgccttctaatttagcaattgagttatgagtaagttttgtgcttaactcctagaccctattgttgataaccagatcaaatatagtctgtacagaggaaaacactgggaacatttagtatttctaaagcctcctttggagttactactgattgtaatttggaactgataataggtagagattgctaacactgttttttttcctggatcttttttatgccagaaattaaacaggttctgctaactcttttttttctcttggttatcaccagaatgaaaatatttaaagtgatgactctagaaaagccatctgtgcctggttaacattgagtttgagtctcttcaatatatattgatcatgtattgattaatctttattttttcatattttggctagacaaattcagatctatataatggaataccccttcttgagtgaactatactactaatctacatgattatatagtaaggaaaaaagaagaaataactgtaataggcatagtgtttgttgttggttgtcttgtcattcatgtgatactactcatttccaaaattcacacaaacttacatgaggtggattatttgttttgttcattatttagttcctatatgttttttctttagaaacagagtctcattctgtcacccaggctggagtccaatggggcggtcatagttcactgcagccttgaactctttggctcatgtgatcctcccatctcagcctcccacagcaggtgagactacaggtacatgccactgtgcctgactttttaatttttttgtagagacgaggtttcagtttgttgcccaagctgatcttgaactcctggtttcaagcgatcctcccacctcggcctcccaaagtagtgggatttcaggcatgaccacctggcctagttcctatacttttcttaattcttcagacttctcacatttagtatagtgcattcatttcatcttgctgtttattagcaccctttgtggccaagggaaataaaaggtggtaaaattcagttttcagtttagttcttgaaagctctgggaaatggaggaaacacaaaactatgaattaaactagggctgttgatttctgaacccccagataaatcagttgacccacattttcattttaggtgttaggtccaaattagcataatgtcttgcattattattaggttcagtgtgaaactttacagtgctgcatttgaagtttagtaactggttattattaatcatttgggaaaaatgaaaatgtgttgggactttctatgactaggcatttgttgattatttttcatgattgctttttgttttctcattgtgtaggatttgtgaacttgtatattacaggaaacaagatactttgtaaaatttactggggaaaatccatttggagtgcatgacatttgccaggataagaaagcagtaatatgtttgtattataaaattacaccctgccagaaaactttctttcctagtaaggtaaatgtagaagggacttttacagcatagtaagttgattaggagccaaaattttattccagttttttttgaactaagaatgttttaaattctgtaatgaacttttatgtttacccattactcatgcattctttcacaatatgtttaatagcctgaggaaataggaaagctgtgaagctactaccattctttacttttaataagaataataggaaagaaaagtcaggtcagtaatccaaatccaaatatgtatactgcaaatgctcaagaagtcacattttttgataaattgtattgagtacagaagaacttatatgaatttattatctgttaataacttagttttgacaacagaataacatttggaaattgtgagaataatcaagctgtttttccattaacagtgtaaattcataacatgtccttcaaaaggtgatattctaagctgtcttaattgtctacggttgataacttttaaataaagtacaggactttctgaaagtgtttggcatgttatgctgccaaaaacaatctgtgttttgaaataccaattaatcagttaatttctgaagactttgtataggacttgatatatgagtcagaatctgtctgtactcattctgtacattgtaactttgaacacttatgaaaaactgtatctgttggtgtgttttgattagttagtgtagatttgtttgcgtatttgaattccgattttagtttaggaagactaaaagtagccatttttgtaaagttcatatgctattttttaatgtcatttttgtttttaatatttatacaatagtgatgttactagtaaaaaatgtttatagataacacgtagagctattaactgttcaaaagcctacatgataggcatattttgtatttcgtgttgcactcgttctgtttcatattggactttttacatcccttttttagcaaaaaaaagagacacatttgaattctctttagcataaagctgtgcattggaaactatgtgactgtatccatacggttagcaaaatactctttgccaccaaaggtaaatgaaactgtaaaatacctctggatatttgtgccaatgaacttttcttagcatattaggattaaagcaaaaataatcttttcagtatgtttcatctaggacttacaataaatgtttaaaccatgaaaaaaaaaaaatagaaaacaaaaaaaaaaaaaggaagaaagtagaagaaaattataaacataggggggggacaaaagagaatgggtacaccacacaggaacataacgagtacaagaggaggcacgaaataacatgataggagaacaaagaaggacacgacagaacaggagagagcgaaataaacaaagaaagaaaacaggaacaaaaaggaaaaacagagaggacaactagagagaaaaacagcgaacaaaagaggaggaggaaaaaaaaaaagcggcacgagagcgcaacaacaagaggacgcccacaaggagaagaaacaaaaaaaaaggaaa

SEQ ID NO: 300820 - DNA, 1748 bp, Homo sapiens
aaccttatccttataatattatacacacaggtaagaaataatcatttcaacactagacattgaataaccctacagaccgtagaactctctcttagctttaaaatagactattatctcagtaatattcattcccgtagcactattcgtcacatgatcaattatagaattctccatatgatacatacactcagataaatcagttgacccacattttcattttaggtgttaggtccaaattagcataatgtcttgcattattattaggttcagtgtgaaactttacagtgctgcatttgaagtttagtaactggttattattaatcatttgggaaaaatgaaaatgtgttgggactttctatgactaggcatttgttgattatttttcatgattgctttttgttttctcattgtgtaggatttgtgaacttgtatattacaggaaacaagatactttgtaaaatttactggggaaaatccatttggagtgcatgacatttgccaggataagaaagcagtaatatgtttgtattataaaattacaccctgccagaaaactttctttcctagtaaggtaaatgtagaagggacttttacagcatagtaagttgattaggagccaaaattttattccagttttttttgaactaagaatgttttaaattctgtaatgaacttttatgtttacccattactcatgcattctttcacaatatgtttaatagcctgaggaaataggaaagctgtgaagctactaccattctttacttttaataagaataataggaaagaaaagtcaggtcagtaatccaaatccaaatatgtatactgcaaatgctcaagaagtcacattttttgataaattgtattgagtacagaagaacttatatgaatttattatctgttaataacttagttttgacaacagaataacatttggaaattgtgagaataatcaagctgtttttccattaacagtgtaaattcataacatgtccttcaaaaggtgatattctaagctgtcttaattgtctacggttgataacttttaaataaagtacaggactttctgaaagtgtttggcatgttatgctgccaaaaacaatctgtgttttgaaataccaattaatcagttaatttctgaagactttgtataggacttgatatatgagtcagaatctgtctgtactcattctgtacattgtaactttgaacacttatgaaaaactgtatctgttggtgtgttttgattagttagtgtagatttgtttgcgtatttgaattccgattttagtttaggaagactaaaagtagccatttttgtaaagttcatatgctattttttaatgtcatttttgtttttaatatttatacaatagtgatgttactagtaaaaaatgtttatagataacacgtagagctattaactgttcaaaagcctacatgataggcatattttgtatttcgtgttgcactcgttctgtttcatattggactttttacatcccttttttagcaaaaaaaagagacacatttgaattctctttagcataaagctgtgcattggaaactatgtgactgtatccatacggttagcaaaatactctttgccaccaaaggtaaatgaaactgtaaaatacctctggatatttgtgccaatgaacttttcttagcatattaggattaaagcaaaaataatcttttcagtatgtttcatctaggacttacaataaatgtttaaaccatgaaaa

SEQ ID NO: 300821 - DNA, 316 bp, Homo sapiens
tcactaagcgtaatcatttctagctttcgatttaaagtgagataggcgggactcttcctttcacttgaacactatggcgcacgcttattttagggccagcggcaggggactccagcctgctggacacttcagtccagctctctcctgactggggcttgcgactcacaggattgcatcgtcccagctgctaacttggggccggggcccctcccttccacatataccttgggtttgtgcatgttttctgctgggtgggttcagagggcaatttctcttttatgtgtacatatgctaaataaacataatttaaaaaaca

SEQ ID NO: 300822 - DNA, 312 bp, Homo sapiens
cggaagttaaggaggggagggggtggagggaaaagcaagccaggaggtgcttgcggccgcttctagtagtttccaggcgctgccgggcggctggcactaagcggtcctgaggctgtggctacggctgctccggagctggtggcgccgcgataggagagccgatggccaagtggggtgagggagacccacgctggatcgtggaggagcgggcggacgccaccaacgtcaacaactggcactggacggagagagatgcttcaaattgcctcgtacgggtgagactcaggtgggctacgtcagttgggtacattc

SEQ ID NO: 300823 - DNA, 1401 bp, Homo sapiens
cggaagttaaggaggggagggggtggagggaaaagcaagccaggaggtgcttgcggccgcttctagtagtttccaggcgctgccgggcggctggcactaagcggtcctgaggctgtggctacggctgctccggagctggtggcgccgcgataggagagccgatggccaagtggggtgagggagacccacgctggatcgtggaggagcgggcggacgccaccaacgtcaacaactggcactggacggagagagatgcttcaaattggtccacggataagctgaaaacactgttcttggcagtgcaggttcaaaatgaagaaggcaagtgtgaggtgacggaagtgagtaagcttgatggagaggcatccattaacaatcgcaaagggaaacttatcttcttttatgaatggagcgtcaaactaaactggacaggtacttctaagtcaggagtacagtacaaaggacatgtggagatccccaatttgtctgatgaaaacagcgtggatgaagtggagattagtgtgagccttgccaaagatgagcctgacacaaatctcgtggccttaatgaaggaagaaggggtgaaacttctaagagaagcaatgggaatttacatcagcaccctcaaaacagagttcacccagggcatgatcttacctacaatgaatggagagtcagtagacccagtggggcagccagcactgaaaactgaggagcgcaaggctaagcctgctccttcaaaaacccaggccagacctgttggagtcaaaatccccacttgtaagatcactcttaaggaaaccttcctgacgtcaccagaggagctctatagagtgtttaccacccaagagctggtgcaggcctttacccatgctcctgcaacattagaagcagacagaggtggaaagttccacatggtagatggcaacgtctctggggaatttactgatctggtccctgagaaacatattgtgatgaagtggaggtttaaatcttggccagagggacactttgccaccatcaccttgaccttcatcgacaagaacggagagactgagctgtgcatggaaggtcgaggcatccctgctcctgaggaagagcggacacgacagggctggcagcggtactactttgagggcattaaacagacctttggctatggcgcacgcttattttagggccagcggcaggggactccagcctgctggacacttcagtccagctctctcctgactggggcttgcgactcacaggattgcatcgtcccagctgctaacttggggccggggcccctcccttccacatataccttgggtttgtgcatgttttctgctgggtgggttcagagggcaatttctcttttatgtgtacatatgctaaataaacataatttaaaaaaca

SEQ ID NO: 300824 - DNA, 1373 bp, Homo sapiens
  misc_feature (14)..(14): n is a, c, g, or t
  misc_feature (22)..(22): n is a, c, g, or t
taaaagggaggggnagaaaacntaggctaggtacgaggcctgggtggtgcgctgccgggcggctggcactaagcggtcctgaggctgtggctacggctgctccggagctggtggcgccgcgataggagagccgatggccaagtggggtgagggagacccacgctggatcgtggaggagcgggcggacgccaccaacgtcaacaactggcactggacggagagagatgcttcaaattggtccacggataagctgaaaacactgttcttggcagtgcaggttcaaaatgaagaaggcaagtgtgaggtgacggaagtgagtaagcttgatggagaggcatccattaacaatcgcaaagggaaacttatcttcttttatgaatggagcgtcaaactaaactggacaggtacttctaagtcaggagtacagtacaaaggacatgtggagatccccaatttgtctgatgaaaacagcgtggatgaagtggagattagtgtgagccttgccaaagatgagcctgacacaaatctcgtggccttaatgaaggaagaaggggtgaaacttctaagagaagcaatgggaatttacatcagcaccctcaaaacagagttcacccagggcatgatcttacctacaatgaatggagagtcagtagacccagtggggcagccagcactgaaaactgaggagcgcaaggctaagcctgctccttcaaaaacccaggccagacctgttggagtcaaaatccccacttgtaagatcactcttaaggaaaccttcctgacgtcaccagaggagctctatagagtgtttaccacccaagagctggtgcaggcctttacccatgctcctgcaacattagaagcagacagaggtggaaagttccacatggtagatggcaacgtctctggggaatttactgatctggtccctgagaaacatattgtgatgaagtggaggtttaaatcttggccagagggacactttgccaccatcaccttgaccttcatcgacaagaacggagagactgagctgtgcatggaaggtcgaggcatccctgctcctgaggaagagcggacacgacagggctggcagcggtactactttgagggcattaaacagacctttggctatggcgcacgcttattttagggccagcggcaggggactccagcctgctggacacttcagtccagctctctcctgactggggcttgcgactcacaggattgcatcgtcccagctgctaacttggggccggggcccctcccttccacatataccttgggtttgtgcatgttttctgctgggtgggttcagagggcaatttctcttttatgtgtacatatgctaaataaacataatttaaaaaaca

SEQ ID NO: 300825 - DNA, 1338 bp, Homo sapiens
  misc_feature (14)..(14): n is a, c, g, or t
  misc_feature (22)..(22): n is a, c, g, or t
taaaagggaggggnagaaaacntaggctaggtacgaggcctgggtggtgctgtggctacggctgctccggagctggtggcgccgcgataggagagccgatggccaagtggggtgagggagacccacgctggatcgtggaggagcgggcggacgccaccaacgtcaacaactggcactggacggagagagatgcttcaaattggtccacggataagctgaaaacactgttcttggcagtgcaggttcaaaatgaagaaggcaagtgtgaggtgacggaagtgagtaagcttgatggagaggcatccattaacaatcgcaaagggaaacttatcttcttttatgaatggagcgtcaaactaaactggacaggtacttctaagtcaggagtacagtacaaaggacatgtggagatccccaatttgtctgatgaaaacagcgtggatgaagtggagattagtgtgagccttgccaaagatgagcctgacacaaatctcgtggccttaatgaaggaagaaggggtgaaacttctaagagaagcaatgggaatttacatcagcaccctcaaaacagagttcacccagggcatgatcttacctacaatgaatggagagtcagtagacccagtggggcagccagcactgaaaactgaggagcgcaaggctaagcctgctccttcaaaaacccaggccagacctgttggagtcaaaatccccacttgtaagatcactcttaaggaaaccttcctgacgtcaccagaggagctctatagagtgtttaccacccaagagctggtgcaggcctttacccatgctcctgcaacattagaagcagacagaggtggaaagttccacatggtagatggcaacgtctctggggaatttactgatctggtccctgagaaacatattgtgatgaagtggaggtttaaatcttggccagagggacactttgccaccatcaccttgaccttcatcgacaagaacggagagactgagctgtgcatggaaggtcgaggcatccctgctcctgaggaagagcggacacgacagggctggcagcggtactactttgagggcattaaacagacctttggctatggcgcacgcttattttagggccagcggcaggggactccagcctgctggacacttcagtccagctctctcctgactggggcttgcgactcacaggattgcatcgtcccagctgctaacttggggccggggcccctcccttccacatataccttgggtttgtgcatgttttctgctgggtgggttcagagggcaatttctcttttatgtgtacatatgctaaataaacataatttaaaaaaca

SEQ ID NO: 300826 - DNA, 2354 bp, Homo sapiens
  misc_feature (2116)..(2116): n is a, c, g, or t
cggaagttaaggaggggagggggtggagggaaaagcaagccaggaggtgcttgcggccgcttctagtagtttccaggcgctgccgggcggctggcactaagcggtcctgaggctgtggctacggctgctccggagctggtggcgccgcgataggagagccgatggccaagtggggtgagggagacccacgctggatcgtggaggagcgggcggacgccaccaacgtcaacaactggcactggacggagagagatgcttcaaattggtccacggataagctgaaaacactgttcttggcagtgcaggttcaaaatgaagaaggcaagtgtgaggtgacggaagtgagtaagcttgatggagaggcatccattaacaatcgcaaagggaaacttatcttcttttatgaatggagcgtcaaactaaactggacaggtacttctaagtcaggagtacagtacaaaggacatgtggagatccccaatttgtctgatgaaaacagcgtggatgaagtggagattagtgtgagccttgccaaagatgagcctgacacaaatctcgtggccttaatgaaggaagaaggggtgaaacttctaagagaagcaatgggaatttacatcagcaccctcaaaacagagttcacccagggcatgatcttacctacaatgaatggagagtcagtagacccagtggggcagccagcactgaaaactgaggagcgcaaggctaagcctgctccttcaaaaacccaggccagacctgttggagtcaaaatccccacttgtaagatcactcttaaggaaaccttcctgacgtcaccagaggagctctatagagtgtttaccacccaagagctggtgcaggcctttacccatgctcctgcaacattagaagcagacagaggtggaaagttccacatggtagatggcaacgtctctggggaatttactgatctggtccctgagaaacatattgtgatgaagtggaggtttaaatcttggccagagggacactttgccaccatcaccttgaccttcatcgacaagaacggagagactgagctgtgcatggaaggtcgaggcatccctgctcctgaggaagagcggacacgacagggctggcagcggtactactttgagggcattaaacagacctttggctatggcgcacgcttattttagggccagcggcaggggactccagcctgctggacacttcagtccagctctctcctgactggggcttgcgactcacaggattgcatcgtcccagctgctaacttggggccggggcccctcccttccacatataccttgggtttgtgcatgttttctgctgggtgggttcagagggcaatttctcttttatgtgtacatatgctaaataaacataatttaaaaaacaaaaaaaaaaaaaaaaaaaaaaaaaaaaaaaaaaaaaaaaaaaaacaaaaaaaaaaaaaaaaaaaaaaaaaaaaaaggggggggcgcggcgcgcgcgcgcgcgccccgagaggctcaaccccccgtgtgggggggcgcgggcgccacccaagtagaatatagcgaacaccgcgaggcacacagcgtgtctccctcagagaaaacctgcggcgcacaaaacaaagggcggggtggtctcttcccccataaaataacacaccggggggagacgaccgggagcttgttctgaaacacacccccagggggtgtcgggaagaggcgactcgaggggcctcaaacaagcagggggacaccaaagaggcgcgcagacaacaaaatcaccccccccgccggcgggggggtaagacaagaactaacaaaacaccaagctacaacatagagaacactacacacagacacaatacacgcacactgcacatgtaaacgaagtactacaagggacagcaaacaaaacacgagactaaacgagtcaaataacagctacagtacaacaacgacgacaaacaagcaagagatagccacgaggtagaaacgcacgcagcacagtacagaccagaagccatacaaccgcagaaccagaacgaggaagcaacaacacgaagcaggggaacgtagacaagaaacatgacacagagcgagacaagcagaaagcaccnagcaaaacatagcaagccagcacacgagcagacacatagcagcacaagacaacaacgcaaaggagtcgatcgcaggcatagtcgcagtgagccaccaaacacaagaagcaggacaatagagagaatcgacagcgatagcaacaagacacgaaaagacaacaaacaacacaagcgcgagacaagaaggaaagcacaacaacgcaacaacgcaagagaagcacacaagaaaaaacaaaga

SEQ ID NO: 300827 - DNA, 1492 bp, Homo sapiens
cggaagttaaggaggggagggggtggagggaaaagcaagccaggaggtgcttgcggccgcttctagtagtttccaggcgctgccgggcggctggcactaagcggtcctgaggctgtggctacggctgctccggagctggtggcgccgcgataggagagccgatggccaagtggggtgagggagacccacgctggatcgtggaggagcgggcggacgccaccaacgtcaacaactggcactggacggagagagatgcttcaaattggtccacggataagctgaaaacactgttcttggcagtgcaggttcaaaatgaagaaggcaagtgtgaggtgacggaagtgagtaagcttgatggagaggcatccattaacaatcgcaaagggaaacttatcttcttttatgaatggagcgtcaaactaaactggacaggtacttctaagtcaggagtacagtacaaaggacatgtggagatccccaatttgtctgatgaaaacagcgtggatgaagtggagattagtgtgagccttgccaaagatgagcctgacacaaatctcgtggccttaatgaaggaagaaggggtgaaacttctaagagaagcaatgggaatttacatcagcaccctcaaaacagagttcacccagggcatgatcttacctacaatgaatggagagtcagtagacccagtggggcagccagcactgaaaactgaggagcgcaaggctaagcctgctccttcaaaaacccaggccagacctgttggagtcaaaatccccacttgtaagatcactcttaaggaaaccttcctgacgtcaccagaggagctctatagagtgtttaccacccaagagctggtgcaggcctttacccatgctcctgcaacattagaagcagacagaggtggaaagttccacatggtagatggcaacgtctctggggaatttactgatctggtccctgagaaacatattgtgatgaagtggaggtttaaatcttggccagagggacactttgccaccatcaccttgaccttcatcgacaagaacggagagactgagctgtgcatggaaggtcgaggcatccctgctcctgaggaagagcggacacgacagggctggcagcggtactactttgagggcattaaacagacctttggctatggcgcacgcttattttagggccagcggcaggggactccagcctgctggacacttcagtccagctctctcctgactggggcttgcgactcacaggattgcatcgtcccagctgctaacttggggccggggcccctcccttccacatataccttgggtttgtgcatgttttctgctgggtgggttcagagggcaatttctcttttatgtgtacatatgctaaataaacataatttaaaaaacaaaaacagaaacagacaaagcaaacgaacacagaaacgacaacaaaaacacaaacaaaacaaaagggcgccaatataaaaacctcgggagaa

SEQ ID NO: 300828 - DNA, 1362 bp, Homo sapiens
  misc_feature (1336)..(1336): n is a, c, g, or t
cggaagttaaggaggggagggggtggagggaaaagcaagccaggaggtgcttgcggccgcttctagtagtttccaggcgctgccgggcggctggcactaagcggtcctgaggctgtggctacggctgctccggagctggtggcgccgcgataggagagccgatggccaagtggggtgagggagacccacgctggatcgtggaggagcgggcggacgccaccaacgtcaacaactggcactggacggagagagatgcttcaaattggtccacggataagctgaaaacactgttcttggcagtgcaggttcaaaatgaagaaggcaagtgtgaggtgacggaagtgagtaagcttgatggagaggcatccattaacaatcgcaaagggaaacttatcttcttttatgaatggagcgtcaaactaaactggacaggtacttctaagtcaggagtacagtacaaaggacatgtggagatccccaatttgtctgatgaaaacagcgtggatgaagtggagattagtgtgagccttgccaaagatgagcctgacacaaatctcgtggccttaatgaaggaagaaggggtgaaacttctaagagaagcaatgggaatttacatcagcaccctcaaaacagagttcacccagggcatgatcttacctacaatgaatggagagtcagtagacccagtggggcagccagcactgaaaactgaggagcgcaaggctaagcctgctccttcaaaaacccaggccagacctgttggagtcaaaatccccacttgtaagatcactcttaaggaaaccttcctgacgtcaccagaggagctctatagagtgtttaccacccaagagctggtgcaggcctttacccatgctcctgcaacattagaagcagacagaggtggaaagttccacatggtagatggcaacgtctctggggaatttactgatctggtccctgagaaacatattgtgatgaagtggaggtttaaatcttggccagagggacactttgccaccatcaccttgaccttcatcgacaagaacggagagactgagctgtgcatggaaggtcgaggcatccctgctcctgaggaagagcggacacgacagggctggcagcggtactactttgagggcattaaacagacctttggctatggcgcacgcttattttagggccagcggcaggggactccagcctgctggacacttcagtccagctctctcctgactggggcttgcgactcacaggattgcatcgtcccagctgctaacttggggccggggcccctcccttccacatataccttgggtttgtgcatgttttctgtcgngctagtcgaaaggggatcgtctagag

SEQ ID NO: 300829 - DNA, 1609 bp, Homo sapiens
cggaagttaaggaggggagggggtggagggaaaagcaagccaggaggtgcttgcggccgcttctagtagtttccaggcgctgccgggcggctggcactaagcggtcctgaggctgtggctacggctgctccggagctggtggcgccgcgataggagagccgatggccaagtggggtgagggagacccacgctggatcgtggaggagcgggcggacgccaccaacgtcaacaactggcactggacggagagagatgcttcaaattggtccacggataagctgaaaacactgttcttggcagtgcaggttcaaaatgaagaaggcaagtgtgaggtgacggaagtgagtaagcttgatggagaggcatccattaacaatcgcaaagggaaacttatcttcttttatgaatggagcgtcaaactaaactggacaggtacttctaagtcaggagtacagtacaaaggacatgtggagatccccaatttgtctgatgaaaacagcgtggatgaagtggagattagtgtgagccttgccaaagatgagcctgacacaaatctcgtggccttaatgaaggaagaaggggtgaaacttctaagagaagcaatgggaatttacatcagcaccctcaaaacagagttcacccagggcatgatcttacctacaatgaatggagagtcagtagacccagtggggcagccagcactgaaaactgaggagcgcaaggctaagcctgctccttcaaaaacccaggccagacctgttggagtcaaaatccccacttgtaagatcactcttaaggaaaccttcctgacgtcaccagaggagctctatagagtgtttaccacccaagagctggtgcaggcctttacccatgctcctgcaacattagaagcagacagaggtggaaagttccacatggtagatggcaacgtctctggggaatttactgatctggtccctgagaaacatattgtgatgaagtggaggtttaaatcttggccagaggggtctcactgtcactcaggctagagtgcagtggcataatcacagcaaactgcagccttaacctcccagacccaaacgatcctcctgcttcagcttcccaagtagctgagacttacaggtgtgagccaccacgcccagccaggttgccccagtcttaaactcagatggaaacctagatatgaaacctccgtcccctctgcctttcccaggacactttgccaccatcaccttgaccttcatcgacaagaacggagagactgagctgtgcatggaaggtcgaggcatccctgctcctgaggaagagcggacacgacagggctggcagcggtactactttgagggcattaaacagacctttggctatggcgcacgcttattttagggccagcggcaggggactccagcctgctggacacttcagtccagctctctcctgactggggcttgcgactcacaggattgcatcgtcccagctgctaacttggggccggggcccctcccttccacatataccttgggtttgtgcatgttttctgctgggtgggttcagagggcaatttctcttttatgtgtacatatgctaaataaacataatttaaaaaaca

SEQ ID NO: 300830 - DNA, 1236 bp, Homo sapiens
cgcgttgggtgaggtacagggcgatgttctccagcagagcctggttgggcctcttcctcacggctttccgggctgccatatagaggttgcactgactgaccaaggcccgcatctcttccatgacggtgcgggtgtcaacattgtcacaaagagccggcgcgtgtgaggtgacggaagtgagtaagcttgatggagaggcatccattaacaatcgcaaagggaaacttatcttcttttatgaatggagcgtcaaactaaactggacaggtacttctaagtcaggagtacagtacaaaggacatgtggagatccccaatttgtctgatgaaaacagcgtggatgaagtggagattagtgtgagccttgccaaagatgagcctgacacaaatctcgtggccttaatgaaggaagaaggggtgaaacttctaagagaagcaatgggaatttacatcagcaccctcaaaacagagttcacccagggcatgatcttacctacaatgaatggagagtcagtagacccagtggggcagccagcactgaaaactgaggagcgcaaggctaagcctgctccttcaaaaacccaggccagacctgttggagtcaaaatccccacttgtaagatcactcttaaggaaaccttcctgacgtcaccagaggagctctatagagtgtttaccacccaagagctggtgcaggcctttacccatgctcctgcaacattagaagcagacagaggtggaaagttccacatggtagatggcaacgtctctggggaatttactgatctggtccctgagaaacatattgtgatgaagtggaggtttaaatcttggccagagggacactttgccaccatcaccttgaccttcatcgacaagaacggagagactgagctgtgcatggaaggtcgaggcatccctgctcctgaggaagagcggacacgacagggctggcagcggtactactttgagggcattaaacagacctttggctatggcgcacgcttattttagggccagcggcaggggactccagcctgctggacacttcagtccagctctctcctgactggggcttgcgactcacaggattgcatcgtcccagctgctaacttggggccggggcccctcccttccacatataccttgggtttgtgcatgttttctgctgggtgggttcagagggcaatttctcttttatgtgtacatatgctaaataaacataatttaaaaaaca

SEQ ID NO: 300831 - DNA, 1181 bp, Homo sapiens
cggaagttaaggaggggagggggtggagggaaaagcaagccaggaggtgcttgcggccgcttctagtagtttccaggcgctgccgggcggctggcactaagcggtcctgaggctgtggctacggctgctccggagctggtggcgccgcgataggagagccgatggccaagtggggtgagggagacccacgctggatcgtggaggagcgggcggacgccaccaacgtcaacaactggcactggacggagagagatgcttcaaattggtccacggataagctgaaaacactgttcttggcagtgcaggttcaaaatgaagaaggcaagtgtgaggtgacggaagtgagtaagcttgatggagaggcatccattaacaatcgcaaagggaaacttatcttcttttatgaatggagcgtcaaactaaactggacaggtacttctaagtcaggagtacagtacaaaggacatgtggagatccccaatttgtctgatgaaaacagcgtggatgaagtggagattagtgtgagccttgccaaagatgagcctgacacaaatctcgtggccttaatgaaggaagaaggggtgaaacttctaagagaagcaatgggaatttacatcagcaccctcaaaacagagttcacccagggcatgatcttacctacaatgaatggagagtcagtagacccagtggggcagccagcactgaaaactgaggagcgcaaggctaagcctgctccttcaaaaacccaggccagacctgttggagtcaaaatccccacttgtaagatcactcttaaggaaaccttcctgacgtcaccagaggagctctatagagtgtttaccacccaagagctggtgcaggcctttacccatgctcctgcaacattagaagcagacagaggtggaaagttccacatggtagatggcaacgtctctggggaatttactgatctggtccctgagaaacatattgtgatgaagtggaggtttaaatcttggccagaggggtctcactgtcactcaggctagagtgcagtggcataatcacagcaaactgcagccttaacctcccagacccaaacgatcctcctgcttcagcttcccaagtagctgagactacgtgtgccaccatgccagcttttttttttttttttttttttttacttttttactttttttgta

SEQ ID NO: 300832 - DNA, 1034 bp, Homo sapiens
aaggctaggtacgaggcctggttgagaatcggccgaggaatggagcgtcaaactaaactggacaggtacttctaagtcaggagtacagtacaaaggacatgtggagatccccaatttgtctgatgaaaacagcgtggatgaagtggagattagtgtgagccttgccaaagatgagcctgacacaaatctcgtggccttaatgaaggaagaaggggtgaaacttctaagagaagcaatgggaatttacatcagcaccctcaaaacagagttcacccagggcatgatcttacctacaatgaatggagagtcagtagacccagtggggcagccagcactgaaaactgaggagcgcaaggctaagcctgctccttcaaaaacccaggccagacctgttggagtcaaaatccccacttgtaagatcactcttaaggaaaccttcctgacgtcaccagaggagctctatagagtgtttaccacccaagagctggtgcaggcctttacccatgctcctgcaacattagaagcagacagaggtggaaagttccacatggtagatggcaacgtctctggggaatttactgatctggtccctgagaaacatattgtgatgaagtggaggtttaaatcttggccagagggacactttgccaccatcaccttgaccttcatcgacaagaacggagagactgagctgtgcatggaaggtcgaggcatccctgctcctgaggaagagcggacacgacagggctggcagcggtactactttgagggcattaaacagacctttggctatggcgcacgcttattttagggccagcggcaggggactccagcctgctggacacttcagtccagctctctcctgactggggcttgcgactcacaggattgcatcgtcccagctgctaacttggggccggggcccctcccttccacatataccttgggtttgtgcatgttttctgctgggtgggttcagagggcaatttctcttttatgtgtacatatgctaaataaacataatttaaaaaaca

SEQ ID NO: 300833 - DNA, 1323 bp, Homo sapiens
cggaagttaaggaggggagggggtggagggaaaagcaagccaggaggtgcttgcggccgcttctagtagtttccaggcgctgccgggcggctggcactaagcggtcctgaggctgtggctacggctgctccggagctggtggcgccgcgataggagagccgatggccaagtggggtgagggagacccacgctggatcgtggaggagcgggcggacgccaccaacgtcaacaactggcactggacggagagagatgcttcaaattggtccacggataagctgaaaacactgttcttggcagtgcaggttcaaaatgaagaaggcaagtgtgaggtgacggaagtgagtaagcttgatggagaggcatccattaacaatcgcaaagggaaacttatcttcttttatgaatggagcgtcaaactaaactggacaggtacttctaagtcaggagtacagtacaaaggacatgtggagatccccaatttgtctgatgaaaacagcgtggatgaagtggagattagtgtgagccttgccaaagatgagcctgacacaaatctcgtggccttaatgaaggaagaaggggtgaaacttctaagagaagcaatgggaatttacatcagcaccctcaaaacagagttcacccagggcatgatcttacctacaatgaatggagagtcagtagacccagtggggcagccagcactgaaaactgaggagcgcaaggctaagcctgctccttcaaaaacccaggccagacctgttggagtagaggtgctggtgcaggcctttacccatgctcctgcaacattagaagcagacagaggtggaaagttccacatggtagatggcaacgtctctggggaatttactgatctggtccctgagaaacatattgtgatgaagtggaggtttaaatcttggccagagggacactttgccaccatcaccttgaccttcatcgacaagaacggagagactgagctgtgcatggaaggtcgaggcatccctgctcctgaggaagagcggacacgacagggctggcagcggtactactttgagggcattaaacagacctttggctatggcgcacgcttattttagggccagcggcaggggactccagcctgctggacacttcagtccagctctctcctgactggggcttgcgactcacaggattgcatcgtcccagctgctaacttggggccggggcccctcccttccacatataccttgggtttgtgcatgttttctgctgggtgggttcagagggcaatttctcttttatgtgtacatatgctaaataaacataatttaaaaaaca

SEQ ID NO: 300834 - DNA, 1188 bp, Homo sapiens
cggaagttaaggaggggagggggtggagggaaaagcaagccaggaggtgcttgcggccgcttctagtagtttccaggcgctgccgggcggctggcactaagcggtcctgaggctgtggctacggctgctccggagctggtggcgccgcgataggagagccgatggccaagtggggtgagggagacccacgctggatcgtggaggagcgggcggacgccaccaacgtcaacaactggcactggacggagagagatgcttcaaattggtccacggataagctgaaaacactgttcttggcagtgcaggttcaaaatgaagaaggcaagtgtgaggtgacggaagtgagtaagcttgatggagaggcatccattaacaatcgcaaagggaaacttatcttcttttatgaatggagcgtcaaactaaactggacaggtacttctaagtcaggagtacagtacaaaggacatgtggagatccccaatttgtctgatgaaaacagcgtggatgaagtggagattagtgtgagccttgccaaagatgagcctgacacaaatctcgtggccttaatgaaggaagaaggggtgaaacttctaagagaagcaatgggaatttacatcagcaccctcaaaacagagttcacccagggcatgatcttacctacaatgaatggagagtcagtagacccagtggggcagccagcactgaaaactgaggagcgcaaggctaagcctgctccttcaaaaacccaggccagacctgttggagtcaaaatccccacttgtaagatcactcttaaggaaaccttcctgacgtcaccagaggagctctatagagtgtttaccacccaagagagaggtggtcgaggcatccctgctcctgaggaagagcggacacgacagggctggcagcggtactactttgagggcattaaacagacctttggctatggcgcacgcttattttagggccagcggcaggggactccagcctgctggacacttcagtccagctctctcctgactggggcttgcgactcacaggattgcatcgtcccagctgctaacttggggccggggcccctcccttccacatataccttgggtttgtgcatgttttctgctgggtgggttcagagggcaatttctcttttatgtgtacatatgctaaataaacataatttaaaaaaca

SEQ ID NO: 300835 - DNA, 1283 bp, Homo sapiens
cggaagttaaggaggggagggggtggagggaaaagcaagccaggaggtgcttgcggccgcttctagtagtttccaggcgctgccgggcggctggcactaagcggtcctgaggctgtggctacggctgctccggagctggtggcgccgcgataggagagccgatggccaagtggggtgagggagacccacgctggatcgtggaggagcgggcggacgccaccaacgtcaacaactggcactggacggagagagatgcttcaaattggtccacggataagctgaaaacactgttcttggcagtgcaggttcaaaatgaagaaggcaagtgtgaggtgacggaagtgagtaagcttgatggagaggcatccattaacaatcgcaaagggaaacttatcttcttttatgaatggagcgtcaaactaaactggacaggtacttctaagtcaggagtacagtacaaaggacatgtggagatccccaatttgtctgatgaaaacagcgtggatgaagtggagagttcacccagggcatgatcttacctacaatgaatggagagtcagtagacccagtggggcagccagcactgaaaactgaggagcgcaaggctaagcctgctccttcaaaaacccaggccagacctgttggagtcaaaatccccacttgtaagatcactcttaaggaaaccttcctgacgtcaccagaggagctctatagagtgtttaccacccaagagctggtgcaggcctttacccatgctcctgcaacattagaagcagacagaggtggaaagttccacatggtagatggcaacgtctctggggaatttactgatctggtccctgagaaacatattgtgatgaagtggaggtttaaatcttggccagagggacactttgccaccatcaccttgaccttcatcgacaagaacggagagactgagctgtgcatggaaggtcgaggcatccctgctcctgaggaagagcggacacgacagggctggcagcggtactactttgagggcattaaacagacctttggctatggcgcacgcttattttagggccagcggcaggggactccagcctgctggacacttcagtccagctctctcctgactggggcttgcgactcacaggattgcatcgtcccagctgctaacttggggccggggcccctcccttccacatataccttgggtttgtgcatgttttctgctgggtgggttcagagggcaatttctcttttatgtgtacatatgctaaataaacataatttaaaaaaca

SEQ ID NO: 300836 - DNA, 1039 bp, Homo sapiens
  misc_feature (730)..(730): n is a, c, g, or t
  misc_feature (734)..(734): n is a, c, g, or t
  misc_feature (738)..(738): n is a, c, g, or t
  misc_feature (748)..(748): n is a, c, g, or t
  misc_feature (758)..(758): n is a, c, g, or t
  misc_feature (762)..(762): n is a, c, g, or t
  misc_feature (769)..(769): n is a, c, g, or t
  misc_feature (772)..(772): n is a, c, g, or t
cggaagttaaggaggggagggggtggagggaaaagcaagccaggaggtgcttgcggccgcttctagtagtttccaggcgctgccgggcggctggcactaagcggtcctgaggctgtggctacggctgctccggagctggtggcgccgcgataggagagccgatggccaagtggggtgagggagacccacgctggatcgtggaggagcgggcggacgccaccaacgtcaacaactggcactggacggagagagatgcttcaaattggtccacggataagctgaaaacactgttcttggcagtgcaggttcaaaatgaagaaggcaagtgtgaggtgacggaagtgagtaagcttgatggagaggcatccattaacaatcgcaaagggaaacttatcttcttttatgaatggagcgtcaaactaaactggacaggtacttctaagtcaggagtacagtacaaaggacatgtggagatccccaatttgtctgatgaaaacagcgtggatgaagtggagattagtgtgagccttgccaaagatgagcctgacacaaatctcgtggccttaatgaaggaagaaggggtgaaacttctaagagaagcaatgggaatttacatcagcaccctcaaaacagagttcacccagggcatgatcttacctacaatgaatggagagtcagtagacccagtggggcagccagcactgaaaactgaggagcgcaaggctaagcntgtncttnaaaaccaggncagactgtgnagtnaaatccnatngtagaatattcttaaggaagcttctgaggtacaacgaggaaatcaatgagtgattacaacaagaagtgggtgaggctaaccaggtactgagattagagaggacgagtgaagtcccaggtgaggagtctgggaatcgaacgccgaaaatgtgaacaggggtaatatgagagagagagaacgaaatcaaagggatggaggggagaatacagagacaggagcaatggaaagcaatagggacactgtaagtggtgtttttttaattatggg

SEQ ID NO: 300837 - DNA, 687 bp, Homo sapiens
tgtccaggctagtctcgaactcctgggctcaagtgatcctcctgcctcagcctcccaaagtgctgggattacaggtgcatgccaccacgcccacgtaattttagtagagatggagtttcaccatgttagccaggctggtctggaactcctgacctctggtgatccgcccacctcagcctgccaaagtgctgggattacaggtgtgagccaccacgcccagccaggttgccccagtcttaaactcagatggaaacctagatatgaaacctccgtcccctctgcctttcccaggacactttgccaccatcaccttgaccttcatcgacaagaacggagagactgagctgtgcatggaaggtcgaggcatccctgctcctgaggaagagcggacacgacagggctggcagcggtactactttgagggcattaaacagacctttggctatggcgcacgcttattttagggccagcggcaggggactccagcctgctggacacttcagtccagctctctcctgactggggcttgcgactcacaggattgcatcgtcccagctgctaacttggggccggggcccctcccttccacatataccttgggtttgtgcatgttttctgctgggtgggttcagagggcaatttctcttttatgtgtacatatgctaaataaacataatttaaaaaaca

SEQ ID NO: 300838 - DNA, 760 bp, Homo sapiens
cggaagttaaggaggggagggggtggagggaaaagcaagccaggaggtgcttgcggccgcttctagtagtttccaggcgctgccgggcggctggcactaagcggtcctgaggctgtggctacggctgctccggagctggtggcgccgcgataggagagccgatggccaagtggggtgagggagacccacgctggatcgtggaggagcgggcggacgccaccaacgtcaacaactggcactggacggagagagatgcttcaaattggtccacggataagctgaaaacactgttcttggcagtgcaggttcaaaatgaagaaggcaagtgtgaggtgacggaagtgagtaagcttgatggagaggcatccattaacaatcgcaaagggaaacttatcttcttttatgaatggagcgtcaaactaaactggacaggtacttctaagtcaggagtacagtacaaaggacatgtggagatccccaatttgtctgatgaaaacagcgtggatgaagtggagctatggcgcacgcttattttagggccagcggcaggggactccagcctgctggacacttcagtccagctctctcctgactggggcttgcgactcacaggattgcatcgtcccagctgctaacttggggccggggcccctcccttccacatataccttgggtttgtgcatgttttctgctgggtgggttcagagggcaatttctcttttatgtgtacatatgctaaataaacataatttaaaaaaca

SEQ ID NO: 300839 - DNA, 342 bp, Homo sapiens
cttgccaaagatgagcctgacacaaatctcgtggccttaatgaaggaagaaggggtgaaacttctaagagaagcaatgggaatttacatcagcaccctcaaaacaggtatcccttgagtagttctgtatgccttaaggaggtagtttccacctgttagactctggttaagggcctggacagtcctttctttggcaaatgggtaaagatttggggggagggggcttatttcatcttaaagtcagtccataagctcggagtaagggaaagatctggagctgtgttgcctaataatgatggttgagcattttagatgtggctagaccaaactgaaatgtactgtg

SEQ ID NO: 300840 - DNA, 282 bp, Homo sapiens
tgacatgggttctaactaacattagccacttgacagagaggactcaagaaggaacactaatggggattgtacgaataccgcagtactcatgcatttcctttggaaatgtcagcagtcacctgattgctcagcccccacattccataatgagggtgcccctcaagttatttaccacctacttctcatctttcacccagattagtgtgagccttgccaaagatgagcctgacacaaatctcgtggccttaatgaaggaagaaggggtgaaacttctaagagaag

SEQ ID NO: 300841 - DNA, 610 bp, Homo sapiens
ttacatccctgtcttcacccaatctccccaattttcagggtgagcaagtactttatctagagatggaagtttgtggttcaagctcagcacttggtttagagccctgttgctcttttgtcagcatagtgaagtggatactctggaagtggggagaaaaccgcttccagctatttaaacatagaaattgtttgagaattacactgagctcttcaaaaatatctcaatgatttgatttgttatttgactatcagggtcttccttgtagagtggttatttttactgggaattgaggaggtttccagaatcattaccctcatgactgaaacacctacacactcaaattcccttcaaaccccttggaataattacccttggaggtgaacatttttatgagaatgaatggtacaactgtctctgaagccacgttgattgaggttgtatcattactctgtattgatcattttcactgccaccttcacaggctaagcctgctccttcaaaaacccaggccagacctgttggagtcaaaatccccacttgtaagatcactcttaaggaaaccttcctgacgtcaccagaggagctctatagagtgtttaccacccaagag

SEQ ID NO: 300842 - DNA, 3668 bp, Homo sapiens
ccccgcgcggcgcgggccagggaagggccacccaggggtcccccacttcccgcttgggcgcccggacggcgaatggagcaggggcgcgcagataattaaagatttacacacagctggaagaaatcatagagaagccgggcgtggtggctcatgcctataatcccagcacttttggaggctgaggcgggcagatcacttgagatcaggagttcgagaccagcctggtgccttggcatctcccaatggggtggctttgctctgggctcctgttccctgtgagctgcctggtcctgctgcaggtggcaagctctgggaacatgaaggtcttgcaggagcccacctgcgtctccgactacatgagcatctctacttgcgagtggaagatgaatggtcccaccaattgcagcaccgagctccgcctgttgtaccagctggtttttctgctctccgaagcccacacgtgtatccctgagaacaacggaggcgcggggtgcgtgtgccacctgctcatggatgacgtggtcagtgcggataactatacactggacctgtgggctgggcagcagctgctgtggaagggctccttcaagcccagcgagcatgtgaaacccagggccccaggaaacctgacagttcacaccaatgtctccgacactctgctgctgacctggagcaacccgtatccccctgacaattacctgtataatcatctcacctatgcagtcaacatttggagtgaaaacgacccggcagatttcagaatctataacgtgacctacctagaaccctccctccgcatcgcagccagcaccctgaagtctgggatttcctacagggcacgggtgagggcctgggctcagtgctataacaccacctggagtgagtggagccccagcaccaagtggcacaactcctacagggagcccttcgagcagcacctcctgctgggcgtcagcgtttcctgcattgtcatcctggccgtctgcctgttgtgctatgtcagcatcaccaagattaagaaagaatggtgggatcagattcccaacccagcccgcagccgcctcgtggctataataatccaggatgctcaggggtcacagtgggagaagcggtcccgaggccaggaaccagccaagtgcccacactggaagaattgtcttaccaagctcttgccctgttttctggagcacaacatgaaaagggatgaagatcctcacaaggctgccaaagagatgcctttccagggctctggaaaatcagcatggtgcccagtggagatcagcaagacagtcctctggccagagagcatcagcgtggtgcgatgtgtggagttgtttgaggccccggtggagtgtgaggaggaggaggaggtagaggaagaaaaagggagcttctgtgcatcgcctgagagcagcagggatgacttccaggagggaagggagggcattgtggcccggctaacagagagcctgttcctggacctgctcggagaggagaatgggggcttttgccagcaggacatgggggagtcatgccttcttccaccttcgggaagtacgagtgctcacatgccctgggatgagttcccaagtgcagggcccaaggaggcacctccctggggcaaggagcagcctctccacctggagccaagtcctcctgccagcccgacccagagtccagacaacctgacttgcacagagacgcccctcgtcatcgcaggcaaccctgcttaccgcagcttcagcaactccctgagccagtcaccgtgtcccagagagctgggtccagacccactgctggccagacacctggaggaagtagaacccgagatgccctgtgtcccccagctctctgagccaaccactgtgccccaacctgagccagaaacctgggagcagatcctccgccgaaatgtcctccagcatggggcagctgcagcccccgtctcggcccccaccagtggctatcaggagtttgtacatgcggtggagcagggtggcacccaggccagtgcggtggtgggcttgggtcccccaggagaggctggttacaaggccttctcaagcctgcttgccagcagtgctgtgtccccagagaaatgtgggtttggggctagcagtggggaagaggggtataagcctttccaagacctcattcctggctgccctggggaccctgccccagtccctgtccccttgttcacctttggactggacagggagccacctcgcagtccgcagagctcacatctcccaagcagctccccagagcacctgggtctggagccgggggaaaaggtagaggacatgccaaagcccccacttccccaggagcaggccacagacccccttgtggacagcctgggcagtggcattgtctactcagcccttacctgccacctgtgcggccacctgaaacagtgtcatggccaggaggatggtggccagacccctgtcatggccagtccttgctgtggctgctgctgtggagacaggtcctcgccccctacaacccccctgagggccccagacccctctccaggtggggttccactggaggccagtctgtgtccggcctccctggcaccctcgggcatctcagagaagagtaaatcctcatcatccttccatcctgcccctggcaatgctcagagctcaagccagacccccaaaatcgtgaactttgtctccgtgggacccacatacatgagggtctcttaggtgcatgtcctcttgttgctgagtctgcagatgaggactagggcttatccatgcctgggaaatgccacctcctggaaggcagccaggctggcagatttccaaaagacttgaagaaccatggtatgaaggtgattggccccactgacgttggcctaacactgggctgcagagactggaccccgcccagcattgggctgggctcgccacatcccatgagagtagagggcactgggtcgccgtgccccacggcaggcccctgcaggaaaactgaggcccttgggcacctcgacttgtgaacgagttgttggctgctccctccacagcttctgcagcagactgtccctgttgtaactgcccaaggcatgttttgcccaccagatcatggcccacatggaggcccacctgcctctgtctcactgaactagaagccgagcctagaaactaacacagccatcaagggaatgacttgggcggccttgggaaatcgatgagaaattgaacttcagggagggtggtcattgcctagaggtgctcattcatttaacagagcttccttaggttgatgctggaggcagaatcccggctgtcaaggggtgttcagttaaggggagcaacagaggacatgaaaaattgctgtgactaaagcagggacaatttgctgccaaacacccatgcccagctgtatggctgggggctcctcgtatgcatggaacccccagaataaatatgctcagccaccctgtgggccgggcaatccagacagcaggcataaggcaccagttaccctgcatgttggcccagacctcaggtgctagggaaggcgggaaccttgggttgagtaatgctcgtctgtgtgttttagtttcatcacctgttatctgtgtttgctgaggagagtggaacagaaggggtggagttttgtataaataaagtttctttgtctcttta

SEQ ID NO: 300843 - DNA, 523 bp, Homo sapiens
aggctccggatccctctgggaggtagatttgaggacagattggaattgaggtgaaagacagagaaagagaagtggccaggatgactccaagatttctgacctaaactactgggaaggacgcggttgtcatttctgaaatgcagaaggatgccagaagagaaggtactttggggaggggcgggaatcaggagttagttttggacatgagataagcttggaatatttatttgctatctaagacagctccttaacatggtaagcccttatgcaagttgttgtcagctgagatgggcgtggcactgagcatgggagcatggaggcgcctgagtggtctcatgctcaggtggtttagcaaactcagtgtacatcctgccaattccagtcctgccatggccactgacaagctaggagggcgctgaaaggagaaggaccccgatgtctcctccagcccatccatctcctctctcccattggccaaacccaaccggaaactaaaggccaagggtacccggtgatgaagact

SEQ ID NO: 300844 - DNA, 513 bp, Homo sapiens
gtcacacgggctacccccacaggccgccatcttggaaaaggccaatggctgtggaatcattcttgactcctattagccttcctgttctctctcccgccccacagcatccatcctgtcagcaaatcctgtgggctctgtcttcaacacagatgacatgaaaaattgctgtgactaaagcagggacaatttgctgccaaacacccatgcccagctgtatggctgggggctcctcgtatgcatggaacccccagaataaatatgctcagccaccctgtgggccgggcaatccagacagcaggcataaggcaccagttaccctgcatgttggcccagacctcaggtgctagggaaggcgggaaccttgggttgagtaatgctcgtctgtgtgttttagtttcatcacctgttatctgtgtttgctgaggagagtggaacagaaggggtggagttttgtataaataaagtttctttgtctctttattttttatgtattaaccaaacatacctccagac

SEQ ID NO: 300845 - DNA, 409 bp, Homo sapiens
  misc_feature (332)..(332): n is a, c, g, or t
gtcacacgggctacccccacaggccgccatcttggaaaaggccaatggctgtggaatcattcttgactcctattagccttcctgttctctctcccgccccacagcatccatcctgtcagcaaatcctgtgggctctgtcttcaacacagatctttggtaagtcctcaaaactttacttttgtttgaaatctaattttaaaaaattacatcagagggaagccaggcgtgatgcctcatgcctgtaatgccagcacttagggaggtcaaggcaggtagattgctttagcttcagaagttcaagaccagcccgggcaagatggcgaaactccgcnctctatgaaaaaatccggaaattagccaggcatggtgacatgagcatgcagtctcagccacttgggaggctgaggta

SEQ ID NO: 300846 - DNA, 221 bp, Homo sapiens
accgagtggacgatgaatggtcccaccattgcagcaccgagctccgctgttgtaccagctggtttttctgctctccgagtgccttggcatctcccaatggggtggctttgctctgggctcctgttccctgtgagctgcctggtcctgctgcaggtggcaagctctggactcttcaggatgccgtgtggagaaaggaagagggtggaagccaggaggtctgg

SEQ ID NO: 300847 - DNA, 3446 bp, Homo sapiens
tctagaggtccccaccaacattggctcgacctgccagtcctttagaaagatcacccagtgctttttgtataccaaaccctatttgaaatacttacgtatattaacccatttccttatcaccacaaccctgcgggaagggagataggcacttttattatcttcattttgcagatgaggacattgaggtccagagaggttatgtcacttacttaaggtcacacagccaggaagtggtagtagggactcttacccttgttttacagatgagattgaattatctcacaaaaactcagaaaggttaaacaacttgcctaagtaacatacagctaattagtcgaggagcctgacgcatgttgctctagcctggtcacagttacagaggtggcaagcaatggcctgaacaggacgaacaaccaaatacccaggctggtggctcttaaacatggtggggtcagctaacgacagcaaccagggtgggcactggtgcccctcgcccccggctggtgccctaacatctcccttttctctaccagttcagaatctataacgtgacctacctagaaccctccctccgcatcgcagccagcaccctgaagtctgggatttcctacagggcacgggtgagggcctgggctcagtgctataacaccacctggagtgagtggagccccagcaccaagtggcacaactcctacagggagcccttcgagcagcacctcctgctgggcgtcagcgtttcctgcattgtcatcctggccgtctgcctgttgtgctatgtcagcatcaccaagattaagaaagaatggtgggatcagattcccaacccagcccgcagccgcctcgtggctataataatccaggatgctcaggggtcacagtgggagaagcggtcccgaggccaggaaccagccaagtgcccacactggaagaattgtcttaccaagctcttgccctgttttctggagcacaacatgaaaagggatgaagatcctcacaaggctgccaaagagatgcctttccagggctctggaaaatcagcatggtgcccagtggagatcagcaagacagtcctctggccagagagcatcagcgtggtgcgatgtgtggagttgtttgaggccccggtggagtgtgaggaggaggaggaggtagaggaagaaaaagggagcttctgtgcatcgcctgagagcagcagggatgacttccaggagggaagggagggcattgtggcccggctaacagagagcctgttcctggacctgctcggagaggagaatgggggcttttgccagcaggacatgggggagtcatgccttcttccaccttcgggaagtacgagtgctcacatgccctgggatgagttcccaagtgcagggcccaaggaggcacctccctggggcaaggagcagcctctccacctggagccaagtcctcctgccagcccgacccagagtccagacaacctgacttgcacagagacgcccctcgtcatcgcaggcaaccctgcttaccgcagcttcagcaactccctgagccagtcaccgtgtcccagagagctgggtccagacccactgctggccagacacctggaggaagtagaacccgagatgccctgtgtcccccagctctctgagccaaccactgtgccccaacctgagccagaaacctgggagcagatcctccgccgaaatgtcctccagcatggggcagctgcagcccccgtctcggcccccaccagtggctatcaggagtttgtacatgcggtggagcagggtggcacccaggccagtgcggtggtgggcttgggtcccccaggagaggctggttacaaggccttctcaagcctgcttgccagcagtgctgtgtccccagagaaatgtgggtttggggctagcagtggggaagaggggtataagcctttccaagacctcattcctggctgccctggggaccctgccccagtccctgtccccttgttcacctttggactggacagggagccacctcgcagtccgcagagctcacatctcccaagcagctccccagagcacctgggtctggagccgggggaaaaggtagaggacatgccaaagcccccacttccccaggagcaggccacagacccccttgtggacagcctgggcagtggcattgtctactcagcccttacctgccacctgtgcggccacctgaaacagtgtcatggccaggaggatggtggccagacccctgtcatggccagtccttgctgtggctgctgctgtggagacaggtcctcgccccctacaacccccctgagggccccagacccctctccaggtggggttccactggaggccagtctgtgtccggcctccctggcaccctcgggcatctcagagaagagtaaatcctcatcatccttccatcctgcccctggcaatgctcagagctcaagccagacccccaaaatcgtgaactttgtctccgtgggacccacatacatgagggtctcttaggtgcatgtcctcttgttgctgagtctgcagatgaggactagggcttatccatgcctgggaaatgccacctcctggaaggcagccaggctggcagatttccaaaagacttgaagaaccatggtatgaaggtgattggccccactgacgttggcctaacactgggctgcagagactggaccccgcccagcattgggctgggctcgccacatcccatgagagtagagggcactgggtcgccgtgccccacggcaggcccctgcaggaaaactgaggcccttgggcacctcgacttgtgaacgagttgttggctgctccctccacagcttctgcagcagactgtccctgttgtaactgcccaaggcatgttttgcccaccagatcatggcccacatggaggcccacctgcctctgtctcactgaactagaagccgagcctagaaactaacacagccatcaagggaatgacttgggcggccttgggaaatcgatgagaaattgaacttcagggagggtggtcattgcctagaggtgctcattcatttaacagagcttccttaggttgatgctggaggcagaatcccggctgtcaaggggtgttcagttaaggggagcaacagaggacatgaaaaattgctgtgactaaagcagggacaatttgctgccaaacacccatgcccagctgtatggctgggggctcctcgtatgcatggaacccccagaataaatatgctcagccaccctgtgggccgggcaatccagacagcaggcataaggcaccagttaccctgcatgttggcccagacctcaggtgctagggaaggcgggaaccttgggttgagtaatgctcgtctgtgtgttttagtttcatcacctgttatctgtgtttgctgaggagagtggaacagaaggggtggagttttgtataaataaagtttctttgtctcttta

SEQ ID NO: 300848 - DNA, 3535 bp, Homo sapiens
ccccgcgcggcgcgggccagggaagggccacccaggggtcccccacttcccgcttgggcgcccggacggcgaatggagcaggggcgcgcaggtgccttggcatctcccaatggggtggctttgctctgggctcctgttccctgtgagctgcctggtcctgctgcaggtggcaagctctgggaacatgaaggtcttgcaggagcccacctgcgtctccgactacatgagcatctctacttgcgagtggaagatgaatggtcccaccaattgcagcaccgagctccgcctgttgtaccagctggtttttctgctctccgaagcccacacgtgtatccctgagaacaacggaggcgcggggtgcgtgtgccacctgctcatggatgacgtggtcagtgcggataactatacactggacctgtgggctgggcagcagctgctgtggaagggctccttcaagcccagcgagcatgtgaaacccagggccccaggaaacctgacagttcacaccaatgtctccgacactctgctgctgacctggagcaacccgtatccccctgacaattacctgtataatcatctcacctatgcagtcaacatttggagtgaaaacgacccggcagatttcagaatctataacgtgacctacctagaaccctccctccgcatcgcagccagcaccctgaagtctgggatttcctacagggcacgggtgagggcctgggctcagtgctataacaccacctggagtgagtggagccccagcaccaagtggcacaactcctacagggagcccttcgagcagcacctcctgctgggcgtcagcgtttcctgcattgtcatcctggccgtctgcctgttgtgctatgtcagcatcaccaagattaagaaagaatggtgggatcagattcccaacccagcccgcagccgcctcgtggctataataatccaggatgctcaggggtcacagtgggagaagcggtcccgaggccaggaaccagccaagtgcccacactggaagaattgtcttaccaagctcttgccctgttttctggagcacaacatgaaaagggatgaagatcctcacaaggctgccaaagagatgcctttccagggctctggaaaatcagcatggtgcccagtggagatcagcaagacagtcctctggccagagagcatcagcgtggtgcgatgtgtggagttgtttgaggccccggtggagtgtgaggaggaggaggaggtagaggaagaaaaagggagcttctgtgcatcgcctgagagcagcagggatgacttccaggagggaagggagggcattgtggcccggctaacagagagcctgttcctggacctgctcggagaggagaatgggggcttttgccagcaggacatgggggagtcatgccttcttccaccttcgggaagtacgagtgctcacatgccctgggatgagttcccaagtgcagggcccaaggaggcacctccctggggcaaggagcagcctctccacctggagccaagtcctcctgccagcccgacccagagtccagacaacctgacttgcacagagacgcccctcgtcatcgcaggcaaccctgcttaccgcagcttcagcaactccctgagccagtcaccgtgtcccagagagctgggtccagacccactgctggccagacacctggaggaagtagaacccgagatgccctgtgtcccccagctctctgagccaaccactgtgccccaacctgagccagaaacctgggagcagatcctccgccgaaatgtcctccagcatggggcagctgcagcccccgtctcggcccccaccagtggctatcaggagtttgtacatgcggtggagcagggtggcacccaggccagtgcggtggtgggcttgggtcccccaggagaggctggttacaaggccttctcaagcctgcttgccagcagtgctgtgtccccagagaaatgtgggtttggggctagcagtggggaagaggggtataagcctttccaagacctcattcctggctgccctggggaccctgccccagtccctgtccccttgttcacctttggactggacagggagccacctcgcagtccgcagagctcacatctcccaagcagctccccagagcacctgggtctggagccgggggaaaaggtagaggacatgccaaagcccccacttccccaggagcaggccacagacccccttgtggacagcctgggcagtggcattgtctactcagcccttacctgccacctgtgcggccacctgaaacagtgtcatggccaggaggatggtggccagacccctgtcatggccagtccttgctgtggctgctgctgtggagacaggtcctcgccccctacaacccccctgagggccccagacccctctccaggtggggttccactggaggccagtctgtgtccggcctccctggcaccctcgggcatctcagagaagagtaaatcctcatcatccttccatcctgcccctggcaatgctcagagctcaagccagacccccaaaatcgtgaactttgtctccgtgggacccacatacatgagggtctcttaggtgcatgtcctcttgttgctgagtctgcagatgaggactagggcttatccatgcctgggaaatgccacctcctggaaggcagccaggctggcagatttccaaaagacttgaagaaccatggtatgaaggtgattggccccactgacgttggcctaacactgggctgcagagactggaccccgcccagcattgggctgggctcgccacatcccatgagagtagagggcactgggtcgccgtgccccacggcaggcccctgcaggaaaactgaggcccttgggcacctcgacttgtgaacgagttgttggctgctccctccacagcttctgcagcagactgtccctgttgtaactgcccaaggcatgttttgcccaccagatcatggcccacatggaggcccacctgcctctgtctcactgaactagaagccgagcctagaaactaacacagccatcaagggaatgacttgggcggccttgggaaatcgatgagaaattgaacttcagggagggtggtcattgcctagaggtgctcattcatttaacagagcttccttaggttgatgctggaggcagaatcccggctgtcaaggggtgttcagttaaggggagcaacagaggacatgaaaaattgctgtgactaaagcagggacaatttgctgccaaacacccatgcccagctgtatggctgggggctcctcgtatgcatggaacccccagaataaatatgctcagccaccctgtgggccgggcaatccagacagcaggcataaggcaccagttaccctgcatgttggcccagacctcaggtgctagggaaggcgggaaccttgggttgagtaatgctcgtctgtgtgttttagtttcatcacctgttatctgtgtttgctgaggagagtggaacagaaggggtggagttttgtataaataaagtttctttgtctcttta

SEQ ID NO: 300849 - DNA, 4273 bp, Homo sapiens
ccccgcgcggcgcgggccagggaagggccacccaggggtcccccacttcccgcttgggcgcccggacggcgaatggagcaggggcgcgcagataattaaagatttacacacagctggaagaaatcatagagaagccgggcgtggtggctcatgcctataatcccagcacttttggaggctgaggcgggcagatcacttgagatcaggagttcgagaccagcctggtgccttggcatctcccaatggggtggctttgctctgggctcctgttccctgtgagctgcctggtcctgctgcaggtggcaagctctgggaacatgaaggtcttgcaggagcccacctgcgtctccgactacatgagcatctctacttgcgagtggaagatgaatggtcccaccaattgcagcaccgagctccgcctgttgtaccagctggtttttctgctctccgaagcccacacgtgtatccctgagaacaacggaggcgcggggtgcgtgtgccacctgctcatggatgacgtggtcagtgcggataactatacactggacctgtgggctgggcagcagctgctgtggaagggctccttcaagcccagcgagcatgtcctcccacctttgaaacggagctggtcgcagtagaccaccaagcccccttcagcccagctgtttccacccctgaacttaagtgcccaggaaggcgtattgagatgaggtgtgcttgctggaaggcatgcctgctgctgattgaaaaccgaactgggaacagtccttccattctgtgtccactggtcagctgctgcggctttggatggtcttgaccgtggaaggctgaccttcttctggtacccggagtccctgcaggaatcccccttgagcttgctgggctgtggtgacaggagtttaaaacatgcgttgtattccagtgatgcatgatatgacatgcatcacaggaataaaaacctgaggtctcatggatatgattgcttcaaaggagaccaagttttaaaacagatgaatcaaaataaagaaaaatactcagtaaatcatcataaagtacagagatgtggccaaaggtgtgaaggatgcagctgtaaaagctgaagtttgaggccgggtgtggtggttcatgcctataatcccagcactttgggaggccgagcccagcggatcaccggaggtcaggagttcgagaccagcctggacaacatgtgaaacccagggccccaggaaacctgacagttcacaccaatgtctccgacactctgctgctgacctggagcaacccgtatccccctgacaattacctgtataatcatctcacctatgcagtcaacatttggagtgaaaacgacccggcagatttcagaatctataacgtgacctacctagaaccctccctccgcatcgcagccagcaccctgaagtctgggatttcctacagggcacgggtgagggcctgggctcagtgctataacaccacctggagtgagtggagccccagcaccaagtggcacaactcctacagggagcccttcgagcagcacctcctgctgggcgtcagcgtttcctgcattgtcatcctggccgtctgcctgttgtgctatgtcagcatcaccaagattaagaaagaatggtgggatcagattcccaacccagcccgcagccgcctcgtggctataataatccaggatgctcaggggtcacagtgggagaagcggtcccgaggccaggaaccagccaagtgcccacactggaagaattgtcttaccaagctcttgccctgttttctggagcacaacatgaaaagggatgaagatcctcacaaggctgccaaagagatgcctttccagggctctggaaaatcagcatggtgcccagtggagatcagcaagacagtcctctggccagagagcatcagcgtggtgcgatgtgtggagttgtttgaggccccggtggagtgtgaggaggaggaggaggtagaggaagaaaaagggagcttctgtgcatcgcctgagagcagcagggatgacttccaggagggaagggagggcattgtggcccggctaacagagagcctgttcctggacctgctcggagaggagaatgggggcttttgccagcaggacatgggggagtcatgccttcttccaccttcgggaagtacgagtgctcacatgccctgggatgagttcccaagtgcagggcccaaggaggcacctccctggggcaaggagcagcctctccacctggagccaagtcctcctgccagcccgacccagagtccagacaacctgacttgcacagagacgcccctcgtcatcgcaggcaaccctgcttaccgcagcttcagcaactccctgagccagtcaccgtgtcccagagagctgggtccagacccactgctggccagacacctggaggaagtagaacccgagatgccctgtgtcccccagctctctgagccaaccactgtgccccaacctgagccagaaacctgggagcagatcctccgccgaaatgtcctccagcatggggcagctgcagcccccgtctcggcccccaccagtggctatcaggagtttgtacatgcggtggagcagggtggcacccaggccagtgcggtggtgggcttgggtcccccaggagaggctggttacaaggccttctcaagcctgcttgccagcagtgctgtgtccccagagaaatgtgggtttggggctagcagtggggaagaggggtataagcctttccaagacctcattcctggctgccctggggaccctgccccagtccctgtccccttgttcacctttggactggacagggagccacctcgcagtccgcagagctcacatctcccaagcagctccccagagcacctgggtctggagccgggggaaaaggtagaggacatgccaaagcccccacttccccaggagcaggccacagacccccttgtggacagcctgggcagtggcattgtctactcagcccttacctgccacctgtgcggccacctgaaacagtgtcatggccaggaggatggtggccagacccctgtcatggccagtccttgctgtggctgctgctgtggagacaggtcctcgccccctacaacccccctgagggccccagacccctctccaggtggggttccactggaggccagtctgtgtccggcctccctggcaccctcgggcatctcagagaagagtaaatcctcatcatccttccatcctgcccctggcaatgctcagagctcaagccagacccccaaaatcgtgaactttgtctccgtgggacccacatacatgagggtctcttaggtgcatgtcctcttgttgctgagtctgcagatgaggactagggcttatccatgcctgggaaatgccacctcctggaaggcagccaggctggcagatttccaaaagacttgaagaaccatggtatgaaggtgattggccccactgacgttggcctaacactgggctgcagagactggaccccgcccagcattgggctgggctcgccacatcccatgagagtagagggcactgggtcgccgtgccccacggcaggcccctgcaggaaaactgaggcccttgggcacctcgacttgtgaacgagttgttggctgctccctccacagcttctgcagcagactgtccctgttgtaactgcccaaggcatgttttgcccaccagatcatggcccacatggaggcccacctgcctctgtctcactgaactagaagccgagcctagaaactaacacagccatcaagggaatgacttgggcggccttgggaaatcgatgagaaattgaacttcagggagggtggtcattgcctagaggtgctcattcatttaacagagcttccttaggttgatgctggaggcagaatcccggctgtcaaggggtgttcagttaaggggagcaacagaggacatgaaaaattgctgtgactaaagcagggacaatttgctgccaaacacccatgcccagctgtatggctgggggctcctcgtatgcatggaacccccagaataaatatgctcagccaccctgtgggccgggcaatccagacagcaggcataaggcaccagttaccctgcatgttggcccagacctcaggtgctagggaaggcgggaaccttgggttgagtaatgctcgtctgtgtgttttagtttcatcacctgttatctgtgtttgctgaggagagtggaacagaaggggtggagttttgtataaataaagtttctttgtctcttta

SEQ ID NO: 300850 - DNA, 3518 bp, Homo sapiens
aggctccggatccctctgggaggtagatttgaggacagattggaattgaggtgaaagacagagaaagagaagtggccaggatgactccaagatttctgacctaaactactgggaaggacgcggttgtcatttctgaaatgcagaaggatgccagaagagaagggaacatgaaggtcttgcaggagcccacctgcgtctccgactacatgagcatctctacttgcgagtggaagatgaatggtcccaccaattgcagcaccgagctccgcctgttgtaccagctggtttttctgctctccgaagcccacacgtgtatccctgagaacaacggaggcgcggggtgcgtgtgccacctgctcatggatgacgtggtcagtgcggataactatacactggacctgtgggctgggcagcagctgctgtggaagggctccttcaagcccagcgagcatgtgaaacccagggccccaggaaacctgacagttcacaccaatgtctccgacactctgctgctgacctggagcaacccgtatccccctgacaattacctgtataatcatctcacctatgcagtcaacatttggagtgaaaacgacccggcagatttcagaatctataacgtgacctacctagaaccctccctccgcatcgcagccagcaccctgaagtctgggatttcctacagggcacgggtgagggcctgggctcagtgctataacaccacctggagtgagtggagccccagcaccaagtggcacaactcctacagggagcccttcgagcagcacctcctgctgggcgtcagcgtttcctgcattgtcatcctggccgtctgcctgttgtgctatgtcagcatcaccaagattaagaaagaatggtgggatcagattcccaacccagcccgcagccgcctcgtggctataataatccaggatgctcaggggtcacagtgggagaagcggtcccgaggccaggaaccagccaagtgcccacactggaagaattgtcttaccaagctcttgccctgttttctggagcacaacatgaaaagggatgaagatcctcacaaggctgccaaagagatgcctttccagggctctggaaaatcagcatggtgcccagtggagatcagcaagacagtcctctggccagagagcatcagcgtggtgcgatgtgtggagttgtttgaggccccggtggagtgtgaggaggaggaggaggtagaggaagaaaaagggagcttctgtgcatcgcctgagagcagcagggatgacttccaggagggaagggagggcattgtggcccggctaacagagagcctgttcctggacctgctcggagaggagaatgggggcttttgccagcaggacatgggggagtcatgccttcttccaccttcgggaagtacgagtgctcacatgccctgggatgagttcccaagtgcagggcccaaggaggcacctccctggggcaaggagcagcctctccacctggagccaagtcctcctgccagcccgacccagagtccagacaacctgacttgcacagagacgcccctcgtcatcgcaggcaaccctgcttaccgcagcttcagcaactccctgagccagtcaccgtgtcccagagagctgggtccagacccactgctggccagacacctggaggaagtagaacccgagatgccctgtgtcccccagctctctgagccaaccactgtgccccaacctgagccagaaacctgggagcagatcctccgccgaaatgtcctccagcatggggcagctgcagcccccgtctcggcccccaccagtggctatcaggagtttgtacatgcggtggagcagggtggcacccaggccagtgcggtggtgggcttgggtcccccaggagaggctggttacaaggccttctcaagcctgcttgccagcagtgctgtgtccccagagaaatgtgggtttggggctagcagtggggaagaggggtataagcctttccaagacctcattcctggctgccctggggaccctgccccagtccctgtccccttgttcacctttggactggacagggagccacctcgcagtccgcagagctcacatctcccaagcagctccccagagcacctgggtctggagccgggggaaaaggtagaggacatgccaaagcccccacttccccaggagcaggccacagacccccttgtggacagcctgggcagtggcattgtctactcagcccttacctgccacctgtgcggccacctgaaacagtgtcatggccaggaggatggtggccagacccctgtcatggccagtccttgctgtggctgctgctgtggagacaggtcctcgccccctacaacccccctgagggccccagacccctctccaggtggggttccactggaggccagtctgtgtccggcctccctggcaccctcgggcatctcagagaagagtaaatcctcatcatccttccatcctgcccctggcaatgctcagagctcaagccagacccccaaaatcgtgaactttgtctccgtgggacccacatacatgagggtctcttaggtgcatgtcctcttgttgctgagtctgcagatgaggactagggcttatccatgcctgggaaatgccacctcctggaaggcagccaggctggcagatttccaaaagacttgaagaaccatggtatgaaggtgattggccccactgacgttggcctaacactgggctgcagagactggaccccgcccagcattgggctgggctcgccacatcccatgagagtagagggcactgggtcgccgtgccccacggcaggcccctgcaggaaaactgaggcccttgggcacctcgacttgtgaacgagttgttggctgctccctccacagcttctgcagcagactgtccctgttgtaactgcccaaggcatgttttgcccaccagatcatggcccacatggaggcccacctgcctctgtctcactgaactagaagccgagcctagaaactaacacagccatcaagggaatgacttgggcggccttgggaaatcgatgagaaattgaacttcagggagggtggtcattgcctagaggtgctcattcatttaacagagcttccttaggttgatgctggaggcagaatcccggctgtcaaggggtgttcagttaaggggagcaacagaggacatgaaaaattgctgtgactaaagcagggacaatttgctgccaaacacccatgcccagctgtatggctgggggctcctcgtatgcatggaacccccagaataaatatgctcagccaccctgtgggccgggcaatccagacagcaggcataaggcaccagttaccctgcatgttggcccagacctcaggtgctagggaaggcgggaaccttgggttgagtaatgctcgtctgtgtgttttagtttcatcacctgttatctgtgtttgctgaggagagtggaacagaaggggtggagttttgtataaataaagtttctttgtctcttta

SEQ ID NO: 300851 - DNA, 4191 bp, Homo sapiens
ccccgcgcggcgcgggccagggaagggccacccaggggtcccccacttcccgcttgggcgcccggacggcgaatggagcaggggcgcgcagataattaaagatttacacacagctggaagaaatcatagagaagccgggcgtggtggctcatgcctataatcccagcacttttggaggctgaggcgggcagatcacttgagatcaggagttcgagaccagcctggtgccttggcatctcccaatggggtggctttgctctgggctcctgttccctgtgagctgcctggtcctgctgcaggtggcaagctctgggaacatgaaggtcttgcaggagcccacctgcgtctccgactacatgagcatctctacttgcgagtggaagatgaatggtcccaccaattgcagcaccgagctccgcctgttgtaccagctggtttttctgctctccgaagcccacacgtgtatccctgagaacaacggaggcgcggggtgcgtgtgccacctgctcatggatgacgtggtcagtgcggataactatacactggacctgtgggctgggcagcagctgctgtggaagggctccttcaagcccagcgagcatgtgcccaggaaggcgtattgagatgaggtgtgcttgctggaaggcatgcctgctgctgattgaaaaccgaactgggaacagtccttccattctgtgtccactggtcagctgctgcggctttggatggtcttgaccgtggaaggctgaccttcttctggtacccggagtccctgcaggaatcccccttgagcttgctgggctgtggtgacaggagtttaaaacatgcgttgtattccagtgatgcatgatatgacatgcatcacaggaataaaaacctgaggtctcatggatatgattgcttcaaaggagaccaagttttaaaacagatgaatcaaaataaagaaaaatactcagtaaatcatcataaagtacagagatgtggccaaaggtgtgaaggatgcagctgtaaaagctgaagtttgaggccgggtgtggtggttcatgcctataatcccagcactttgggaggccgagcccagcggatcaccggaggtcaggagttcgagaccagcctggacaacatgtgaaacccagggccccaggaaacctgacagttcacaccaatgtctccgacactctgctgctgacctggagcaacccgtatccccctgacaattacctgtataatcatctcacctatgcagtcaacatttggagtgaaaacgacccggcagatttcagaatctataacgtgacctacctagaaccctccctccgcatcgcagccagcaccctgaagtctgggatttcctacagggcacgggtgagggcctgggctcagtgctataacaccacctggagtgagtggagccccagcaccaagtggcacaactcctacagggagcccttcgagcagcacctcctgctgggcgtcagcgtttcctgcattgtcatcctggccgtctgcctgttgtgctatgtcagcatcaccaagattaagaaagaatggtgggatcagattcccaacccagcccgcagccgcctcgtggctataataatccaggatgctcaggggtcacagtgggagaagcggtcccgaggccaggaaccagccaagtgcccacactggaagaattgtcttaccaagctcttgccctgttttctggagcacaacatgaaaagggatgaagatcctcacaaggctgccaaagagatgcctttccagggctctggaaaatcagcatggtgcccagtggagatcagcaagacagtcctctggccagagagcatcagcgtggtgcgatgtgtggagttgtttgaggccccggtggagtgtgaggaggaggaggaggtagaggaagaaaaagggagcttctgtgcatcgcctgagagcagcagggatgacttccaggagggaagggagggcattgtggcccggctaacagagagcctgttcctggacctgctcggagaggagaatgggggcttttgccagcaggacatgggggagtcatgccttcttccaccttcgggaagtacgagtgctcacatgccctgggatgagttcccaagtgcagggcccaaggaggcacctccctggggcaaggagcagcctctccacctggagccaagtcctcctgccagcccgacccagagtccagacaacctgacttgcacagagacgcccctcgtcatcgcaggcaaccctgcttaccgcagcttcagcaactccctgagccagtcaccgtgtcccagagagctgggtccagacccactgctggccagacacctggaggaagtagaacccgagatgccctgtgtcccccagctctctgagccaaccactgtgccccaacctgagccagaaacctgggagcagatcctccgccgaaatgtcctccagcatggggcagctgcagcccccgtctcggcccccaccagtggctatcaggagtttgtacatgcggtggagcagggtggcacccaggccagtgcggtggtgggcttgggtcccccaggagaggctggttacaaggccttctcaagcctgcttgccagcagtgctgtgtccccagagaaatgtgggtttggggctagcagtggggaagaggggtataagcctttccaagacctcattcctggctgccctggggaccctgccccagtccctgtccccttgttcacctttggactggacagggagccacctcgcagtccgcagagctcacatctcccaagcagctccccagagcacctgggtctggagccgggggaaaaggtagaggacatgccaaagcccccacttccccaggagcaggccacagacccccttgtggacagcctgggcagtggcattgtctactcagcccttacctgccacctgtgcggccacctgaaacagtgtcatggccaggaggatggtggccagacccctgtcatggccagtccttgctgtggctgctgctgtggagacaggtcctcgccccctacaacccccctgagggccccagacccctctccaggtggggttccactggaggccagtctgtgtccggcctccctggcaccctcgggcatctcagagaagagtaaatcctcatcatccttccatcctgcccctggcaatgctcagagctcaagccagacccccaaaatcgtgaactttgtctccgtgggacccacatacatgagggtctcttaggtgcatgtcctcttgttgctgagtctgcagatgaggactagggcttatccatgcctgggaaatgccacctcctggaaggcagccaggctggcagatttccaaaagacttgaagaaccatggtatgaaggtgattggccccactgacgttggcctaacactgggctgcagagactggaccccgcccagcattgggctgggctcgccacatcccatgagagtagagggcactgggtcgccgtgccccacggcaggcccctgcaggaaaactgaggcccttgggcacctcgacttgtgaacgagttgttggctgctccctccacagcttctgcagcagactgtccctgttgtaactgcccaaggcatgttttgcccaccagatcatggcccacatggaggcccacctgcctctgtctcactgaactagaagccgagcctagaaactaacacagccatcaagggaatgacttgggcggccttgggaaatcgatgagaaattgaacttcagggagggtggtcattgcctagaggtgctcattcatttaacagagcttccttaggttgatgctggaggcagaatcccggctgtcaaggggtgttcagttaaggggagcaacagaggacatgaaaaattgctgtgactaaagcagggacaatttgctgccaaacacccatgcccagctgtatggctgggggctcctcgtatgcatggaacccccagaataaatatgctcagccaccctgtgggccgggcaatccagacagcaggcataaggcaccagttaccctgcatgttggcccagacctcaggtgctagggaaggcgggaaccttgggttgagtaatgctcgtctgtgtgttttagtttcatcacctgttatctgtgtttgctgaggagagtggaacagaaggggtggagttttgtataaataaagtttctttgtctcttta

SEQ ID NO: 300852 - DNA, 3490 bp, Homo sapiens
tctagaggtccccaccaacattggctcgacctgccagtcctttagaaagatcacccagtgctttttgtataccaaaccctatttgaaatacttacgtatattaacccatttccttatcaccacaaccctgcgggaagggagataggcacttttattatcttcattttgcagatgaggacattgaggtccagagaggttatgtcacttacttaaggtcacacagccaggaagtggtagtagggactcttacccttgttttacagatgagattgaattatctcacaaaaactcagaaaggttaaacaacttgcctaagtaacatacagctaattagtcgaggagcctgacgcatgttgctctagcctggtcacagttacagaggtggcaagcaatggcctgaacaggacgaacaaccaaatacccaggctggtggctcttaaacatggtggggtcagctaacgacagcaaccagggtgggcactggtgcccctcgcccccggctggtgccctaacatctcccttttctctaccagttcagaatctataacgtgacctacctagaaccctccctccgcatcgcagccagcaccctgaagtctgggatttcctacagggcacgggtgagggcctgggctcagtgctataacaccacctggagtgagtggagccccagcaccaagtggcacaactcctacagggagcccttcgagcagcacctcctgctgggcgtcagcgtttcctgcattgtcatcctggccgtctgcctgttgtgctatgtcagcatcaccaagattaagaaagaatggtgggatcagattcccaacccagcccgcagccgcctcgtggctataataatccaggatgctcaggggtcacagtgggagaagcggtcccgaggccaggaaccagccaagtgcccacactggaagaattgtcttaccaagctcttgccctgttttctggagcacaacatgaaaagggatgaagatcctcacaaggctgccaaagagatgcctttccagggctctggaaaatcagcatggtgcccagtggagatcagcaagacagtcctctggccagagagcatcagcgtggtgcgatgtgtggagttgtttgaggccccggtggagtgtgaggaggaggaggaggtagaggaagaaaaagggagcttctgtgcatcgcctgagagcagcagggatgacttccaggagggaagggagggcattgtggcccggctaacagagagcctgttcctggacctgctcggagaggagaatgggggcttttgccagcaggacatgggggagtcatgccttcttccaccttcgggaagtacgagtgctcacatgccctgggatgagttcccaagtgcagggcccaaggaggcacctccctggggcaaggagcagcctctccacctggagccaagtcctcctgccagcccgacccagagtccagacaacctgacttgcacagagacgcccctcgtcatcgcaggcaaccctgcttaccgcagcttcagcaactccctgagccagtcaccgtgtcccagagagctgggtccagacccactgctggccagacacctggaggaagtagaacccgagatgccctgtgtcccccagctctctgagccaaccactgtgccccaacctgagccagaaacctgggagcagatcctccgccgaaatgtcctccagcatggggcagctgcagcccccgtctcggcccccaccagtggctatcaggagtttgtacatgcggtggagcagggtggcacccaggccagtgcggtggtgggcttgggtcccccaggagaggctggttacaaggccttctcaagcctgcttgccagcagtgctgtgtccccagagaaatgtgggtttggggctagcagtggggaagaggggtataagcctttccaagacctcattcctggctgccctggggaccctgccccagtccctgtccccttgttcacctttggactggacagggagccacctcgcagtccgcagagctcacatctcccaagcagctccccagagcacctgggtctggagccgggggaaaaggtagaggacatgccaaagcccccacttccccaggagcaggccacagacccccttgtggacagcctgggcagtggcattgtctactcagcccttacctgccacctgtgcggccacctgaaacagtgtcatggccaggaggatggtggccagacccctgtcatggccagtccttgctgtggctgctgctgtggagacaggtcctcgccccctacaacccccctgagggccccagacccctctccaggtggggttccactggaggccagtctgtgtccggcctccctggcaccctcgggcatctcagagaagagtaaatcctcatcatccttccatcctgcccctggcaatgctcagagctcaagccagacccccaaaatcgtgaactttgtctccgtgggacccacatacatgagggtctcttaggtgcatgtcctcttgttgctgagtctgcagatgaggactagggcttatccatgcctgggaaatgccacctcctggaaggcagccaggctggcagatttccaaaagacttgaagaaccatggtatgaaggtgattggccccactgacgttggcctaacactgggctgcagagactggaccccgcccagcattgggctgggctcgccacatcccatgagagtagagggcactgggtcgccgtgccccacggcaggcccctgcaggaaaactgaggcccttgggcacctcgacttgtgaacgagttgttggctgctccctccacagcttctgcagcagactgtccctgttgtaactgcccaaggcatgttttgcccaccagatcatggcccacatggaggcccacctgcctctgtctcactgaactagaagccgagcctagaaactaacacagccatcaagggaatgacttgggcggccttgggaaatcgatgagaaattgaacttcagggagggtggtcattgcctagaggtgctcattcatttaacagagcttccttaggttgatgctggaggcagaatcccggctgtcaaggggtgttcagttaaggggagcaacagaggacatgaaaaattgctgtgactaaagcagggacaatttgctgccaaacacccatgcccagctgtatggctgggggctcctcgtatgcatggaacccccagaataaatatgctcagccaccctgtgggccgggcaatccagacagcaggcataaggcaccagttaccctgcatgttggcccagacctcaggtgctagggaaggcgggaaccttgggttgagtaatgctcgtctgtgtgttttagtttcatcacctgttatctgtgtttgctgaggagagtggaacagaaggggtggagttttgtataaataaagtttctttgtctctttaaaaaaaacaaaagaactcgcagacatattcaccctcggggccaa

SEQ ID NO: 300853 - DNA, 3224 bp, Homo sapiens
gcccacggcagccttggcgtctacagcaatgcatagccctgcttaaatgctctcctatggccgggtgtggtggttcatgcctataatcccagcactttgggaggccgagcccagcggatcaccggaggtcaggagttcgagaccagcctggacaacatgtgaaacccagggccccaggaaacctgacagttcacaccaatgtctccgacactctgctgctgacctggagcaacccgtatccccctgacaattacctgtataatcatctcacctatgcagtcaacatttggagtgaaaacgacccggcagatttcagaatctataacgtgacctacctagaaccctccctccgcatcgcagccagcaccctgaagtctgggatttcctacagggcacgggtgagggcctgggctcagtgctataacaccacctggagtgagtggagccccagcaccaagtggcacaactcctacagggagcccttcgagcagcacctcctgctgggcgtcagcgtttcctgcattgtcatcctggccgtctgcctgttgtgctatgtcagcatcaccaagattaagaaagaatggtgggatcagattcccaacccagcccgcagccgcctcgtggctataataatccaggatgctcaggggtcacagtgggagaagcggtcccgaggccaggaaccagccaagtgcccacactggaagaattgtcttaccaagctcttgccctgttttctggagcacaacatgaaaagggatgaagatcctcacaaggctgccaaagagatgcctttccagggctctggaaaatcagcatggtgcccagtggagatcagcaagacagtcctctggccagagagcatcagcgtggtgcgatgtgtggagttgtttgaggccccggtggagtgtgaggaggaggaggaggtagaggaagaaaaagggagcttctgtgcatcgcctgagagcagcagggatgacttccaggagggaagggagggcattgtggcccggctaacagagagcctgttcctggacctgctcggagaggagaatgggggcttttgccagcaggacatgggggagtcatgccttcttccaccttcgggaagtacgagtgctcacatgccctgggatgagttcccaagtgcagggcccaaggaggcacctccctggggcaaggagcagcctctccacctggagccaagtcctcctgccagcccgacccagagtccagacaacctgacttgcacagagacgcccctcgtcatcgcaggcaaccctgcttaccgcagcttcagcaactccctgagccagtcaccgtgtcccagagagctgggtccagacccactgctggccagacacctggaggaagtagaacccgagatgccctgtgtcccccagctctctgagccaaccactgtgccccaacctgagccagaaacctgggagcagatcctccgccgaaatgtcctccagcatggggcagctgcagcccccgtctcggcccccaccagtggctatcaggagtttgtacatgcggtggagcagggtggcacccaggccagtgcggtggtgggcttgggtcccccaggagaggctggttacaaggccttctcaagcctgcttgccagcagtgctgtgtccccagagaaatgtgggtttggggctagcagtggggaagaggggtataagcctttccaagacctcattcctggctgccctggggaccctgccccagtccctgtccccttgttcacctttggactggacagggagccacctcgcagtccgcagagctcacatctcccaagcagctccccagagcacctgggtctggagccgggggaaaaggtagaggacatgccaaagcccccacttccccaggagcaggccacagacccccttgtggacagcctgggcagtggcattgtctactcagcccttacctgccacctgtgcggccacctgaaacagtgtcatggccaggaggatggtggccagacccctgtcatggccagtccttgctgtggctgctgctgtggagacaggtcctcgccccctacaacccccctgagggccccagacccctctccaggtggggttccactggaggccagtctgtgtccggcctccctggcaccctcgggcatctcagagaagagtaaatcctcatcatccttccatcctgcccctggcaatgctcagagctcaagccagacccccaaaatcgtgaactttgtctccgtgggacccacatacatgagggtctcttaggtgcatgtcctcttgttgctgagtctgcagatgaggactagggcttatccatgcctgggaaatgccacctcctggaaggcagccaggctggcagatttccaaaagacttgaagaaccatggtatgaaggtgattggccccactgacgttggcctaacactgggctgcagagactggaccccgcccagcattgggctgggctcgccacatcccatgagagtagagggcactgggtcgccgtgccccacggcaggcccctgcaggaaaactgaggcccttgggcacctcgacttgtgaacgagttgttggctgctccctccacagcttctgcagcagactgtccctgttgtaactgcccaaggcatgttttgcccaccagatcatggcccacatggaggcccacctgcctctgtctcactgaactagaagccgagcctagaaactaacacagccatcaagggaatgacttgggcggccttgggaaatcgatgagaaattgaacttcagggagggtggtcattgcctagaggtgctcattcatttaacagagcttccttaggttgatgctggaggcagaatcccggctgtcaaggggtgttcagttaaggggagcaacagaggacatgaaaaattgctgtgactaaagcagggacaatttgctgccaaacacccatgcccagctgtatggctgggggctcctcgtatgcatggaacccccagaataaatatgctcagccaccctgtgggccgggcaatccagacagcaggcataaggcaccagttaccctgcatgttggcccagacctcaggtgctagggaaggcgggaaccttgggttgagtaatgctcgtctgtgtgttttagtttcatcacctgttatctgtgtttgctgaggagagtggaacagaaggggtggagttttgtataaataaagtttctttgtctcttta

SEQ ID NO: 300854 - DNA, 1573 bp, Homo sapiens
tctagaggtccccaccaacattggctcgacctgccagtcctttagaaagatcacccagtgctttttgtataccaaaccctatttgaaatacttacgtatattaacccatttccttatcaccacaaccctgcgggaagggagataggcacttttattatcttcattttgcagatgaggacattgaggtccagagaggttatgtcacttacttaaggtcacacagccaggaagtggtagtagggactcttacccttgttttacagatgagattgaattatctcacaaaaactcagaaaggttaaacaacttgcctaagtaacatacagctaattagtcgaggagcctgacgcatgttgctctagcctggtcacagttacagaggtggcaagcaatggcctgaacaggacgaacaaccaaatacccaggctggtggctcttaaacatggtggggtcagctaacgacagcaaccagggtgggcactggtgcccctcgcccccggctggtgccctaacatctcccttttctctaccagttcagaatctataacgtgacctacctagaaccctccctccgcatcgcagccagcaccctgaagtctgggatttcctacagggcacgggtgagggcctgggctcagtgctataacaccacctggagtgagtggagccccagcaccaagtggcacaactcctacagggagcccttcgagcagcacctcctgctgggcgtcagcgtttcctgcattgtcatcctggccgtctgcctgttgtgctatgtcagcatcaccaagattaagaaagaatggtgggatcagattcccaacccagcccgcagccgcctcgtggctataataatccaggatgctcaggggtcacagtgggagaagcggtcccgaggcccttgggcacctcgacttgtgaacgagttgttggctgctccctccacagcttctgcagcagactgtccctgttgtaactgcccaaggcatgttttgcccaccagatcatggcccacatggaggcccacctgcctctgtctcactgaactagaagccgagcctagaaactaacacagccatcaagggaatgacttgggcggccttgggaaatcgatgagaaattgaacttcagggagggtggtcattgcctagaggtgctcattcatttaacagagcttccttaggttgatgctggaggcagaatcccggctgtcaaggggtgttcagttaaggggagcaacagaggacatgaaaaattgctgtgactaaagcagggacaatttgctgccaaacacccatgcccagctgtatggctgggggctcctcgtatgcatggaacccccagaataaatatgctcagccaccctgtgggccgggcaatccagacagcaggcataaggcaccagttaccctgcatgttggcccagacctcaggtgctagggaaggcgggaaccttgggttgagtaatgctcgtctgtgtgttttagtttcatcacctgttatctgtgtttgctgaggagagtggaacagaaggggtggagttttgtataaataaagtttctttgtctcttta

SEQ ID NO: 300855 - DNA, 1396 bp, Homo sapiens
tctagaggtccccaccaacattggctcgacctgccagtcctttagaaagatcacccagtgctttttgtataccaaaccctatttgaaatacttacgtatattaacccatttccttatcaccacaaccctgcgggaagggagataggcacttttattatcttcattttgcagatgaggacattgaggtccagagaggttatgtcacttacttaaggtcacacagccaggaagtggtagtagggactcttacccttgttttacagatgagattgaattatctcacaaaaactcagaaaggttaaacaacttgcctaagtaacatacagctaattagtcgaggagcctgacgcatgttgctctagcctggtcacagttacagaggtggcaagcaatggcctgaacaggacgaacaaccaaatacccaggctggtggctcttaaacatggtggggtcagctaacgacagcaaccagggtgggcactggtgcccctcgcccccggctggtgccctaacatctcccttttctctaccagttcagaatctataacgtgacctacctagaaccctccctccgcatcgcagccagcaccctgaagtctgggatttcctacagggcacgggtgagggcctgggctcagtgctataacaccacctggagtgagtggagccccagcaccaagtggcacaactcctacagggagcccttcgagcagcacctcctgctgggcgtcagcgtttcctgcattgtcatcctggccgtctgcctgttgtgctatgtcagcatcaccaagattaagaaagaatggtgggatcagattcccaacccagcccgcagccgcctcgtggctataataatccaggatgctcaggggtcacagtgggagaagcggtcccgaggccaggaaccagccaagtgcccacactggaagaattgtcttaccaagctcttgccctgttttctggagcacaacatgaaaagggatgaagatcctcacaaggctgccaaagagatgcctttccagggctctggaaaatcagcatggtgcccagtggagatcagcaagacagtcctctggccagagagcatcagcgtggtgcgatgtgtggagttgtttgaggccccggtggagtgtgaggaggaggaggaggtagaggaagaaaaagggagcttctgtgcatcgcctgagagcagcagggcggggcatcaggccagtgcctggaaggtgtggccaaaggggtctctagctgctgctctgctgctcctgctcatggatgagtttggcgatggggccggtgatgccgcctatcaaggtccagtactcatcgaagctgatgcgcccatcatgattggcatccaggttctggatgagcttatccgcagccttcagataaaatg

SEQ ID NO: 300856 - DNA, 953 bp, Homo sapiens
ccccgcgcggcgcgggccagggaagggccacccaggggtcccccacttcccgcttgggcgcccggacggcgaatggagcaggggcgcgcaggtgccttggcatctcccaatggggtggctttgctctgggctcctgttccctgtgagctgcctggtcctgctgcaggtggcaagctctgggaacatgaaggtcttgcaggagcccacctgcgtctccgactacatgagcatctctacttgcgagtggaagatgaatggtcccaccaattgcagcaccgagctccgcctgttgtaccagctggtttttctgctctccgaagcccacacgtgtatccctgagaacaacggaggcgcggggtgcgtgtgccacctgctcatggatgacgtggtcagtgcggataactatacactggacctgtgggctgggcagcagctgctgtggaagggctccttcaagcccagcgagcatgtgaaacccagggccccaggaaacctgacagttcacaccaatgtctccgacactctgctgctgacctggagcaacccgtatccccctgacaattacctgtataatcatctcacctatgcagtcaacatttggagtgaaaacgacccggcagatttcagaatctataacgtgacctacctagaaccctccctccgcatcgcagccagcaccctgaagtctgggatttcctacagggcacgggtgagggcctgggctcagtgctataacaccacctggagtgagtggagccccagcaccaagtggcacaactcctacagggagcccttcgagcagcacctcctgctgggcgtcagcgtttcctgcattgtcatcctggccgtctgcctgttgtgctatgtcagcatcaccaagatttagacagaatggcgggatcagatcccctacgcccctccgcaaccgcctcgctcgcgtattattattcgga

SEQ ID NO: 300857 - DNA, 373 bp, Homo sapiens
  misc_feature (347)..(347): n is a, c, g, or t
tctagaggtccccaccaacattggctcgacctgccagtcctttagaaagatcacccagtgctttttgtataccaaaccctatttgaaatacttacgtatattaacccatttccttatcaccacaaccctgcgggaagggagataggcacttttattatcttcattttgcagatgaggacattgaggtccagagaggttatgtcacttacttaaggtcacacagccaggaagtggtagtagggactcttacccttgttttacagatgagattgaattatctcacaaaaactcagaaaggttaaacaacttgcctaagtaacatacagctaattagtcggccaatgttnggtgtgatactctagaatcagctata

SEQ ID NO: 300858 - DNA, 867 bp, Homo sapiens
ccccgcgcggcgcgggccagggaagggccacccaggggtcccccacttcccgcttgggcgcccggacggcgaatggagcaggggcgcgcaggtgccttggcatctcccaatggggtggctttgctctgggctcctgttccctgtgagctgcctggtcctgctgcaggtggcaagctctgggaacatgaaggtcttgcaggagcccacctgcgtctccgactacatgagcatctctacttgcgagtggaagatgaatggtcccaccaattgcagcaccgagctccgcctgttgtaccagctggtttttctgctctccgaagcccacacgtgtatccctgagaacaacggaggcgcggggtgcgtgtgccacctgctcatggatgacgtggtcagtgcggataactatacactggacctgtgggctgggcagcagctgctgtggaagggctccttcaagcccagcgagcatgtgaaacccagggccccaggaaacctgacagttcacaccaatgtctccgacactctgctgctgacctggagcaacccgtatccccctgacaattacctgtataatcatctcacctatgcagtcaacatttggagtgaaaacgacccggcagatttcagaatctataacgtgacctacctagaaccctccctccgcatcgcagccagcaccctgaagtctgggatttcctacagggcacgggtgagggcctgggctcagtgctataacaccacctggagtgagtggagccccagcaccaagtggcacaactgtgagtatcaagaggcctaagcaatggtaatctccactctccattcttcccctgtggccagacacttcccctggctgagtctctgggc

SEQ ID NO: 300859 - DNA, 1391 bp, Homo sapiens
ccccgcgcggcgcgggccagggaagggccacccaggggtcccccacttcccgcttgggcgcccggacggcgaatggagcaggggcgcgcagataattaaagatttacacacagctggaagaaatcatagagaagccgggcgtggtggctcatgcctataatcccagcacttttggaggctgaggcgggcagatcacttgagatcaggagttcgagaccagcctggtgccttggcatctcccaatggggtggctttgctctgggctcctgttccctgtgagctgcctggtcctgctgcaggtggcaagctctgggaacatgaaggtcttgcaggagcccacctgcgtctccgactacatgagcatctctacttgcgagtggaagatgaatggtcccaccaattgcagcaccgagctccgcctgttgtaccagctggtttttctgctctccgaagcccacacgtgtatccctgagaacaacggaggcgcggggtgcgtgtgccacctgctcatggatgacgtggtcagtgcggataactatacactggacctgtgggctgggcagcagctgctgtggaagggctccttcaagcccagcgagcatgtcctcccacctttgaaacggagctggtcgcagtagaccaccaagcccccttcagcccagctgtttccacccctgaacttaagtgcccaggaaggcgtattgagatgaggtgtgcttgctggaaggcatgcctgctgctgattgaaaaccgaactgggaacagtccttccattctgtgtccactggtcagctgctgcggctttggatggtcttgaccgtggaaggctgaccttcttctggtacccggagtccctgcaggaatcccccttgagcttgctgggctgtggtgacaggagtttaaaacatgcgttgtattccagtgatgcatgatatgacatgcatcacaggaataaaaacctgaggtctcatggatatgattgcttcaaaggagaccaagttttaaaacagatgaatcaaaataaagaaaaatactcagtaaatcatcataaagtacagagatgtggccaaaggtgtgaaggatgcagctgtaaaagctgaagtttgaggccgggtgtggtggttcatgcctataatcccagcactttgggaggccgagcccagcggatcaccggaggtcaggagttcgagaccagcctggacaacatgtgaaacccagggccccaggaaacctgacagttcacaccaatgtctccgacactctgctgctgacctggagcaacccgtatccccctgacaattacctgtataatcatctcacctatgcagtcaacatttggagtgaaaacgacccggcagatttcagaatcttaacgtgatccgaatatcctg

SEQ ID NO: 300860 - DNA, 687 bp, Homo sapiens
ccccgcgcggcgcgggccagggaagggccacccaggggtcccccacttcccgcttgggcgcccggacggcgaatggagcaggggcgcgcagataattaaagatttacacacagctggaagaaatcatagagaagccgggcgtggtggctcatgcctataatcccagcacttttggaggctgaggcgggcagatcacttgagatcaggagttcgagaccagcctggtgccttggcatctcccaatggggtggctttgctctgggctcctgttccctgtgagctgcctggtcctgctgcaggtggcaagctctgggaacatgaaggtcttgcaggagcccacctgcgtctccgactacatgagcatctctacttgcgagtggaagatgaatggtcccaccaattgcagcaccgagctccgctgtatggctgggggctcctcgtatgcatggaacccccagaataaatatgctcagccaccctgtgggccgggcaatccagacagcaggcataaggcaccagttaccctgcatgttggcccagacctcaggtgctagggaaggcgggaaccttgggttgagtaatgctcgtctgtgtgttttagtttcatcacctgttatctgtgtttgctgaggagagtggaacagaaggggtggagttttgtataaataaagtttctttgtctcttta

SEQ ID NO: 300861 - DNA, 666 bp, Homo sapiens
ccccgcgcggcgcgggccagggaagggccacccaggggtcccccacttcccgcttgggcgcccggacggcgaatggagcaggggcgcgcagataattaaagatttacacacagctggaagaaatcatagagaagccgggcgtggtggctcatgcctataatcccagcacttttggaggctgaggcgggcagatcacttgagatcaggagttcgagaccagcctggtgccttggcatctcccaatggggtggctttgctctgggctcctgttccctgtgagctgcctggtcctgctgcaggtggcaagctctgggaacatgaaggtcttgcaggagcccacctgcgtctccgactacatgagcatctctacttgcgagtggaagatgaatggtcccaccaattgcagcaccgagctccgcctgttgtaccagctggtttttctgctctccgaagcccacacgtgtatccctgagaacaacggaggcgcggggtgcgtgtgccacctgctcatggatgacgtggtcagtgcggataactatacactggacctgtgggctgggcagcagctgctgtggaagggctccttcaagcccagcgagcatggtgagcagggcggagtgcggcaggggtggctgggtgtgttcccacagctgcctgggctgaggg

SEQ ID NO: 300862 - DNA, 400 bp, Homo sapiens
tcaagcgatcctccctcctcagcctcctaaagtgctgggattacaggcgtgagccaccgcacccggcttccatatcctttctaattggtcatggcttgggataatggtgttgcttttaattatcatcatccataaagactttttcttactcaacagatctgagcttgtatttggtgcccaggacatgtgctgggttcccgaaatcccaaagacacagaccctaccctcagggatttctcattctagcaacatagactgatcaattactgattataacgttagaaggcatgtctgaagtagacagccatcaggacatggtgatttcaggctgggctttgaagaatgaataggagtttttcaagtgtcgaaactgaaccctgaccaacctttgcttttgcag

SEQ ID NO: 300863 - DNA, 536 bp, Homo sapiens
ggttgcagtgagccgacatcacgccactgctctccagcttggggaacagagcaaacctccgtctcaaaaaaaaaaaaaaaaatctagggaagttgaaaacattttgcagtcaaagctatctttgctatctgcatcttgaaataaaataaacattcatacatgtaacctcattaatctgattagagatagtgataagtactgggacagacataaacagggtgctgtgataagaagtcacagggagggcccgcattagttgaggggggtcagagaaggcttctgaagtgtttctggtgcaaatgcttggaaaagggagagctgggagtgtatcccagggctgaggccaatggaggattgcagaagagggagaggggataggaggggaatgttagagggataagcaggggaattggctcttttcttcattttcttaaattaaactttttattttcagataattaaagatttacacacagctggaagaaatcatagagaagccgggcgtggtggctcatgcctataatcccagcactttt

SEQ ID NO: 300864 - DNA, 446 bp, Homo sapiens
aactcctcacctcaagtgatccacccacttcggcctcccaaagtgctgggattacaggcatgagccaccatgcccagccccatctctctttaaaaaacaaacaaacaaacaaaaaacataaaaagaagcagagaacacatacacatctgcatcttcccttgtttacttaacaatagatcttggaagtcacttctcagtagaggctaggttgggcagagcattggattctaggccagtgagtttggacttgaccatggagacactaggaagcccatgaaggacagagagagatgcccctgccagtcctttagaaagatcacccagtgctttttgtataccaaaccctatttgaaatacttacgtatattaacccatttccttatcaccacaaccctgcgggaagggagataggcacttttattatcttcattttgcagatgaggaca

SEQ ID NO: 300865 - DNA, 1166 bp, Homo sapiens
tcctgcctcagcctcctgagtagctgggactacaggcgtgtgccaccacacccagccaatttttgtagttttagtagaaatggggtttcaccatgttggccaggatggtctcgatctcttgacctcgtgatccacctgcctcggcctcccaaagtactgggattacgcgtgagctactgcacccggctgagtgatttttttttttttttttttaagatagagaaagtccctcatactgaggagccttgcagttgagagagaacagaattccagttggaggatcaaggaatttgagggaggcagcatgcttgcagtgttcctaggatttttacaggaactacaatagaaagttagggatgaaattatattgaaaggggaaagctggactgctcaggtttggaggtcatggggaattccaggattcagtatgtggttgctctcttatttttaacttctgcttagcagtaaaaccacacccttccttcttcctgaaagtaatgtttaacttcctctccctgcagcattacactctatgtaatgggagtggggtggaggaagagtctcccaaggtggttggatctcactattctactggaagaggagcaggcaaatatatttttatgtggtataatgtcattagattatttcctgctgcttaagacagagcaacttctggatgacattttggaatgtattctgtggctctaataattgttggtaaagatattgagccttctgttttcttgaggggagttggggtgcttgtttttgtacttggaaagggagactcgtatctcttgcttttttctttaattaaatttctgttttttacattaggacatgatagccatcttgcttctttctttaaaaagctgcctggaatgggagtttccagtggtagtactgcatgaagattcatgagactataaagctctttggaaaccccccaacttagcccttccaactttccttacatttttatggctttccaaaaaggttgcatgtaagggaaattatctaggtctgtgctgtttattcagcaaatagtttttgagcacctgttatgtgccaggcactgttcaaggcactagactaaactaaacttatcccaaaaaaccctctgccctcgtggagtttacgttcttatgttccagagaccctgtctg

SEQ ID NO: 300866 - DNA, 677 bp, Homo sapiens
tcctgcctcagcctcctgagtagctgggactacaggcgtgtgccaccacacccagccaatttttgtagttttagtagaaatggggtttcaccatgttggccaggatggtctcgatctcttgacctcgtgatccacctgcctcggcctcccaaagtactgggattacgcgtgagctactgcacccggctgagtgatttttttttttttttttttaagatagagaaagtccctcatactgaggagccttgcagttgagagagaacagaattccagttggaggatcaaggaatttgagggaggcagcatgcttgcagtgttcctaggatttttacaggaactacaatagaaagttagggatgaaattatattgaaaggggaaagctggactgctcaggtttggaggtcatggggaattccaggattcagtatgtggttgctctcttatttttaacttctgcttagcagtaaaaccacacccttccttcttcctgaaagtaatgtttaacttcctctccctgcagcattacactctatgtaatgggagtggggtggaggaagagtctcccaaggtggttggatctcactattctactggaagaggagcaggcaaatatatttttatgtggtataatgtcaggttgataccatctcagcagcgttgtacagcgacgcgatac

SEQ ID NO: 300867 - DNA, 781 bp, Homo sapiens
cttttgtctcatgtgttccatgatgaattaactgacttgagtaactagagtaggtcatggccaaacttaaatgttcagttctgcaccagtcagtttccttttgtcccatgttctctggaccacaacccttggccccagcagttctttccgagatatttcctctagtgtctcggtcttggtggcctcactgtggttagagaagcagccttgaataaagtgtgtgctttattcaaataaagtgaagtttgcagagggggttaggactgaagtgaacgtgcagggagacagtagggggacagcttggggaagacttccccagtgttggtttcagtaattttagcttctatgacagtgattttcctactgtcagagacagctcattaaagtgaaaattataaggaaaatgtcagtagacttagtcacatcatttcagtaaatattttttaaggatttattcaccatcccagctgctagagtgcaaagatgaatgaattaggtcttgtaggtcctgctaaggaattttgtctttattgtggggagccattgaaagttttcaaacgggtgacatgatcaactatgaagtctggcagggatgtggaagcaagataagatgtaagtgacatcttttatcatatagtccaaaacattaaataaaaataggtttaaaaatgaacactgatacaggagtctcagagaatatgctaagcataaagcataggtaacagaacatacacgctataatttcacttttgttgaaaaaaaataaactaaaagatgaaaa

SEQ ID NO: 300868 - DNA, 923 bp, Homo sapiens
agaatgcacctggcatcaacacggcggcggcggcggcggcttccaacaggctctggggcgccgagcggacaggaacgcagcacgggggctccgaggcggggtctgggtgttgaggggcgactggagccatggcggagtcggcgcctgctcgggtaaagaggcaccggcgcgctggctcgagggcgcgttggggatggcggagtcccctgccgggggcggggcttcgcggtttggacgccgccggggtcttggtttcccggggctgccgttggcgcgggtgaacgcggaccctcctcttcgcgaccccagtgctctgcccttttttccctccgcttccttctgcagcggggtcggagcctcggcgccgtgcgcccttgcccagaaacttctctgacgcttgctttagcacaggagaaaacgacgctccacacctttaacttcttccacacttccttcacaagcaacagagaaaagctcctattttcagaccaccgagatttcactctggacggtggtggccgctattcaggctgtggagaagaagatggagtcccaggctgcccggctacagagcctggaggggcgcacggggacagccgagaagaagctggctgactgcgagaagatggccgtggagttcgggaaccagctggagggcaagtgggccgtgctggggaccctgctgcaggagtatgggctactgcagaggcggctggagaacgtggagaacctgctgcgcaacaggaacttctggatcctgcggctgcccccgggcagcaagggggaggcccccaaggtgtccagtgtcattggagaaattgatggcggtctgtttccacgtagcaggactgggagaattctggacggcatggcagaatggaacctctaacagacacgttgatggacagtacactatgagaacc

SEQ ID NO: 300869 - DNA, 2814 bp, Homo sapiens
agaatgcacctggcatcaacacggcggcggcggcggcggcttccaacaggctctggggcgccgagcggacaggaacgcagcacgggggctccgaggcggggtctgggtgttgaggggcgactggagccatggcggagtcggcgcctgctcggcacaggagaaaacgacgctccacacctttaacttcttccacacttccttcacaagcaacagagaaaagctcctattttcagaccaccgagatttcactctggacggtggtggccgctattcaggctgtggagaagaagatggagtcccaggctgcccggctacagagcctggaggggcgcacggggacagccgagaagaagctggctgactgcgagaagatggccgtggagttcgggaaccagctggagggcaagtgggccgtgctggggaccctgctgcaggagtatgggctactgcagaggcggctggagaacgtggagaacctgctgcgcaacaggaacttctggatcctgcggctgcccccgggcagcaagggggaggcccccaaggtgtccaggtcactggagaatgatggcgtctgtttcaccgagcaggaatgggagaatctggaggattggcagaaggagctctacagaaacgtgatggagagtaactatgagacactggtctctctgaaggtccttggccagacagagggagaagcggagttgggtacagagatgctgggtgacttggaagaggaaggtcctggtggtgcccacccagcaggtggggtcatgatcaaacaggagctacagtatacacaggaaggccctgcggatcttcctggagagttctcatgcattgctgaagagcaggctttcctgagcccagagcagaccgaactctggggtggtcagggcagttctgtcctcttggaaacaggtcctggggactctactctagaggagcctgttggtagtagagttcctagcagcagcagaactgtgggctgcccgaagcagaaatctcataggcaggtacagctggaccaggaatgtgggcagggcctgaagctgaaaaaggacacttcccgcccctacgaatgttctgagtgtgagatcaccttccgctataagcagcagctggccacacatctgcgcagccactctgggtgggggtcttgtacacctgaggagccagaggagagccttaggcccaggccacggctgaaaccacagaccaaaaaggccaagctgcatcagtgtgatgtgtgcctgaggagcttcagctgcaaggtgagcctggtgacccatcagcgttgccacctgcaggaggggcccagtgccggccagcatgtccaagagaggttctcacccaacagcctggttgccctgcctggccacatcccttggaggaaaagccggagttccctcatctgtggttactgtggcaagagcttcagtcacccatctgacttggtgcggcaccagcgcatccacacgggtgagcggccctacagctgcactgagtgtgagaagagctttgtccagaagcagcacctcctgcagcaccagaagatccaccagcgggagcggggtgggctggccctggagcccggaaggcccaatggcctgctttaagggtgcagcccctcgcccgtctgggggatggaggggggtggcattggttcccccgaagagacactgcagtcagggactgagttcttcctgagggcagttgtttgtgattgccttcccttgtcccagtaccaagccaagcccaaaggctgtcctgaaaaccctgtggaagaagagtccaggccaggtcttcatcctgctgccaagtttgctgtttcttggcaccttcaggtctctggttttctcattcatgccaatgcttgtgggctggggttggcgttctgaccccacagggactggtggctggttccagggctcgtcccggcatttcatgtcttcccacggggttgagtcgggccataggggtgagcagctgcctggaagagttctgggaagtataaccctccattttttcttgttttataatctctttgtttaataataagtagaagaaataatttaaatgaactgcttagccctgctctgaagaaccttttttggaattagattttagttgattttttaaagaatacagcccaacacttgttttttacattttaagagttgtagaagttgttcctaacttggggactggacctaccctctaggagggagttgttaatggggctcttttagcccactgatgcttacttaggccggagagcaggggacacggtgctaggttccctcgtgcagtgcctggtgctctcaaattgtctcaaaaggaccaagaggaaaagagtcggaggggtagaccctgcagccctgttgagaagaaagattccagtgaagttgctgatggtatggctgtggtctgggacttgcggtgtctcggcatacccctctcctcttcccacctcctcctggctatgttctgcagcctcccagagtagaaaactactttgttacttaaggttgttcaccttgtaccagtggttatttgagtttgttcctattacaccaatccttacttgaggtggttcggattacagtttccaaatgcattctgggattgcctattccagagagggtacagaaaaagcacacagatggcttgtctcaggagtgttgaatgtgtgccccgctgctgtctggggggatgggagtgggctctggggtcatatgtgaacatccccttggatgatttgcggttgcttagaataaaacttgctactagcaaaagaaaaaaaaaaagttcata

SEQ ID NO: 300870 - DNA, 3274 bp, Homo sapiens
cttttgtctcatgtgttccatgatgaattaactgacttgagtaactagagtaggtcatggccaaacttaaatgttcagttctgcaccagtcagtttccttttgtcccatgttctctggaccacaacccttggccccagcagttctttccgagatatttcctctagtgtctcggtcttggtggcctcactgtggttagagaagcagccttgaataaagtgtgtgctttattcaaataaagtgaagtttgcagagggggttaggactgaagtgaacgtgcagggagacagtagggggacagcttggggaagacttccccagtgttggtttcagtaattttagcttctatgacagtgattttcctactgtcagagacagctcattaaagtgaaaattataaggaaaatgtcagtagacttagtcacatcatttcagtaaatattttttaaggatttattcaccatcccagctgctagagtgcaaagatgaatgaattaggtcttgtaggtcctgctaaggaattttgtctttattgtggggagccattgaaagttttcaaacgggtgacatgatcaactatgaagtctggcagggatgtggaagcaagataagatcacaggagaaaacgacgctccacacctttaacttcttccacacttccttcacaagcaacagagaaaagctcctattttcagaccaccgagatttcactctggacggtggtggccgctattcaggctgtggagaagaagatggagtcccaggctgcccggctacagagcctggaggggcgcacggggacagccgagaagaagctggctgactgcgagaagatggccgtggagttcgggaaccagctggagggcaagtgggccgtgctggggaccctgctgcaggagtatgggctactgcagaggcggctggagaacgtggagaacctgctgcgcaacaggaacttctggatcctgcggctgcccccgggcagcaagggggaggcccccaaggtgtccaggtcactggagaatgatggcgtctgtttcaccgagcaggaatgggagaatctggaggattggcagaaggagctctacagaaacgtgatggagagtaactatgagacactggtctctctgaaggtccttggccagacagagggagaagcggagttgggtacagagatgctgggtgacttggaagaggaaggtcctggtggtgcccacccagcaggtggggtcatgatcaaacaggagctacagtatacacaggaaggccctgcggatcttcctggagagttctcatgcattgctgaagagcaggctttcctgagcccagagcagaccgaactctggggtggtcagggcagttctgtcctcttggaaacaggtcctggggactctactctagaggagcctgttggtagtagagttcctagcagcagcagaactgtgggctgcccgaagcagaaatctcataggcaggtacagctggaccaggaatgtgggcagggcctgaagctgaaaaaggacacttcccgcccctacgaatgttctgagtgtgagatcaccttccgctataagcagcagctggccacacatctgcgcagccactctgggtgggggtcttgtacacctgaggagccagaggagagccttaggcccaggccacggctgaaaccacagaccaaaaaggccaagctgcatcagtgtgatgtgtgcctgaggagcttcagctgcaaggtgagcctggtgacccatcagcgttgccacctgcaggaggggcccagtgccggccagcatgtccaagagaggttctcacccaacagcctggttgccctgcctggccacatcccttggaggaaaagccggagttccctcatctgtggttactgtggcaagagcttcagtcacccatctgacttggtgcggcaccagcgcatccacacgggtgagcggccctacagctgcactgagtgtgagaagagctttgtccagaagcagcacctcctgcagcaccagaagatccaccagcgggagcggggtgggctggccctggagcccggaaggcccaatggcctgctttaagggtgcagcccctcgcccgtctgggggatggaggggggtggcattggttcccccgaagagacactgcagtcagggactgagttcttcctgagggcagttgtttgtgattgccttcccttgtcccagtaccaagccaagcccaaaggctgtcctgaaaaccctgtggaagaagagtccaggccaggtcttcatcctgctgccaagtttgctgtttcttggcaccttcaggtctctggttttctcattcatgccaatgcttgtgggctggggttggcgttctgaccccacagggactggtggctggttccagggctcgtcccggcatttcatgtcttcccacggggttgagtcgggccataggggtgagcagctgcctggaagagttctgggaagtataaccctccattttttcttgttttataatctctttgtttaataataagtagaagaaataatttaaatgaactgcttagccctgctctgaagaaccttttttggaattagattttagttgattttttaaagaatacagcccaacacttgttttttacattttaagagttgtagaagttgttcctaacttggggactggacctaccctctaggagggagttgttaatggggctcttttagcccactgatgcttacttaggccggagagcaggggacacggtgctaggttccctcgtgcagtgcctggtgctctcaaattgtctcaaaaggaccaagaggaaaagagtcggaggggtagaccctgcagccctgttgagaagaaagattccagtgaagttgctgatggtatggctgtggtctgggacttgcggtgtctcggcatacccctctcctcttcccacctcctcctggctatgttctgcagcctcccagagtagaaaactactttgttacttaaggttgttcaccttgtaccagtggttatttgagtttgttcctattacaccaatccttacttgaggtggttcggattacagtttccaaatgcattctgggattgcctattccagagagggtacagaaaaagcacacagatggcttgtctcaggagtgttgaatgtgtgccccgctgctgtctggggggatgggagtgggctctggggtcatatgtgaacatccccttggatgatttgcggttgcttagaataaaacttgctactagcaaaagaaaaaaaaaaagttcata

SEQ ID NO: 300871 - DNA, 3110 bp, Homo sapiens
caacctcctgggctcaaaccgtcctcccacctcagtgccccaagtacctgggactacaggcatgcatcaccatgcctggctaattttttgaacttttttgtagagacagggtttgccttgttggccaggctggtgtcaaactcctgagctaaagtgattcagctgccttggcctcccaaagtgctgggattacagttgtgagccaccacggccagccctaacagcttattgtgtgtgagaagattttgtgtaatattttctttctattcttcatcattttccaacattattaatacaatatctatgtataatttttagtatcaataaaagacatgcttttttttaattaaaagaaactagataactctgagcactgatacacttgaacactgctttctttacttgatgtttggaagtgacattgaccctgtgtctttaatccatcagccacaggagaaaacgacgctccacacctttaacttcttccacacttccttcacaagcaacagagaaaagctcctattttcagaccaccgagatttcactctggacggtggtggccgctattcaggctgtggagaagaagatggagtcccaggctgcccggctacagagcctggaggggcgcacggggacagccgagaagaagctggctgactgcgagaagatggccgtggagttcgggaaccagctggagggcaagtgggccgtgctggggaccctgctgcaggagtatgggctactgcagaggcggctggagaacgtggagaacctgctgcgcaacaggaacttctggatcctgcggctgcccccgggcagcaagggggaggcccccaaggtgtccaggtcactggagaatgatggcgtctgtttcaccgagcaggaatgggagaatctggaggattggcagaaggagctctacagaaacgtgatggagagtaactatgagacactggtctctctgaaggtccttggccagacagagggagaagcggagttgggtacagagatgctgggtgacttggaagaggaaggtcctggtggtgcccacccagcaggtggggtcatgatcaaacaggagctacagtatacacaggaaggccctgcggatcttcctggagagttctcatgcattgctgaagagcaggctttcctgagcccagagcagaccgaactctggggtggtcagggcagttctgtcctcttggaaacaggtcctggggactctactctagaggagcctgttggtagtagagttcctagcagcagcagaactgtgggctgcccgaagcagaaatctcataggcaggtacagctggaccaggaatgtgggcagggcctgaagctgaaaaaggacacttcccgcccctacgaatgttctgagtgtgagatcaccttccgctataagcagcagctggccacacatctgcgcagccactctgggtgggggtcttgtacacctgaggagccagaggagagccttaggcccaggccacggctgaaaccacagaccaaaaaggccaagctgcatcagtgtgatgtgtgcctgaggagcttcagctgcaaggtgagcctggtgacccatcagcgttgccacctgcaggaggggcccagtgccggccagcatgtccaagagaggttctcacccaacagcctggttgccctgcctggccacatcccttggaggaaaagccggagttccctcatctgtggttactgtggcaagagcttcagtcacccatctgacttggtgcggcaccagcgcatccacacgggtgagcggccctacagctgcactgagtgtgagaagagctttgtccagaagcagcacctcctgcagcaccagaagatccaccagcgggagcggggtgggctggccctggagcccggaaggcccaatggcctgctttaagggtgcagcccctcgcccgtctgggggatggaggggggtggcattggttcccccgaagagacactgcagtcagggactgagttcttcctgagggcagttgtttgtgattgccttcccttgtcccagtaccaagccaagcccaaaggctgtcctgaaaaccctgtggaagaagagtccaggccaggtcttcatcctgctgccaagtttgctgtttcttggcaccttcaggtctctggttttctcattcatgccaatgcttgtgggctggggttggcgttctgaccccacagggactggtggctggttccagggctcgtcccggcatttcatgtcttcccacggggttgagtcgggccataggggtgagcagctgcctggaagagttctgggaagtataaccctccattttttcttgttttataatctctttgtttaataataagtagaagaaataatttaaatgaactgcttagccctgctctgaagaaccttttttggaattagattttagttgattttttaaagaatacagcccaacacttgttttttacattttaagagttgtagaagttgttcctaacttggggactggacctaccctctaggagggagttgttaatggggctcttttagcccactgatgcttacttaggccggagagcaggggacacggtgctaggttccctcgtgcagtgcctggtgctctcaaattgtctcaaaaggaccaagaggaaaagagtcggaggggtagaccctgcagccctgttgagaagaaagattccagtgaagttgctgatggtatggctgtggtctgggacttgcggtgtctcggcatacccctctcctcttcccacctcctcctggctatgttctgcagcctcccagagtagaaaactactttgttacttaaggttgttcaccttgtaccagtggttatttgagtttgttcctattacaccaatccttacttgaggtggttcggattacagtttccaaatgcattctgggattgcctattccagagagggtacagaaaaagcacacagatggcttgtctcaggagtgttgaatgtgtgccccgctgctgtctggggggatgggagtgggctctggggtcatatgtgaacatccccttggatgatttgcggttgcttagaataaaacttgctactagcaaaagaaaaaaaaaaagttcata

SEQ ID NO: 300872 - DNA, 2244 bp, Homo sapiens
gggagatggaggcagagctggaggacgagaggaagcagcgctcgatggcagtggccgcccggaagaagctggagatggacctgaaggacctggaggcgcaggtccttggccagacagagggagaagcggagttgggtacagagatgctgggtgacttggaagaggaaggtcctggtggtgcccacccagcaggtggggtcatgatcaaacaggagctacagtatacacaggaaggccctgcggatcttcctggagagttctcatgcattgctgaagagcaggctttcctgagcccagagcagaccgaactctggggtggtcagggcagttctgtcctcttggaaacaggtcctggggactctactctagaggagcctgttggtagtagagttcctagcagcagcagaactgtgggctgcccgaagcagaaatctcataggcaggtacagctggaccaggaatgtgggcagggcctgaagctgaaaaaggacacttcccgcccctacgaatgttctgagtgtgagatcaccttccgctataagcagcagctggccacacatctgcgcagccactctgggtgggggtcttgtacacctgaggagccagaggagagccttaggcccaggccacggctgaaaccacagaccaaaaaggccaagctgcatcagtgtgatgtgtgcctgaggagcttcagctgcaaggtgagcctggtgacccatcagcgttgccacctgcaggaggggcccagtgccggccagcatgtccaagagaggttctcacccaacagcctggttgccctgcctggccacatcccttggaggaaaagccggagttccctcatctgtggttactgtggcaagagcttcagtcacccatctgacttggtgcggcaccagcgcatccacacgggtgagcggccctacagctgcactgagtgtgagaagagctttgtccagaagcagcacctcctgcagcaccagaagatccaccagcgggagcggggtgggctggccctggagcccggaaggcccaatggcctgctttaagggtgcagcccctcgcccgtctgggggatggaggggggtggcattggttcccccgaagagacactgcagtcagggactgagttcttcctgagggcagttgtttgtgattgccttcccttgtcccagtaccaagccaagcccaaaggctgtcctgaaaaccctgtggaagaagagtccaggccaggtcttcatcctgctgccaagtttgctgtttcttggcaccttcaggtctctggttttctcattcatgccaatgcttgtgggctggggttggcgttctgaccccacagggactggtggctggttccagggctcgtcccggcatttcatgtcttcccacggggttgagtcgggccataggggtgagcagctgcctggaagagttctgggaagtataaccctccattttttcttgttttataatctctttgtttaataataagtagaagaaataatttaaatgaactgcttagccctgctctgaagaaccttttttggaattagattttagttgattttttaaagaatacagcccaacacttgttttttacattttaagagttgtagaagttgttcctaacttggggactggacctaccctctaggagggagttgttaatggggctcttttagcccactgatgcttacttaggccggagagcaggggacacggtgctaggttccctcgtgcagtgcctggtgctctcaaattgtctcaaaaggaccaagaggaaaagagtcggaggggtagaccctgcagccctgttgagaagaaagattccagtgaagttgctgatggtatggctgtggtctgggacttgcggtgtctcggcatacccctctcctcttcccacctcctcctggctatgttctgcagcctcccagagtagaaaactactttgttacttaaggttgttcaccttgtaccagtggttatttgagtttgttcctattacaccaatccttacttgaggtggttcggattacagtttccaaatgcattctgggattgcctattccagagagggtacagaaaaagcacacagatggcttgtctcaggagtgttgaatgtgtgccccgctgctgtctggggggatgggagtgggctctggggtcatatgtgaacatccccttggatgatttgcggttgcttagaataaaacttgctactagcaaaagaaaaaaaaaaagttcata

SEQ ID NO: 300873 - DNA, 2760 bp, Homo sapiens
agaatgcacctggcatcaacacggcggcggcggcggcggcttccaacaggctctggggcgccgagcggacaggaacgcagcacgggggctccgaggcggggtctgggtgttgaggggcgactggagccatggcggagtcggcgcctgctcggcacaggagaaaacgacgctccacacctttaacttcttccacacttccttcacaagcaacagagaaaagctcctattttcagaccaccgagatttcactctggacggtggtggccgctattcaggctgtggagaagaagatggagtcccaggctgcccggctacagagcctggaggggcgcacggggacagccgagaagaagctggctgactgcgagaagatggccgtggagttcgggaaccagctggagggcaagtgggccgtgctggggaccctgctgcaggagtatgggctactgcagaggcggctggagaacgtggagaacctgctgcgcaacaggaacttctggatcctgcggctgcccccgggcagcaagggggaggcccccaaggtgtccaggtcactggagaatgatggcgtctgtttcaccgagcaggaatgggagaatctggaggattggcagaaggagctctacagaaacgtgatggagagtaactatgagacactggtctctctgaaggtccttggccagacagagggagaagcggagttgggtacagagatgctgggtgacttggaagaggaaggtcctggtggtgcccacccagcaggtggggtcatgatcaaacaggagctacagtatacacaggaaggccctgcggatcttcctggagagttctcatgcattgctgaagagcaggctttcctgagcccagagcagaccgaactctggggtggtcagggcagttctgtcctcttggaaacaggtcctggggactctactctagaggagcctgttggtagtagagttcctagcagcagcagaactgtgggctgcccgaagcagaaatctcataggcaggtacagctggaccaggaatgtgggcagggcctgaagctgaaaaaggacacttcccgcccctacgaatgttctgagtgtgagatcaccttccgctataagcagcagctggccacacatctgcgcagccactctgggtgggggtcttgtacacctgaggagccagaggagagccttaggcccaggccacggctgaaaccacagaccaaaaaggccaagctgcatcagtgtgatgtgtgcctgaggagcttcagctgcaaggtgagcctggtgacccatcagcgttgccacctgcaggaggggcccagtgccggccagcatgtccaagagaggttctcacccaacagcctggttgccctgcctggccacatcccttggaggaaaagccggagttccctcatctgtggttactgtggcaagagcttcagtcacccatctgacttggtgcggcaccagcgcatccacacgggtgagcggccctacagctgcactgagtgtgagaagagctttgtccagaagcagcacctcctgcagcaccagaagatccaccagcgggagcggggtgggctggccctggagcccggaaggcccaatggcctgctttaagggtgcagcccctcgcccgtctgggggatggaggggggtggcattggttcccccgaagagacactgcagtcagggactgagttcttcctgagggcagttgtttgtgattgccttcccttgtcccagtaccaagccaagcccaaaggctgtcctgaaaaccctgtggaagaagagtccaggccaggtcttcatcctgctgccaagtttgctgtttcttggcaccttcaggtctctggttttctcattcatgccaatgcttgtgggctggggttggcgttctgaccccacagggactggtggctggttccagggctcgtcccggcatttcatgtcttcccacggggttgagtcgggccataggggtgagcagctgcctggaagagttctgggaagtataaccctccattttttcttgttttataatctctttgtttaataataagtagaagaaataatttaaatgaactgcttagccctgctctgaagaaccttttttggaattagattttagttgattttttaaagaatacagcccaacacttgttttttacattttaagagttgtagaagttgttcctaacttggggactggacctaccctctaggagggagttgttaatggggctcttttagcccactgatgcttacttaggccggagagcaggggacacggtgctaggttccctcgtgcagtgcctggtgctctcaaattgtctcaaaaggaccaagaggaaaagagtcggaggggtagaccctgcagccctgttgagaagaaagattccagtgaagttgctgatggtatggctgtggtctgggacttgcggtgtctcggcatacccctctcctcttcccacctcctcctggctatgttctgcagcctcccagagtagtgttcctattacaccaatccttacttgaggtggttcggattacagtttccaaatgcattctgggattgcctattccagagagggtacagaaaaagcacacagatggcttgtctcaggagtgttgaatgtgtgccccgctgctgtctggggggatgggagtgggctctggggtcatatgtgaacatccccttggatgatttgcggttgcttagaataaaacttgctactagcaaaagaaaaaaaaaaagttcata

SEQ ID NO: 300874 - DNA, 897 bp, Homo sapiens
gaactatcatttacagtattgttttataagagtaatacatttatatttccaatcaacattggaaaaactgtacatgaatatagttttatagaagtcttggaacctagccagtgtcatcctcctccacgttatcctaattcacttattcctggggtgcttctgaaattcacagatgtttgtttggtcctgaagaaaccaaaggtactagaatgtgatcttttttgttggtcttcttccactttgcagcaggtggggtcatgatcaaacaggagctacagtatacacaggaaggccctgcggatcttcctggagagttctcatgcattgctgaagagcaggctttcctgagcccagagcagaccgaactctggggtggtcagggcagttctgtcctcttggaaacaggtcctggggactctactctagaggagcctgttggtagtagagttcctagcagcagcagaactgtgggctgcccgaagcagaaatctcataggcaggtacagctggaccaggaatgtgggcagggcctgaagctgaaaaaggacacttcccgcccctacgaatgttctgagtgtgagatcaccttccgctataagcagcagctggccacacatctgcgcagccactctgggtgggggtcttgtacacctgaggagccagaggagagccttaggcccaggccacggctgaaaccacagaccaaaaaggccaagctgcatcagtgtgatgtgtgcctgaggagcttcagctgcaaggtgagcctggtgacccatcagcgttgccacctgcaggaggggcccagtgccggccagcatgtccaagagaggttctcacccaacagcctggttgccctgcctggccacatcccttggaggaaaagccggagttccctca

SEQ ID NO: 300875 - DNA, 1330 bp, Homo sapiens
ttctcttcattaaatagtatttaacaaacatttaaggaccttctattggctagctaacacttgcatggaactctctcactatgttgcccaaactggccttgaactcctaggctcaagcaatcctcctaagcatcaaggactacaggtgcatgctagctaccacacccagctgtaatcaccttttgattttgtctgctagtgccagaggcatatgcataatgtgaattcatcaaactgcaaataaaaatgtttgagtccttttttaatatgtggatctctctggtactgtttttagataaataaaagagtagcctagaagaatacataaatcaaaaactgaccaattcagaattaaatgagatagtcccagcttgaattaataccagtctttaaaaaaataaatgtgagtttttacttttaattataaaaggtaatctaaattaccttaaactaaggtaattgccaagaccagttatggtagatttacttttataaatataataattgtaaaataaatattgtttataagcaaatagatgcagctaaagtcctttttaaaggctcacagaaagctttccaaagatgattaaatattctctaaaatactatttgtttagcacaccatttattttgaaaaacaggacaaaagaaaactcaatcagcccgtgtttgattcactttgaatttcaaattgaagaattccaaataaaactttattacctctcagtttaactatggtttgtctaatagttcattttaggacaaaatggggagtaaacttctccaactctgaggtgaaatacaccatcttcatgaccaaacacggtgaatcacgttgccatttttcattcttcacatctctcctgtcttaacctcctttccacttccagctgtgcttggtttttgtgtatttttgtaataggatgaatgttgttttcattttctttctcagaggtgcaaaatgcaggagcagagagtgtggattctcagccaggtccttggcacgcctcctcaggcaaggatgtgcctgagtgcaaaactcagtagactcctctttgtcacttctctggagatccagcattccttatttggaaatgactttgtttatgtgtctatccctggtaatgatgttgtagtgcagcttaatttcaattcagtctttactttgccactagagttgaaagataagggaacaggaaatgaatgcattgtggtaatttagaatggtgatagcaataccttcttcttgcatatggtaatacttttaaaagttgaattgttttatttatttgtatattttgtaaagaataaagttattgaaagaaatgta

SEQ ID NO: 300876 - DNA, 1637 bp, Homo sapiens
ttctcttcattaaatagtatttaacaaacatttaaggaccttctattggctagctaacacttgcatggaactctctcactatgttgcccaaactggccttgaactcctaggctcaagcaatcctcctaagcatcaaggactacaggtgcatgctagctaccacacccagctgtaatcaccttttgattttgtctgctagtgccagaggcatatgcataatgtgaattcatcaaactgcaaataaaaatgtttgagtccttttttaatatgtggatctctctggtactgtttttagataaataaaagagtagcctagaagaatacataaatcaaaaactgaccaattcagaattaaatgagatagtcccagcttgaattaataccagtctttaaaaaaataaatgtgagtttttacttttaattataaaaggtaatctaaattaccttaaactaaggtaattgccaagaccagttatggtagatttacttttataaatataataattgtaaaataaatattgtttataagcaaatagatgcagctaaagtcctttttaaaggctcacagaaagctttccaaagatgattaaatattctctaaaatactatttgtttagcacaccatttattttgaaaaacaggacaaaagaaaactcaatcagcccgtgtttgattcactttgaatttcaaattgaagaattccaaataaaactttattacctctcagtttaactatggtttgtctaatagttcattttaggacaaaatggggagtaaacttctccaactctgaggtgaaatacaccatcttcatgaccaaacacggtgaatcacgttgccatttttcattcttcacatctctcctgtcttaacctcctttccacttccagctgtgcttggtttttgtgtatttttgtaataggatgaatgttgttttcattttctttctcagaggtgcaaaatgcaggagcagagagtgtggattctcagccaggtccttggcacgcctcctcaggcaaggatgtgcctgagtgcaaaactcagtagactcctctttgtcacttctctggagatccagcattccttatttggaaatgactttgtttatgtgtctatccctggtaatgatgttgtagtgcagcttaatttcaattcagtctttactttgccacttacacattcaataaatgtttagtagttctgaaaaaaagctcttctatataatgttaatggtttcttggtgaggtagtctctcttgttgactcagtattttgctatgaaaatatacacaagttttctggatctggatttaaattcttaaaggatagcagaggctatgtcctcttaactttccagttctaatattccttttactgtaataaccacagaagttctttctcacatttctggtaacctacctatcccaatccctatacaaactctctaaattggttggtttattatagactttgtttttcattgcccctcactcccagcctggaggaacctatagatcatttattctacctcttcattgtagacataaggaaacagtaccagagtttttatcaaagtaaagttttctaaacctggagtccccacagatagataaagcatatatggatagacttcttgta

SEQ ID NO: 300877 - DNA, 8926 bp, Homo sapiens
taaatttaaaggcggggcggcctgtgagccctgaagtgccggccgcggagggtcctggccattttggtgggaccagttcagcctgataggatggcggaggaaggagccgtggccgtctgcgtgcgagtgcggccgctgaacagcagagaagaatcacttggagaaactgcccaagtttactggaaaactgacaataatgtcatttatcaagttgatggaagtaaatccttcaattttgatcgtgtctttcatggtaatgaaactaccaaaaatgtgtatgaagaaatagcagcaccaatcatcgattctgccatacaaggctacaatggtactatatttgcctatggacagactgcttcaggaaaaacatataccatgatgggttcagaagatcatttgggagttatacccagggcaattcatgacattttccaaaaaattaagaagtttcctgatagggaatttctcttacgtgtatcttacatggaaatatacaatgaaaccattacagatttactctgtggcactcaaaaaatgaaacctttaattattcgagaagatgtcaataggaatgtgtatgttgctgatctcacagaagaagttgtatatacatcagaaatggctttgaaatggattacaaagggagaaaagagcaggcattatggagaaacaaaaatgaatcaaagaagcagtcgttctcataccatctttaggatgattttggaaagcagagagaagggtgaaccttctaattgtgaaggatctgttaaggtatcccatttgaatttggttgatcttgcaggcagtgaaagagctgctcaaacaggcgctgcaggtgtgcggctcaaggaaggctgtaatataaatcgaagcttatttattttgggacaagtgatcaagaaacttagtgatggacaagttggtggtttcataaattatcgagatagcaagttaacacgaattctccagaattccttgggaggaaatgcaaagacacgtattatctgcacaattactccagtatcttttgatgaaacacttactgctctccagtttgccagtactgctaaatatatgaagaatactccttatgttaatgaggtatcaactgatgaagctctcctgaaaaggtatagaaaagaaataatggatcttaaaaaacaattagaggaggtttctttagagacgcgggctcaggcaatggaaaaagaccaattggcccaacttttggaagaaaaagatttgcttcagaaagtacagaatgagaaaattgaaaacttaacacggatgctggtgacctcttcttccctcacgttgcaacaggaattaaaggctaaaagaaaacgaagagttacttggtgccttggcaaaattaacaaaatgaagaactcaaactatgcagatcaatttaatataccaacaaatataacaacaaaaacacataagctttctataaatttattacgagaaattgatgaatctgtctgttcagagtctgatgttttcagtaacactcttgatacattaagtgagatagaatggaatccagcaacaaagctactaaatcaggagaatatagaaagtgagttgaactcacttcgtgctgactatgataatctggtattagactatgaacaactacgaacagaaaaagaagaaatggaattgaaattaaaagaaaagaatgatttggatgaatttgaggctctagaaagaaaaactaaaaaagatcaagagatgcaactaattcatgaaatttcgaacttaaagaatttagttaagcatcgagaagtatataatcaagatcttgagaatgaactcagttcaaaagtagagctgcttagagaaaaggaagaccagattaagaagctacaggaatacatagactctcaaaagctagaaaatataaaaatggacttgtcatactcattggaaagcattgaagacccaaaacaaatgaagcagactctgtttgatgctgaaactgtagcccttgatgccaagagagaatcagcctttcttagaagtgaaaatctggagttgaaggagaaaatgaaagaacttgcaactacatacaagcaaatggaaaatgatattcagttatatcaaagccaattggaggcaaaaaagaaaatgcaagttgatctggagaaagaattacaatctgcttttaatgagataacaaaactcacctcccttatagatggcaaagttccaaaagatttgctctgtaatttggaattggaaggaaagattactgatcttcagaaagaactaaataaagaagttgaagaaaatgaagctttgcgggaagaagtcattttgctttcagaattgaaatctttaccttctgaagtagaaaggctgaggaaagagatacaagacaaatctgaagagctccatataataacatcagaaaaagataaattgttttctgaagtagttcataaggagagtagagttcaaggtttacttgaagaaattgggaaaacaaaagatgacctagcaactacacagtcgaattataaaagcactgatcaagaattccaaaatttcaaaacccttcatatggactttgagcaaaagtataagatggtccttgaggagaatgagagaatgaatcaggaaatagttaatctctctaaagaagcccaaaaatttgattcgagtttgggtgctttgaagaccgagctttcttacaagacccaagaacttcaggagaaaacacgtgaggttcaagaaagactaaatgagatggaacagctgaaggaacaattagaaaatagagattctccgctgcaaactgtagaaagggagaaaacactgattactgagaaactgcagcaaactttagaagaagtaaaaactttaactcaagaaaaagatgatctaaaacaactccaagaaagcttgcaaattgagagggaccaactcaaaagtgatattcacgatactgttaacatgaatatagatactcaagaacaattacgaaatgctcttgagtctctgaaacaacatcaagaaacaattaatacactaaaatcgaaaatttctgaggaagtttccaggaatttgcatatggaggaaaatacaggagaaactaaagatgaatttcagcaaaagatggttggcatagataaaaaacaggatttggaagctaaaaatacccaaacactaactgcagatgttaaggataatgagataattgagcaacaaaggaagatattttctttaatacaggagaaaaatgaactccaacaaatgttagagagtgttatagcagaaaaggaacaattgaagactgacctaaaggaaaatattgaaatgaccattgaaaaccaggaagaattaagacttcttggggatgaacttaaaaagcaacaagagatagttgcacaagaaaagaaccatgccataaagaaagaaggagagctttctaggacctgtgacagactggcagaagttgaagaaaaactaaaggaaaagagccagcaactccaagaaaaacagcaacaacttcttaatgtacaagaagagatgagtgagatgcagaaaaagattaatgaaatagagaatttaaagaatgaattaaagaacaaagaattgacattggaacatatggaaacagagaggcttgagttggctcagaaacttaatgaaaattatgaggaagtgaaatctataaccaaagaaagaaaagttctaaaggaattacagaagtcatttgaaacagagagagaccaccttagaggatatataagagaaattgaagctacaggcctacaaaccaaagaagaactaaaaattgctcatattcacctaaaagaacaccaagaaactattgatgaactaagaagaagcgtatctgagaagacagctcaaataataaatactcaggacttagaaaaatcccataccaaattacaagaagagatcccagtgcttcatgaggaacaagagttactgcctaatgtgaaaaaagtcagtgagactcaggaaacaatgaatgaactggagttattaacagaacagtccacaaccaaggactcaacaacactggcaagaatagaaatggaaaggctcaggttgaatgaaaaatttcaagaaagtcaggaagagataaaatctctaaccaaggaaagagacaaccttaaaacgataaaagaagcccttgaagttaaacatgaccagctgaaagaacatattagagaaactttggctaaaatccaggagtctcaaagcaaacaagaacagtccttaaatatgaaagaaaaagacaatgaaactaccaaaatcgtgagtgagatggagcaattcaaacccaaagattcagcactactaaggatagaaatagaaatgctcggattgtccaaaagacttcaagaaagtcatgatgaaatgaaatctgtagctaaggagaaagatgacctacagaggctgcaagaagttcttcaatctgaaagtgaccagctcaaagaaaacataaaagaaattgtagctaaacacctggaaactgaagaggaacttaaagttgctcattgttgcctgaaagaacaagaggaaactattaatgagttaagagtgaatctttcagagaaggaaactgaaatatcaaccattcaaaagcagttagaagcaatcaatgataaattacagaacaagatccaagagatttatgagaaagaggaacaatttaatataaaacaaattagtgaggttcaggaaaaagtgaatgaactgaaacaattcaaggagcatcgcaaagccaaggattcagcactacaaagtatagaaagtaagatgctcgagttgaccaacagacttcaagaaagtcaagaagaaatacaaattatgattaaggaaaaagaggaaatgaaaagagtacaggaggcccttcagatagagagagaccaactgaaagaaaacactaaagaaattgtagctaaaatgaaagaatctcaagaaaaagaatatcagtttcttaagatgacagctgtcaatgagactcaggagaaaatgtgtgaaatagaacacttgaaggagcaatttgagacccagaagttaaacctggaaaacatagaaacggagaatataaggttgactcagatactacatgaaaaccttgaagaaatgagatctgtaacaaaagaaagagatgaccttaggagtgtggaggagactctcaaagtagagagagaccagctcaaggaaaaccttagagaaactataactagagacctagaaaaacaagaggagctaaaaattgttcacatgcatctgaaggagcaccaagaaactattgataaactaagagggattgtttcagagaaaacaaatgaaatatcaaatatgcaaaaggacttagaacactcaaatgatgccttaaaagcacaggatctgaaaatacaagaggaactaagaattgctcacatgcatctgaaagagcagcaggaaactattgacaaactcagaggaattgtttctgagaagacagataaactatcaaatatgcaaaaagatttagaaaattcaaatgctaaattacaagaaaagattcaagaacttaaggcaaatgaacatcaacttattacgttaaaaaaagatgtcaatgagacacagaaaaaagtgtctgaaatggagcaactaaagaaacaaataaaagaccaaagcttaactctgagtaaattagaaatagagaatttaaatttggctcagaaacttcatgaaaaccttgaagaaatgaaatctgtaatgaaagaaagagataatctaagaagagtagaggagacactcaaactggagagagaccaactcaaggaaagcctgcaagaaaccaaagctagagatctggaaatacaacaggaactaaaaactgctcgtatgctatcaaaagaacacaaagaaactgttgataaacttagagaaaaaatttcagaaaagacaattcaaatttcagacattcaaaaggatttagataaatcaaaagatgaattacagaaaaagatccaagaacttcagaaaaaagaacttcaactgcttagagtgaaagaagatgtcaatatgagtcataaaaaaattaatgaaatggaacagttgaagaagcaatttgagccaaactatctatgcaagtgtgagatggataacttccagttgactaagaaacttcatgaaagccttgaagaaataagaattgtagctaaagaaagagatgagctaaggaggataaaagaatctctcaaaatggaaagggaccaattcatagcaaccttaagggaaatgatagctagagaccgacagaaccaccaagtaaaacctgaaaaaaggttactaagtgatggacaacagcaccttatggaaagcctgagagaaaagtgctctagaataaaagagcttttgaagagatactcagagatggatgatcattatgagtgcttgaatagattgtctcttgacttggagaaggaaattgaattccaaaaagagctttcaatgaaacaagtatgtgttaagctatgttacaaaaataaaagaagaacaacatgaatgcatcaataaatttgaaatggattttattgatgaagtggaaaagcaaaaggaattgctaattaaaatacagcaccttcaacaagattgtgatgtaccatccagagaattaagggatctcaaattgaaccagaatatggatctacatattgaggaaattctcaaagatttctcagaaagtgagttccctagcataaagactgaatttcaacaagtactaagtaataggaaagaaatgacacagtttttggaagagtggttaaatactcgttttgatatagaaaagcttaaaaatggcatccagaaagaaaatgataggatttgtcaagtgaataacttctttaataacagaataattgccataatgaatgaatcaacagagtttgaggaaagaagtgctaccatatccaaagagtgggaacaggacctgaaatcactgaaagagaaaaatgaaaaactatttaaaaactaccaaacattgaagacttccttggcatctggtgcccaggttaatcctaccacacaagacaataagaatcctcatgttacatcaagagctacacagttaaccacagagaaaattcgagagctggaaaattcactgcatgaagctaaagaaagtgctatgcataaggaaagcaagattataaagatgcagaaagaacttgaggtgactaatgacataatagcaaaacttcaagccaaagttcatgaatcaaataaatgccttgaaaaaacaaaagagacaattcaagtacttcaggacaaagttgctttaggagctaagccatataaagaagaaattgaagatctcaaaatgaagcttgtgaaaatagacctagagaaaatgaaaaatgccaaagaatttgaaaaggaaatcagtgctacaaaagccactgtagaatatcaaaaggaagttataaggctattgagagaaaatctcagaagaagtcaacaggcccaagatacctcagtgatatcagaacatactgatcctcagccttcaaataaacccttaacttgtggaggtggcagcggcattgtacaaaacacaaaagctcttattttgaaaagtgaacatataaggctagaaaaagaaatttctaagttaaagcagcaaaatgaacagctaataaaacaaaagaatgaattgttaagcaataatcagcatctttccaatgaggtcaaaacttggaaggaaagaacccttaaaagagaggctcacaaacaagtaacttgtgagaattctccaaagtctcctaaagtgactggaacagcttctaaaaagaaacaaattacaccctctcaatgcaaggaacggaatttacaagatcctgtgccaaaggaatcaccaaaatcttgtttttttgatagccgatcaaagtctttaccatcacctcatccagttcgctattttgataactcaagtttaggcctttgtccagaggtgcaaaatgcaggagcagagagtgtggattctcagccaggtccttggcacgcctcctcaggcaaggatgtgcctgagtgcaaaactcagtagactcctctttgtcacttctctggagatccagcattccttatttggaaatgactttgtttatgtgtctatccctggtaatgatgttgtagtgcagcttaatttcaattcagtctttactttgccactagagttgaaagataagggaacaggaaatgaatgcattgtggtaatttagaatggtgatagcaataccttcttcttgcatatggtaatacttttaaaagttgaattgttttatttatttgtatattttgtaaagaataaagttattgaaagaaatgtaaagttatctacatgacttagcatattccaaagcataatacatacattaatataaaacatcattttattaacaaaattgtaaatgtttttaataccttacacattcaataaatgtttagtagttctgaaaaaaagctcttctatataatgttaatggtttcttggtgaggtagtctctcttgttgactcagtattttgctatgaaaatatacacaagttttctggatctggatttaaattcttaaaggatagcagaggctatgtcctcttaactttccagttctaatattccttttactgtaataaccacagaagttctttctcacatttctggtaacctacctatcccaatccctatacaaactctctaaattggttggtttattatagactttgtttttcattgcccctcactcccagcctggaggaacctatagatcatttattctacctcttcattgtagacataaggaaacagtaccagagtttttatcaaagtaaagttttctaaacctggagtccccacagatagataaagcatatatggatagacttcttgta

SEQ ID NO: 300878 - DNA, 8366 bp, Homo sapiens
taaatttaaaggcggggcggcctgtgagccctgaagtgccggccgcggagggtcctggccattttggtgggaccagttcagcctgataggatggcggaggaaggagccgtggccgtctgcgtgcgagtgcggccgctgaacagcagagaagaatcacttggagaaactgcccaagtttactggaaaactgacaataatgtcatttatcaagttgatggaagtaaatccttcaattttgatcgtgtctttcatggtaatgaaactaccaaaaatgtgtatgaagaaatagcagcaccaatcatcgattctgccatacaaggctacaatggtactatatttgcctatggacagactgcttcaggaaaaacatataccatgatgggttcagaagatcatttgggagttatacccagggcaattcatgacattttccaaaaaattaagaagtttcctgatagggaatttctcttacgtgtatcttacatggaaatatacaatgaaaccattacagatttactctgtggcactcaaaaaatgaaacctttaattattcgagaagatgtcaataggaatgtgtatgttgctgatctcacagaagaagttgtatatacatcagaaatggctttgaaatggattacaaagggagaaaagagcaggcattatggagaaacaaaaatgaatcaaagaagcagtcgttctcataccatctttaggatgattttggaaagcagagagaagggtgaaccttctaattgtgaaggatctgttaaggtatcccatttgaatttggttgatcttgcaggcagtgaaagagctgctcaaacaggcgctgcaggtgtgcggctcaaggaaggctgtaatataaatcgaagcttatttattttgggacaagtgatcaagaaacttagtgatggacaagttggtggtttcataaattatcgagatagcaagttaacacgaattctccagaattccttgggaggaaatgcaaagacacgtattatctgcacaattactccagtatcttttgatgaaacacttactgctctccagtttgccagtactgctaaatatatgaagaatactccttatgttaatgaggtatcaactgatgaagctctcctgaaaaggtatagaaaagaaataatggatcttaaaaaacaattagaggaggtttctttagagacgcgggctcaggcaatggaaaaagaccaattggcccaacttttggaagaaaaagatttgcttcagaaagtacagaatgagaaaattgaaaacttaacacggatgctggtgacctcttcttccctcacgttgcaacaggaattaaaggctaaaagaaaacgaagagttacttggtgccttggcaaaattaacaaaatgaagaactcaaactatgcagatcaatttaatataccaacaaatataacaacaaaaacacataagctttctataaatttattacgagaaattgatgaatctgtctgttcagagtctgatgttttcagtaacactcttgatacattaagtgagatagaatggaatccagcaacaaagctactaaatcaggagaatatagaaagtgagttgaactcacttcgtgctgactatgataatctggtattagactatgaacaactacgaacagaaaaagaagaaatggaattgaaattaaaagaaaagaatgatttggatgaatttgaggctctagaaagaaaaactaaaaaagatcaagagatgcaactaattcatgaaatttcgaacttaaagaatttagttaagcatcgagaagtatataatcaagatcttgagaatgaactcagttcaaaagtagagctgcttagagaaaaggaagaccagattaagaagctacaggaatacatagactctcaaaagctagaaaatataaaaatggacttgtcatactcattggaaagcattgaagacccaaaacaaatgaagcagactctgtttgatgctgaaactgtagcccttgatgccaagagagaatcagcctttcttagaagtgaaaatctggagttgaaggagaaaatgaaagaacttgcaactacatacaagcaaatggaaaatgatattcagttatatcaaagccaattggaggcaaaaaagaaaatgcaagttgatctggagaaagaattacaatctgcttttaatgagataacaaaactcacctcccttatagatggcaaagttccaaaagatttgctctgtaatttggaattggaaggaaagattactgatcttcagaaagaactaaataaagaagttgaagaaaatgaagctttgcgggaagaagtcattttgctttcagaattgaaatctttaccttctgaagtagaaaggctgaggaaagagatacaagacaaatctgaagagctccatataataacatcagaaaaagataaattgttttctgaagtagttcataaggagagtagagttcaaggtttacttgaagaaattgggaaaacaaaagatgacctagcaactacacagtcgaattataaaagcactgatcaagaattccaaaatttcaaaacccttcatatggactttgagcaaaagtataagatggtccttgaggagaatgagagaatgaatcaggaaatagttaatctctctaaagaagcccaaaaatttgattcgagtttgggtgctttgaagaccgagctttcttacaagacccaagaacttcaggagaaaacacgtgaggttcaagaaagactaaatgagatggaacagctgaaggaacaattagaaaatagagattctccgctgcaaactgtagaaagggagaaaacactgattactgagaaactgcagcaaactttagaagaagtaaaaactttaactcaagaaaaagatgatctaaaacaactccaagaaagcttgcaaattgagagggaccaactcaaaagtgatattcacgatactgttaacatgaatatagatactcaagaacaattacgaaatgctcttgagtctctgaaacaacatcaagaaacaattaatacactaaaatcgaaaatttctgaggaagtttccaggaatttgcatatggaggaaaatacaggagaaactaaagatgaatttcagcaaaagatggttggcatagataaaaaacaggatttggaagctaaaaatacccaaacactaactgcagatgttaaggataatgagataattgagcaacaaaggaagatattttctttaatacaggagaaaaatgaactccaacaaatgttagagagtgttatagcagaaaaggaacaattgaagactgacctaaaggaaaatattgaaatgaccattgaaaaccaggaagaattaagacttcttggggatgaacttaaaaagcaacaagagatagttgcacaagaaaagaaccatgccataaagaaagaaggagagctttctaggacctgtgacagactggcagaagttgaagaaaaactaaaggaaaagagccagcaactccaagaaaaacagcaacaacttcttaatgtacaagaagagatgagtgagatgcagaaaaagattaatgaaatagagaatttaaagaatgaattaaagaacaaagaattgacattggaacatatggaaacagagaggcttgagttggctcagaaacttaatgaaaattatgaggaagtgaaatctataaccaaagaaagaaaagttctaaaggaattacagaagtcatttgaaacagagagagaccaccttagaggatatataagagaaattgaagctacaggcctacaaaccaaagaagaactaaaaattgctcatattcacctaaaagaacaccaagaaactattgatgaactaagaagaagcgtatctgagaagacagctcaaataataaatactcaggacttagaaaaatcccataccaaattacaagaagagatcccagtgcttcatgaggaacaagagttactgcctaatgtgaaaaaagtcagtgagactcaggaaacaatgaatgaactggagttattaacagaacagtccacaaccaaggactcaacaacactggcaagaatagaaatggaaaggctcaggttgaatgaaaaatttcaagaaagtcaggaagagataaaatctctaaccaaggaaagagacaaccttaaaacgataaaagaagcccttgaagttaaacatgaccagctgaaagaacatattagagaaactttggctaaaatccaggagtctcaaagcaaacaagaacagtccttaaatatgaaagaaaaagacaatgaaactaccaaaatcgtgagtgagatggagcaattcaaacccaaagattcagcactactaaggatagaaatagaaatgctcggattgtccaaaagacttcaagaaagtcatgatgaaatgaaatctgtagctaaggagaaagatgacctacagaggctgcaagaagttcttcaatctgaaagtgaccagctcaaagaaaacataaaagaaattgtagctaaacacctggaaactgaagaggaacttaaagttgctcattgttgcctgaaagaacaagaggaaactattaatgagttaagagtgaatctttcagagaaggaaactgaaatatcaaccattcaaaagcagttagaagcaatcaatgataaattacagaacaagatccaagagatttatgagaaagaggaacaatttaatataaaacaaattagtgaggttcaggaaaaagtgaatgaactgaaacaattcaaggagcatcgcaaagccaaggattcagcactacaaagtatagaaagtaagatgctcgagttgaccaacagacttcaagaaagtcaagaagaaatacaaattatgattaaggaaaaagaggaaatgaaaagagtacaggaggcccttcagatagagagagaccaactgaaagaaaacactaaagaaattgtagctaaaatgaaagaatctcaagaaaaagaatatcagtttcttaagatgacagctgtcaatgagactcaggagaaaatgtgtgaaatagaacacttgaaggagcaatttgagacccagaagttaaacctggaaaacatagaaacggagaatataaggttgactcagatactacatgaaaaccttgaagaaatgagatctgtaacaaaagaaagagatgaccttaggagtgtggaggagactctcaaagtagagagagaccagctcaaggaaaaccttagagaaactataactagagacctagaaaaacaagaggagctaaaaattgttcacatgcatctgaaggagcaccaagaaactattgataaactaagagggattgtttcagagaaaacaaatgaaatatcaaatatgcaaaaggacttagaacactcaaatgatgccttaaaagcacaggatctgaaaatacaagaggaactaagaattgctcacatgcatctgaaagagcagcaggaaactattgacaaactcagaggaattgtttctgagaagacagataaactatcaaatatgcaaaaagatttagaaaattcaaatgctaaattacaagaaaagattcaagaacttaaggcaaatgaacatcaacttattacgttaaaaaaagatgtcaatgagacacagaaaaaagtgtctgaaatggagcaactaaagaaacaaataaaagaccaaagcttaactctgagtaaattagaaatagagaatttaaatttggctcagaaacttcatgaaaaccttgaagaaatgaaatctgtaatgaaagaaagagataatctaagaagagtagaggagacactcaaactggagagagaccaactcaaggaaagcctgcaagaaaccaaagctagagatctggaaatacaacaggaactaaaaactgctcgtatgctatcaaaagaacacaaagaaactgttgataaacttagagaaaaaatttcagaaaagacaattcaaatttcagacattcaaaaggatttagataaatcaaaagatgaattacagaaaaagatccaagaacttcagaaaaaagaacttcaactgcttagagtgaaagaagatgtcaatatgagtcataaaaaaattaatgaaatggaacagttgaagaagcaatttgagccaaactatctatgcaagtgtgagatggataacttccagttgactaagaaacttcatgaaagccttgaagaaataagaattgtagctaaagaaagagatgagctaaggaggataaaagaatctctcaaaatggaaagggaccaattcatagcaaccttaagggaaatgatagctagagaccgacagaaccaccaagtaaaacctgaaaaaaggttactaagtgatggacaacagcaccttatggaaagcctgagagaaaagtgctctagaataaaagagcttttgaagagatactcagagatggatgatcattatgagtgcttgaatagattgtctcttgacttggagaaggaaattgaattccaaaaagagctttcaatgaaacaagtatgtgttaagctatgttacaaaaataaaagaagaacaacatgaatgcatcaataaatttgaaatggattttattgatgaagtggaaaagcaaaaggaattgctaattaaaatacagcaccttcaacaagattgtgatgtaccatccagagaattaagggatctcaaattgaaccagaatatggatctacatattgaggaaattctcaaagatttctcagaaagtgagttccctagcataaagactgaatttcaacaagtactaagtaataggaaagaaatgacacagtttttggaagagtggttaaatactcgttttgatatagaaaagcttaaaaatggcatccagaaagaaaatgataggatttgtcaagtgaataacttctttaataacagaataattgccataatgaatgaatcaacagagtttgaggaaagaagtgctaccatatccaaagagtgggaacaggacctgaaatcactgaaagagaaaaatgaaaaactatttaaaaactaccaaacattgaagacttccttggcatctggtgcccaggttaatcctaccacacaagacaataagaatcctcatgttacatcaagagctacacagttaaccacagagaaaattcgagagctggaaaattcactgcatgaagctaaagaaagtgctatgcataaggaaagcaagattataaagatgcagaaagaacttgaggtgactaatgacataatagcaaaacttcaagccaaagttcatgaatcaaataaatgccttgaaaaaacaaaagagacaattcaagtacttcaggacaaagttgctttaggagctaagccatataaagaagaaattgaagatctcaaaatgaagcttgtgaaaatagacctagagaaaatgaaaaatgccaaagaatttgaaaaggaaatcagtgctacaaaagccactgtagaatatcaaaaggaagttataaggctattgagagaaaatctcagaagaagtcaacaggcccaagatacctcagtgatatcagaacatactgatcctcagccttcaaataaacccttaacttgtggaggtggcagcggcattgtacaaaacacaaaagctcttattttgaaaagtgaacatataaggctagaaaaagaaatttctaagttaaagcagcaaaatgaacagctaataaaacaaaagaatgaattgttaagcaataatcagcatctttccaatgaggtcaaaacttggaaggaaagaacccttaaaagagaggctcacaaacaagtaacttgtgagaattctccaaagtctcctaaagtgactggaacagcttctaaaaagaaacaaattacaccctctcaatgcaaggaacggaatttacaagatcctgtgccaaaggaatcaccaaaatcttgtttttttgatagccgatcaaagtctttaccatcacctcatccagttcgctattttgataactcaagtttaggcctttgtccagaggtgcaaaatgcaggagcagagagtgtggattctcagccaggtccttggcacgcctcctcaggcaaggatgtgcctgagtgcaaaactcagtagactcctctttgtcacttctctggagatccagcattccttatttggaaatgactttgtttatgtgtctatccctggtaatgatgttgtagtgcagcttaatttcaattcagtctttactttgccactagagttgaaagataagggaacaggaaatgaatgcattgtggtaatttagaatggtgatagcaataccttcttcttgcatatggtaatacttttaaaagttgaattgttttatttatttgtatattttgtaaagaataaagttattgaaagaaatgta

SEQ ID NO: 300879 - DNA, 8623 bp, Homo sapiens
taaatttaaaggcggggcggcctgtgagccctgaagtgccggccgcggagggtcctggccattttggtgggaccagttcagcctgataggatggcggaggaaggagccgtggccgtctgcgtgcgagtgcggccgctgaacagcagagaagaatcacttggagaaactgcccaagtttactggaaaactgacaataatgtcatttatcaagttgatggaagtaaatccttcaattttgatcgtgtctttcatggtaatgaaactaccaaaaatgtgtatgaagaaatagcagcaccaatcatcgattctgccatacaaggctacaatggtactatatttgcctatggacagactgcttcaggaaaaacatataccatgatgggttcagaagatcatttgggagttatacccagggcaattcatgacattttccaaaaaattaagaagtttcctgatagggaatttctcttacgtgtatcttacatggaaatatacaatgaaaccattacagatttactctgtggcactcaaaaaatgaaacctttaattattcgagaagatgtcaataggaatgtgtatgttgctgatctcacagaagaagttgtatatacatcagaaatggctttgaaatggattacaaagggagaaaagagcaggcattatggagaaacaaaaatgaatcaaagaagcagtcgttctcataccatctttaggatgattttggaaagcagagagaagggtgaaccttctaattgtgaaggatctgttaaggtatcccatttgaatttggttgatcttgcaggcagtgaaagagctgctcaaacaggcgctgcaggtgtgcggctcaaggaaggctgtaatataaatcgaagcttatttattttgggacaagtgatcaagaaacttagtgatggacaagttggtggtttcataaattatcgagatagcaagttaacacgaattctccagaattccttgggaggaaatgcaaagacacgtattatctgcacaattactccagtatcttttgatgaaacacttactgctctccagtttgccagtactgctaaatatatgaagaatactccttatgttaatgaggtatcaactgatgaagctctcctgaaaaggtatagaaaagaaataatggatcttaaaaaacaattagaggaggtttctttagagacgcgggctcaggcaatggaaaaagaccaattggcccaacttttggaagaaaaagatttgcttcagaaagtacagaatgagaaaattgaaaacttaacacggatgctggtgacctcttcttccctcacgttgcaacaggaattaaaggctaaaagaaaacgaagagttacttggtgccttggcaaaattaacaaaatgaagaactcaaactatgcagatcaatttaatataccaacaaatataacaacaaaaacacataagctttctataaatttattacgagaaattgatgaatctgtctgttcagagtctgatgttttcagtaacactcttgatacattaagtgagatagaatggaatccagcaacaaagctactaaatcaggagaatatagaaagtgagttgaactcacttcgtgctgactatgataatctggtattagactatgaacaactacgaacagaaaaagaagaaatggaattgaaattaaaagaaaagaatgatttggatgaatttgaggctctagaaagaaaaactaaaaaagatcaagagaatgaactcagttcaaaagtagagctgcttagagaaaaggaagaccagattaagaagctacaggaatacatagactctcaaaagctagaaaatataaaaatggacttgtcatactcattggaaagcattgaagacccaaaacaaatgaagcagactctgtttgatgctgaaactgtagcccttgatgccaagagagaatcagcctttcttagaagtgaaaatctggagttgaaggagaaaatgaaagaacttgcaactacatacaagcaaatggaaaatgatattcagttatatcaaagccaattggaggcaaaaaagaaaatgcaagttgatctggagaaagaattacaatctgcttttaatgagataacaaaactcacctcccttatagatggcaaagttccaaaagatttgctctgtaatttggaattggaaggaaagattactgatcttcagaaagaactaaataaagaagttgaagaaaatgaagctttgcgggaagaagtcattttgctttcagaattgaaatctttaccttctgaagtagaaaggctgaggaaagagatacaagacaaatctgaagagctccatataataacatcagaaaaagataaattgttttctgaagtagttcataaggagagtagagttcaaggtttacttgaagaaattgggaaaacaaaagatgacctagcaactacacagtcgaattataaaagcactgatcaagaattccaaaatttcaaaacccttcatatggactttgagcaaaagtataagatggtccttgaggagaatgagagaatgaatcaggaaatagttaatctctctaaagaagcccaaaaatttgattcgagtttgggtgctttgaagaccgagctttcttacaagacccaagaacttcaggagaaaacacgtgaggttcaagaaagactaaatgagatggaacagctgaaggaacaattagaaaatagagattctccgctgcaaactgtagaaagggagaaaacactgattactgagaaactgcagcaaactttagaagaagtaaaaactttaactcaagaaaaagatgatctaaaacaactccaagaaagcttgcaaattgagagggaccaactcaaaagtgatattcacgatactgttaacatgaatatagatactcaagaacaattacgaaatgctcttgagtctctgaaacaacatcaagaaacaattaatacactaaaatcgaaaatttctgaggaagtttccaggaatttgcatatggaggaaaatacaggagaaactaaagatgaatttcagcaaaagatggttggcatagataaaaaacaggatttggaagctaaaaatacccaaacactaactgcagatgttaaggataatgagataattgagcaacaaaggaagatattttctttaatacaggagaaaaatgaactccaacaaatgttagagagtgttatagcagaaaaggaacaattgaagactgacctaaaggaaaatattgaaatgaccattgaaaaccaggaagaattaagacttcttggggatgaacttaaaaagcaacaagagatagttgcacaagaaaagaaccatgccataaagaaagaaggagagctttctaggacctgtgacagactggcagaagttgaagaaaaactaaaggaaaagagccagcaactccaagaaaaacagcaacaacttcttaatgtacaagaagagatgagtgagatgcagaaaaagattaatgaaatagagaatttaaagaatgaattaaagaacaaagaattgacattggaacatatggaaacagagaggcttgagttggctcagaaacttaatgaaaattatgaggaagtgaaatctataaccaaagaaagaaaagttctaaaggaattacagaagtcatttgaaacagagagagaccaccttagaggatatataagagaaattgaagctacaggcctacaaaccaaagaagaactaaaaattgctcatattcacctaaaagaacaccaagaaactattgatgaactaagaagaagcgtatctgagaagacagctcaaataataaatactcaggacttagaaaaatcccataccaaattacaagaagagatcccagtgcttcatgaggaacaagagttactgcctaatgtgaaaaaagtcagtgagactcaggaaacaatgaatgaactggagttattaacagaacagtccacaaccaaggactcaacaacactggcaagaatagaaatggaaaggctcaggttgaatgaaaaatttcaagaaagtcaggaagagataaaatctctaaccaaggaaagagacaaccttaaaacgataaaagaagcccttgaagttaaacatgaccagctgaaagaacatattagagaaactttggctaaaatccaggagtctcaaagcaaacaagaacagtccttaaatatgaaagaaaaagacaatgaaactaccaaaatcgtgagtgagatggagcaattcaaacccaaagattcagcactactaaggatagaaatagaaatgctcggattgtccaaaagacttcaagaaagtcatgatgaaatgaaatctgtagctaaggagaaagatgacctacagaggctgcaagaagttcttcaatctgaaagtgaccagctcaaagaaaacataaaagaaattgtagctaaacacctggaaactgaagaggaacttaaagttgctcattgttgcctgaaagaacaagaggaaactattaatgagttaagagtgaatctttcagagaaggaaactgaaatatcaaccattcaaaagcagttagaagcaatcaatgataaattacagaacaagatccaagagatttatgagaaagaggaacaatttaatataaaacaaattagtgaggttcaggaaaaagtgaatgaactgaaacaattcaaggagcatcgcaaagccaaggattcagcactacaaagtatagaaagtaagatgctcgagttgaccaacagacttcaagaaagtcaagaagaaatacaaattatgattaaggaaaaagaggaaatgaaaagagtacaggaggcccttcagatagagagagaccaactgaaagaaaacactaaagaaattgtagctaaaatgaaagaatctcaagaaaaagaatatcagtttcttaagatgacagctgtcaatgagactcaggagaaaatgtgtgaaatagaacacttgaaggagcaatttgagacccagaagttaaacctggaaaacatagaaacggagaatataaggttgactcagatactacatgaaaaccttgaagaaatgagatctgtaacaaaagaaagagatgaccttaggagtgtggaggagactctcaaagtagagagagaccagctcaaggaaaaccttagagaaactataactagagacctagaaaaacaagaggagctaaaaattgttcacatgcatctgaaggagcaccaagaaactattgataaactaagagggattgtttcagagaaaacaaatgaaatatcaaatatgcaaaaggacttagaacactcaaatgatgccttaaaagcacaggatctgaaaatacaagaggaactaagaattgctcacatgcatctgaaagagcagcaggaaactattgacaaactcagaggaattgtttctgagaagacagataaactatcaaatatgcaaaaagatttagaaaattcaaatgctaaattacaagaaaagattcaagaacttaaggcaaatgaacatcaacttattacgttaaaaaaagatgtcaatgagacacagaaaaaagtgtctgaaatggagcaactaaagaaacaaataaaagaccaaagcttaactctgagtaaattagaaatagagaatttaaatttggctcagaaacttcatgaaaaccttgaagaaatgaaatctgtaatgaaagaaagagataatctaagaagagtagaggagacactcaaactggagagagaccaactcaaggaaagcctgcaagaaaccaaagctagagatctggaaatacaacaggaactaaaaactgctcgtatgctatcaaaagaacacaaagaaactgttgataaacttagagaaaaaatttcagaaaagacaattcaaatttcagacattcaaaaggatttagataaatcaaaagatgaattacagaaaaaggaccgacagaaccaccaagtaaaacctgaaaaaaggttactaagtgatggacaacagcaccttatggaaagcctgagagaaaagtgctctagaataaaagagcttttgaagagatactcagagatggatgatcattatgagtgcttgaatagattgtctcttgacttggagaaggaaattgaattccaaaaagagctttcaatgaaagttaaagcaaacctctcacttccctatttacaaaccaaacacattgaaaaactttttactgcaaaccagagatgctccatggaattccacagaatcatgaagaaactgaagcaagtatgtgttaagctatgttacaaaaataatggaaaagcaaaaggaattgctaattaaaatacagcaccttcaacaagattgtgatgtaccatccagagaattaagggatctcaaattgaaccagaatatggatctacatattgaggaaattctcaaagatttctcagaaagtgagttccctagcataaagactgaatttcaacaagtactaagtaataggaaagaaatgacacagtttttggaagagtggttaaatactcgttttgatatagaaaagcttaaaaatggcatccagaaagaaaatgataggatttgtcaagtgaataacttctttaataacagaataattgccataatgaatgaatcaacagagtttgaggaaagaagtgctaccatatccaaagagtgggaacaggacctgaaatcactgaaagagaaaaatgaaaaactatttaaaaactaccaaacattgaagacttccttggcatctggtgcccaggttaatcctaccacacaagacaataagaatcctcatgttacatcaagagctacacagttaaccacagagaaaattcgagagctggaaaattcactgcatgaagctaaagaaagtgctatgcataaggaaagcaagattataaagatgcagaaagaacttgaggtgactaatgacataatagcaaaacttcaagccaaagttcatgaatcaaataaatgccttgaaaaaacaaaagagacaattcaagtacttcaggacaaagttgctttaggagctaagccatataaagaagaaattgaagatctcaaaatgaagcttgtgaaaatagacctagagaaaatgaaaaatgccaaagaatttgaaaaggaaatcagtgctacaaaagccactgtagaatatcaaaaggaagttataaggctattgagagaaaatctcagaagaagtcaacaggcccaagatacctcagtgatatcagaacatactgatcctcagccttcaaataaacccttaacttgtggaggtggcagcggcattgtacaaaacacaaaagctcttattttgaaaagtgaacatataaggctagaaaaagaaatttctaagttaaagcagcaaaatgaacagctaataaaacaaaagaatgaattgttaagcaataatcagcatctttccaatgaggtcaaaacttggaaggaaagaacccttaaaagagaggctcacaaacaagtaacttgtgagaattctccaaagtctcctaaagtgactggaacagcttctaaaaagaaacaaattacaccctctcaatgcaaggaacggaatttacaagatcctgtgccaaaggaatcaccaaaatcttgtttttttgatagccgatcaaagtctttaccatcacctcatccagttcgctattttgataactcaagtttaggcctttgtccagaggtgcaaaatgcaggagcagagagtgtggattctcagccaggtccttggcacgcctcctcaggcaaggatgtgcctgagtgcaaaactcagtagactcctctttgtcacttctctggagatccagcattccttatttggaaatgactttgtttatgtgtctatccctggtaatgatgttgtagtgcagcttaatttcaattcagtctttactttgccactagagttgaaagataagggaacaggaaatgaatgcattgtggtaatttagaatggtgatagcaataccttcttcttgcatatggtaatacttttaaaagttgaattgttttatttatttgtatattttgtaaagaataaagttattgaaagaaatgtaaagttatctacatgacttagcatattccaaagcataatacatacattaatataaaacatcattttattaacaaaattgtaaatgtttttaataccttacacattcaataaatgtttagtagttctgaaaaaaagctcttctatataatgttaatggtttcttggtgaggtagtctctcttgttgactcagtattttgctatgaaaatatacacaagttttctggatctggatttaaattcttaaaggatagcagaggctatgtcctcttaactttccagttctaatattccttttactgtaataaccacagaagttctttctcacatttctggtaacctacctatcccaatccctatacaaactctctaaattggttggtttattatagactttgtttttcattgcccctcactcccagcctggaggaacctatagatcatttattctacctcttcattgtagacataaggaaacagtaccagagtttttatcaaagtaaagttttctaaacctggagtccccacagatagataaagcatatatggatagacttcttgta

SEQ ID NO: 300880 - DNA, 4295 bp, Homo sapiens
atattattataaaccctaaatatttggaaaggggagttaattacaacaaaatagttataatgtttctataaatttattggaatttcctctaataataaagcacctggaaactgaagaggaacttaaagttgctcattgttgcctgaaagaacaagaggaaactattaatgagttaagagtgaatctttcagagaaggaaactgaaatatcaaccattcaaaagcagttagaagcaatcaatgataaattacagaacaagatccaagagatttatgagaaagaggaacaatttaatataaaacaaattagtgaggttcaggaaaaagtgaatgaactgaaacaattcaaggagcatcgcaaagccaaggattcagcactacaaagtatagaaagtaagatgctcgagttgaccaacagacttcaagaaagtcaagaagaaatacaaattatgattaaggaaaaagaggaaatgaaaagagtacaggaggcccttcagatagagagagaccaactgaaagaaaacactaaagaaattgtagctaaaatgaaagaatctcaagaaaaagaatatcagtttcttaagatgacagctgtcaatgagactcaggagaaaatgtgtgaaatagaacacttgaaggagcaatttgagacccagaagttaaacctggaaaacatagaaacggagaatataaggttgactcagatactacatgaaaaccttgaagaaatgagatctgtaacaaaagaaagagatgaccttaggagtgtggaggagactctcaaagtagagagagaccagctcaaggaaaaccttagagaaactataactagagacctagaaaaacaagaggagctaaaaattgttcacatgcatctgaaggagcaccaagaaactattgataaactaagagggattgtttcagagaaaacaaatgaaatatcaaatatgcaaaaggacttagaacactcaaatgatgccttaaaagcacaggatctgaaaatacaagaggaactaagaattgctcacatgcatctgaaagagcagcaggaaactattgacaaactcagaggaattgtttctgagaagacagataaactatcaaatatgcaaaaagatttagaaaattcaaatgctaaattacaagaaaagattcaagaacttaaggcaaatgaacatcaacttattacgttaaaaaaagatgtcaatgagacacagaaaaaagtgtctgaaatggagcaactaaagaaacaaataaaagaccaaagcttaactctgagtaaattagaaatagagaatttaaatttggctcagaaacttcatgaaaaccttgaagaaatgaaatctgtaatgaaagaaagagataatctaagaagagtagaggagacactcaaactggagagagaccaactcaaggaaagcctgcaagaaaccaaagctagagatctggaaatacaacaggaactaaaaactgctcgtatgctatcaaaagaacacaaagaaactgttgataaacttagagaaaaaatttcagaaaagacaattcaaatttcagacattcaaaaggatttagataaatcaaaagatgaattacagaaaaaggaccgacagaaccaccaagtaaaacctgaaaaaaggttactaagtgatggacaacagcaccttatggaaagcctgagagaaaagtgctctagaataaaagagcttttgaagagatactcagagatggatgatcattatgagtgcttgaatagattgtctcttgacttggagaaggaaattgaattccaaaaagagctttcaatgaaagttaaagcaaacctctcacttccctatttacaaaccaaacacattgaaaaactttttactgcaaaccagagatgctccatggaattccacagaatcatgaagaaactgaagcaagtatgtgttaagctatgttacaaaaataatggaaaagcaaaaggaattgctaattaaaatacagcaccttcaacaagattgtgatgtaccatccagagaattaagggatctcaaattgaaccagaatatggatctacatattgaggaaattctcaaagatttctcagaaagtgagttccctagcataaagactgaatttcaacaagtactaagtaataggaaagaaatgacacagtttttggaagagtggttaaatactcgttttgatatagaaaagcttaaaaatggcatccagaaagaaaatgataggatttgtcaagtgaataacttctttaataacagaataattgccataatgaatgaatcaacagagtttgaggaaagaagtgctaccatatccaaagagtgggaacaggacctgaaatcactgaaagagaaaaatgaaaaactatttaaaaactaccaaacattgaagacttccttggcatctggtgcccaggttaatcctaccacacaagacaataagaatcctcatgttacatcaagagctacacagttaaccacagagaaaattcgagagctggaaaattcactgcatgaagctaaagaaagtgctatgcataaggaaagcaagattataaagatgcagaaagaacttgaggtgactaatgacataatagcaaaacttcaagccaaagttcatgaatcaaataaatgccttgaaaaaacaaaagagacaattcaagtacttcaggacaaagttgctttaggagctaagccatataaagaagaaattgaagatctcaaaatgaagcttgtgaaaatagacctagagaaaatgaaaaatgccaaagaatttgaaaaggaaatcagtgctacaaaagccactgtagaatatcaaaaggaagttataaggctattgagagaaaatctcagaagaagtcaacaggcccaagatacctcagtgatatcagaacatactgatcctcagccttcaaataaacccttaacttgtggaggtggcagcggcattgtacaaaacacaaaagctcttattttgaaaagtgaacatataaggctagaaaaagaaatttctaagttaaagcagcaaaatgaacagctaataaaacaaaagaatgaattgttaagcaataatcagcatctttccaatgaggtcaaaacttggaaggaaagaacccttaaaagagaggctcacaaacaagtaacttgtgagaattctccaaagtctcctaaagtgactggaacagcttctaaaaagaaacaaattacaccctctcaatgcaaggaacggaatttacaagatcctgtgccaaaggaatcaccaaaatcttgtttttttgatagccgatcaaagtctttaccatcacctcatccagttcgctattttgataactcaagtttaggcctttgtccagaggtgcaaaatgcaggagcagagagtgtggattctcagccaggtccttggcacgcctcctcaggcaaggatgtgcctgagtgcaaaactcagtagactcctctttgtcacttctctggagatccagcattccttatttggaaatgactttgtttatgtgtctatccctggtaatgatgttgtagtgcagcttaatttcaattcagtctttactttgccactagagttgaaagataagggaacaggaaatgaatgcattgtggtaatttagaatggtgatagcaataccttcttcttgcatatggtaatacttttaaaagttgaattgttttatttatttgtatattttgtaaagaataaagttattgaaagaaatgtaaagttatctacatgacttagcatattccaaagcataatacatacattaatataaaacatcattttattaacaaaattgtaaatgtttttaataccttacacattcaataaatgtttagtagttctgaaaaaaagctcttctatataatgttaatggtttcttggtgaggtagtctctcttgttgactcagtattttgctatgaaaatatacacaagttttctggatctggatttaaattcttaaaggatagcagaggctatgtcctcttaactttccagttctaatattccttttactgtaataaccacagaagttctttctcacatttctggtaacctacctatcccaatccctatacaaactctctaaattggttggtttattatagactttgtttttcattgcccctcactcccagcctggaggaacctatagatcatttattctacctcttcattgtagacataaggaaacagtaccagagtttttatcaaagtaaagttttctaaacctggagtccccacagatagataaagcatatatggatagacttcttgta

SEQ ID NO: 300881 - DNA, 7327 bp, Homo sapiens
taaatttaaaggcggggcggcctgtgagccctgaagtgccggccgcggagggtcctggccattttggtgggaccagttcagcctgataggatggcggaggaaggagccgtggccgtctgcgtgcgagtgcggccgctgaacagcagagaagaatcacttggagaaactgcccaagtttactggaaaactgacaataatgtcatttatcaagttgatggaagtaaatccttcaattttgatcgtgtctttcatggtaatgaaactaccaaaaatgtgtatgaagaaatagcagcaccaatcatcgattctgccatacaaggctacaatggtactatatttgcctatggacagactgcttcaggaaaaacatataccatgatgggttcagaagatcatttgggagttatacccagggcaattcatgacattttccaaaaaattaagaagtttcctgatagggaatttctcttacgtgtatcttacatggaaatatacaatgaaaccattacagatttactctgtggcactcaaaaaatgaaacctttaattattcgagaagatgtcaataggaatgtgtatgttgctgatctcacagaagaagttgtatatacatcagaaatggctttgaaatggattacaaagggagaaaagagcaggcattatggagaaacaaaaatgaatcaaagaagcagtcgttctcataccatctttaggatgattttggaaagcagagagaagggtgaaccttctaattgtgaaggatctgttaaggtatcccatttgaatttggttgatcttgcaggcagtgaaagagctgctcaaacaggcgctgcaggtgtgcggctcaaggaaggctgtaatataaatcgaagcttatttattttgggacaagtgatcaagaaacttagtgatggacaagttggtggtttcataaattatcgagatagcaagttaacacgaattctccagaattccttgggaggaaatgcaaagacacgtattatctgcacaattactccagtatcttttgatgaaacacttactgctctccagtttgccagtactgctaaatatatgaagaatactccttatgttaatgaggtatcaactgatgaagctctcctgaaaaggtatagaaaagaaataatggatcttaaaaaacaattagaggaggtttctttagagacgcgggctcaggcaatggaaaaagaccaattggcccaacttttggaagaaaaagatttgcttcagaaagtacagaatgagaaaattgaaaacttaacacggatgctggtgacctcttcttccctcacgttgcaacaggaattaaaggctaaaagaaaacgaagagttacttggtgccttggcaaaattaacaaaatgaagaactcaaactatgcagatcaatttaatataccaacaaatataacaacaaaaacacataagctttctataaatttattacgagaaattgatgaatctgtctgttcagagtctgatgttttcagtaacactcttgatacattaagtgagatagaatggaatccagcaacaaagctactaaatcaggagaatatagaaagtgagttgaactcacttcgtgctgactatgataatctggtattagactatgaacaactacgaacagaaaaagaagaaatggaattgaaattaaaagaaaagaatgatttggatgaatttgaggctctagaaagaaaaactaaaaaagatcaagagaatgaactcagttcaaaagtagagctgcttagagaaaaggaagaccagattaagaagctacaggaatacatagactctcaaaagctagaaaatataaaaatggacttgtcatactcattggaaagcattgaagacccaaaacaaatgaagcagactctgtttgatgctgaaactgtagcccttgatgccaagagagaatcagcctttcttagaagtgaaaatctggagttgaaggagaaaatgaaagaacttgcaactacatacaagcaaatggaaaatgatattcagttatatcaaagccaattggaggcaaaaaagaaaatgcaagttgatctggagaaagaattacaatctgcttttaatgagataacaaaactcacctcccttatagatggcaaagttccaaaagatttgctctgtaatttggaattggaaggaaagattactgatcttcagaaagaactaaataaagaagttgaagaaaatgaagctttgcgggaagaagtcattttgctttcagaattgaaatctttaccttctgaagtagaaaggctgaggaaagagatacaagacaaatctgaagagctccatataataacatcagaaaaagataaattgttttctgaagtagttcataaggagagtagagttcaaggtttacttgaagaaattgggaaaacaaaagatgacctagcaactacacagtcgaattataaaagcactgatcaagaattccaaaatttcaaaacccttcatatggactttgagcaaaagtataagatggtccttgaggagaatgagagaatgaatcaggaaatagttaatctctctaaagaagcccaaaaatttgattcgagtttgggtgctttgaagaccgagctttcttacaagacccaagaacttcaggagaaaacacgtgaggttcaagaaagactaaatgagatggaacagctgaaggaacaattagaaaatagagattctccgctgcaaactgtagaaagggagaaaacactgattactgagaaactgcagcaaactttagaagaagtaaaaactttaactcaagaaaaagatgatctaaaacaactccaagaaagcttgcaaattgagagggaccaactcaaaagtgatattcacgatactgttaacatgaatatagatactcaagaacaattacgaaatgctcttgagtctctgaaacaacatcaagaaacaattaatacactaaaatcgaaaatttctgaggaagtttccaggaatttgcatatggaggaaaatacaggagaaactaaagatgaatttcagcaaaagatggttggcatagataaaaaacaggatttggaagctaaaaatacccaaacactaactgcagatgttaaggataatgagataattgagcaacaaaggaagatattttctttaatacaggagaaaaatgaactccaacaaatgttagagagtgttatagcagaaaaggaacaattgaagactgacctaaaggaaaatattgaaatgaccattgaaaaccaggaagaattaagacttcttggggatgaacttaaaaagcaacaagagatagttgcacaagaaaagaaccatgccataaagaaagaaggagagctttctaggacctgtgacagactggcagaagttgaagaaaaactaaaggaaaagagccagcaactccaagaaaaacagcaacaacttcttaatgtacaagaagagatgagtgagatgcagaaaaagattaatgaaatagagaatttaaagaatgaattaaagaacaaagaattgacattggaacatatggaaacagagaggcttgagttggctcagaaacttaatgaaaattatgaggaagtgaaatctataaccaaagaaagaaaagttctaaaggaattacagaagtcatttgaaacagagagagaccaccttagaggatatataagagaaattgaagctacaggcctacaaaccaaagaagaactaaaaattgctcatattcacctaaaagaacaccaagaaactattgatgaactaagaagaagcgtatctgagaagacagctcaaataataaatactcaggacttagaaaaatcccataccaaattacaagaagagatcccagtgcttcatgaggaacaagagttactgcctaatgtgaaaaaagtcagtgagactcaggaaacaatgaatgaactggagttattaacagaacagtccacaaccaaggactcaacaacactggcaagaatagaaatggaaaggctcaggttgaatgaaaaatttcaagaaagtcaggaagagataaaatctctaaccaaggaaagagacaaccttaaaacgataaaagaagcccttgaagttaaacatgaccagctgaaagaacatattagagaaactttggctaaaatccaggagtctcaaagcaaacaagaacagtccttaaatatgaaagaaaaagacaatgaaactaccaaaatcgtgagtgagatggagcaattcaaacccaaagattcagcactactaaggatagaaatagaaatgctcggattgtccaaaagacttcaagaaagtcatgatgaaatgaaatctgtagctaaggagaaagatgacctacagaggctgcaagaagttcttcaatctgaaagtgaccagctcaaagaaaacataaaagaaattgtagctaaacacctggaaactgaagaggaacttaaagttgctcattgttgcctgaaagaacaagaggaaactattaatgagttaagagtgaatctttcagagaaggaaactgaaatatcaaccattcaaaagcagttagaagcaatcaatgataaattacagaacaagatccaagagatttatgagaaagaggaacaatttaatataaaacaaattagtgaggttcaggaaaaagtgaatgaactgaaacaattcaaggagcatcgcaaagccaaggattcagcactacaaagtatagaaagtaagatgctcgagttgaccaacagacttcaagaaagtcaagaagaaatacaaattatgattaaggaaaaagaggaaatgaaaagagtacaggaggcccttcagatagagagagaccaactgaaagaaaacactaaagaaattgtagctaaaatgaaagaatctcaagaaaaagaatatcagtttcttaagatgacagctgtcaatgagactcaggagaaaatgtgtgaaatagaacacttgaaggagcaatttgagacccagaagttaaacctggaaaacatagaaacggagaatataaggttgactcagatactacatgaaaaccttgaagaaatgagatctgtaacaaaagaaagagatgaccttaggagtgtggaggagactctcaaagtagagagagaccagctcaaggaaaaccttagagaaactataactagagacctagaaaaacaagaggagctaaaaattgttcacatgcatctgaaggagcaccaagaaactattgataaactaagagggattgtttcagagaaaacaaatgaaatatcaaatatgcaaaaggacttagaacactcaaatgatgccttaaaagcacaggatctgaaaatacaagaggaactaagaattgctcacatgcatctgaaagagcagcaggaaactattgacaaactcagaggaattgtttctgagaagacagataaactatcaaatatgcaaaaagatttagaaaattcaaatgctaaattacaagaaaagattcaagaacttaaggcaaatgaacatcaacttattacgttaaaaaaagatgtcaatgagacacagaaaaaagtgtctgaaatggagcaactaaagaaacaaataaaagaccaaagcttaactctgagtaaattagaaatagagaatttaaatttggctcagaaacttcatgaaaaccttgaagaaatgaaatctgtaatgaaagaaagagataatctaagaagagtagaggagacactcaaactggagagagaccaactcaaggaaagcctgcaagaaaccaaagctagagatctggaaatacaacaggaactaaaaactgctcgtatgctatcaaaagaacacaaagaaactgttgataaacttagagaaaaaatttcagaaaagacaattcaaatttcagacattcaaaaggatttagataaatcaaaagatgaattacagaaaaaggaccgacagaaccaccaagtaaaacctgaaaaaaggttactaagtgatggacaacagcaccttatggaaagcctgagagaaaagtgctctagaataaaagagcttttgaagagatactcagagatggatgatcattatgagtgcttgaatagattgtctcttgacttggagaaggaaattgaattccaaaaagagctttcaatgaaagttaaagcaaacctctcacttccctatttacaaaccaaacacattgaaaaactttttactgcaaaccagagatgctccatggaattccacagaatcatgaagaaactgaagcaagtatgtgttaagctatgttacaaaaataatggaaaagcaaaaggaattgctaattaaaatacagcaccttcaacaagattgtgatgtaccatccagagaattaagggatctcaaattgaaccagaatatggatctacatattgaggaaattctcaaagatttctcagaaagtgagttccctagcataaagactgaatttcaacaagtactaagtaataggaaagaaatgacacagtttttggaagagtggttaaatactcgttttgatatagaaaagcttaaaaatggcatccagaaagaaaatgataggatttgtcaagtgaataacttctttaataacagaataattgccataatgaatgaatcaacagagtttgaggaaagaagtgctaccatatccaaagagtgggaacaggacctgaaatcactgaaagagaaaaatgaaaaactatttaaaaactaccaaacattgaagacttccttggcatctggtgcccaggttaatcctaccacacaagacaataagaatcctcatgttacatcaagagctacacagttaaccacagagaaaattcgagagctggaaaattcactgcatgaagctaaagaaagtgctatgcataaggaaagcaagattataaagatgcagaaagaacttgaggtgactaatgacataatagcaaaacttcaagccaaagttcatgaatcaaataaatgccttgaaaaaacaaaagagacaattcaagtacttcaggacaaagttgctttaggagctaagccatataaagaagaaattgaagatctcaaaatgaagcttgtgaaaatagacctagagaaaatgaaaaatgccaaagaatttgaaaaggagtacgtatttgtcttaatttaatgtgattttaatagcttaaattttcttcctaaactacatatacttttcattagttaactttttaaaatataatttatgaaaatattgttacagctctttttttaaaaatgtacacatccatagattttaaatatactggtctcattacatatgcaaagtttttaaaactaaacacaattctgatcaatt

SEQ ID NO: 300882 - DNA, 1890 bp, Homo sapiens
ttctcttcattaaatagtatttaacaaacatttaaggaccttctattggctagctaacacttgcatggaactctctcactatgttgcccaaactggccttgaactcctaggctcaagcaatcctcctaagcatcaaggactacaggtgcatgctagctaccacacccagctgtaatcaccttttgattttgtctgctagtgccagaggcatatgcataatgtgaattcatcaaactgcaaataaaaatgtttgagtccttttttaatatgtggatctctctggtactgtttttagataaataaaagagtagcctagaagaatacataaatcaaaaactgaccaattcagaattaaatgagatagtcccagcttgaattaataccagtctttaaaaaaataaatgtgagtttttacttttaattataaaaggtaatctaaattaccttaaactaaggtaattgccaagaccagttatggtagatttacttttataaatataataattgtaaaataaatattgtttataagcaaatagatgcagctaaagtcctttttaaaggctcacagaaagctttccaaagatgattaaatattctctaaaatactatttgtttagcacaccatttattttgaaaaacaggacaaaagaaaactcaatcagcccgtgtttgattcactttgaatttcaaattgaagaattccaaataaaactttattacctctcagtttaactatggtttgtctaatagttcattttaggacaaaatggggagtaaacttctccaactctgaggtgaaatacaccatcttcatgaccaaacacggtgaatcacgttgccatttttcattcttcacatctctcctgtcttaacctcctttccacttccagctgtgcttggtttttgtgtatttttgtaataggatgaatgttgttttcattttctttctcagaggtgcaaaatgcaggagcagagagtgtggattctcagccaggtccttggcacgcctcctcaggcaaggatgtgcctgagtgcaaaactcagtagactcctctttgtcacttctctggagatccagcattccttatttggaaatgactttgtttatgtgtctatccctggtaatgatgttgtagtgcagcttaatttcaattcagtctttactttgccactagagttgaaagataagggaacaggaaatgaatgcattgtggtaatttagaatggtgatagcaataccttcttcttgcatatggtaatacttttaaaagttgaattgttttatttatttgtatattttgtaaagaataaagttattgaaagaaatgtaaagttatctacatgacttagcatattccaaagcataatacatacattaatataaaacatcattttattaacaaaattgtaaatgtttttaataccttacacattcaataaatgtttagtagttctgaaaaaaagctcttctatataatgttaatggtttcttggtgaggtagtctctcttgttgactcagtattttgctatgaaaatatacacaagttttctggatctggatttaaattcttaaaggatagcagaggctatgtcctcttaactttccagttctaatattccttttactgtaataaccacagaagttctttctcacatttctggtaacctacctatcccaatccctatacaaactctctaaattggttggtttattatagactttgtttttcattgcccctcactcccagcctggaggaacctatagatcatttattctacctcttcattgtagacataaggaaacagtaccagagtttttatcaaagtaaagttttctaaacctggagtccccacagatagataaagcatatatggatagacttcttgta

SEQ ID NO: 300883 - DNA, 529 bp, Homo sapiens
cttaaaaatggcatccagaaagaaaatgataggatttgtcaagtgaataacttctttaataacagaataattgtaagtattactttttgctgtactacttttttgttgctgtttgctttaattgtcctacctcattcttaaaagggcaacttatgtatattttctttatttgtatatgctttaaaaaaattgatttgataaaacgtgttcttcctctaatgtattattcttccttatcaattcatactgatcaaggtaacgaaatcttgttgtataatatttagtttccacttgtgaaatcttgaatcctcttactattgtcctctttttcttctccttctcactgcttctgtaagaactgagccttttccacgagtagccttagagatcgtaagacatgagtctgtttcaagctatgggcagcaactgtggtaaagtcatagacaagcctggccagctactttagatgggcctcatgtgctttaataaacttttttttttaagagcagttttaggttcacagcaaaat

SEQ ID NO: 300884 - DNA, 256 bp, Homo sapiens
aaaattcgagagctggaaaattcactgcatgaagctaaagaaagtgctatgcataaggaaagcaagattataaagatgcagaaagaacttgaggtgactaatgacataatagcaaaacttcaagccaaagttcatgaatcaaataaatgccttgaaaaaacaaaagagacaattcaagtacttcaggtaacttaaacataaaaataaaagttgtttgtttgtttgtttgtttaacctattgaattcagcaaatctc

SEQ ID NO: 300885 - DNA, 401 bp, Homo sapiens
ttcttccatatattcaaaaacttacacatatgattataatctactgaatttactttctgttttaaatattttttagttagtagttttaatctgcctcatataacttgtaaactaatttttgaaactctggctgatttaagagttctgcattaaaaaccaactactttattatataaacgttctcaatctttttctcctgtaaacttattccttgctaagtggtttcataaattatcgagatagcaagttaacacgaattctccagaattccttgggaggaaatgcaaagacacgtattatctgcacaattactccagtatcttttgatgaaacacttactgctctccaggtgagtttgatttttatctcagcttaatataggggaagatcagcttgaagaa

SEQ ID NO: 300886 - DNA, 2667 bp, Homo sapiens
  misc_feature (1546)..(1546): n is a, c, g, or t
cggcggcgagccagggagaaaggatggccggcctggcggcgcggttggtcctgctagctggggcagcggcgctggcgagcggctcccagggcgaccgtgagccggtgtaccgcgactgcgtactgcagtgcgaagagcagaactgctctgggggcgctctgaatcacttccgctcccgccagccaatctacatgagtctagcaggctggacctgtcgggacgactgtaagtatgagtgtatgtgggtcaccgttgggctctacctccaggaaggtcacaaagtgcctcagttccatggcaagtggcccttctcccggttcctgttctttcaagagccggcatcggccgtggcctcgtttctcaatggcctggccagcctggtgatgctctgccgctaccgcaccttcgtgccagcctcctcccccatgtaccacacctgtgtggccttcgcctgggtgtccctcaatgcatggttctggtccacagttttccacaccagggacactgacctcacagagaaaatggactacttctgtgcctccactgtcatcctacactcaatctacctgtgctgcgtcaggaccgtggggctgcagcacccagctgtggtcagtgccttccgggctctcctgctgctcatgctgaccgtgcacgtctcctacctgagcctcatccgcttcgactatggctacaacctggtggccaacgtggctattggcctggtcaacgtggtgtggtggctggcctggtgcctgtggaaccagcggcggctgcctcacgtgcgcaagtgcgtggtggtggtcttgctgctgcaggggctgtccctgctcgagctgcttgacttcccaccgctcttctgggtcctggatgcccatgccatctggcacatcagcaccatccctgtccacgtcctctttttcagctttctggaagatgacagcctgtacctgctgaaggaatcagaggacaagttcaagctggactgaagaccttggagcgagtctgccccagtggggatcctgcccccgccctgctggcctcccttctcccctcaacccttgagatgattttctcttttcaacttcttgaacttggacatgaaggatgtgggcccagaatcatgtggccagcccaccccctgttggccctcaccagccttggagtctgttctagggaaggcctcccagcatctgggactcgagagtgggcagcccctctacctcctggagctgaactggggtggaactgagtgtgctcttagctctaccgggaggacagctgcctgtttcctccccaccagcctcctccccacatccccagctgcctggctgggtcctgaagccctctgtctacctgggagaccagggaccacaggccttagggatacagggggtccccttctgttaccaccccccaccctcctccaggacaccactaggtggtgctggatgcttgttctttggccagccaaggttcacggcgattctccccatgggatcttgagggaccaagctgctgggattgggaaggagtttcaccctgaccnttgccctagccaggttcccaggaggcctcaccatactccctttcagggccagggctccagcaagcccagggcaaggatcctgtgctgctgtctggttgagagcctgccaccgtgtgtcgggagtgtgggccaggctgagtgcataggtgacagggccgtgagcatgggcctgggtgtgtgtgagctcaggcctaggtgcgcagtgtggagacgggtgttgtcggggaagaggtgtggcttcaaagtgtgtgtgtgcagggggtgggtgtgttagcgtgggttaggggaacgtgtgtgcgcgtgctggtgggcatgtgagatgagtgactgccggtgaatgtgtccacagttgagaggttggagcaggatgagggaatcctgtcaccatcaataatcacttgtggagcgccagctctgcccaagacgccacctgggcggacagccaggagctctccatggccaggctgcctgtgtgcatgttccctgtctggtgcccctttgcccgcctcctgcaaacctcacagggtccccacacaacagtgccctccagaagcagcccctcggaggcagaggaaggaaaatggggatggctggggctctctccatcctccttttctccttgccttcgcatggctggccttcccctccaaaacctccattcccctgctgccagcccctttgccatagcctgattttggggaggaggaaggggcgatttgagggagaaggggagaaagcttatggctgggtctggtttcttcccttcccagagggtcttactgttccagggtggccccagggcaggcaggggccacactatgcctgcgccctggtaaaggtgacccctgccatttaccagcagccctggcatgttcctgccccacaggaatagaatggagggagctccagaaactttccatcccaaaggcagtctccgtggttgaagcagactggatttttgctctgcccctgaccccttgtccctctttgagggaggggagctatgctaggactccaacctcagggactcgggtggcctgcgctagcttcttttgatactgaaaacttttaaggtgggagggtggcaagggatgtgcttaataaatcaattccaagcctca

SEQ ID NO: 300887 - DNA, 602 bp, Homo sapiens
  misc_feature (586)..(586): n is a, c, g, or t
cggcggcgagccagggagaaaggatggccggcctggcggcgcggttggtcctgctagctggggcagcggcgctggcgagcggctcccagggcgaccgtgagccggtgtaccgcgactgcgtactgcagtgcgaagagcagaactgctctgggggcgctctgaatcacttccgctcccgccagccaatctacatgagtctagcaggctggacctgtcgggacgactgtaagtatgagtgtatgtgggtcaccgttgggctctacctccaggaaggtcacaaagtgcctcagttccatggcaagtggcccttctcccggttcctgttctttcaagagccggcatcggccgtggcctcgtttctcaatggcctggccagcctggtgatgctctgccgctaccgcaccttcgtgccagcctcctcccccatgtaccacacctgtgtggccttcgcctgggtgtccctcaatgcatggttctggtccacagttttccacaccagggacactgacctcacagagaaaatttactacttcttttcctccactttcatcctacactcaatctaccttttcttcttcattacctnttttcttcatcaccca

SEQ ID NO: 300888 - DNA, 840 bp, Homo sapiens
cggcggcgagccagggagaaaggatggccggcctggcggcgcggttggtcctgctagctggggcagcggcgctggcgagcggctcccagggcgaccgtgagccggtgtaccgcgactgcgtactgcagtgcgaagagcagaactgctctgggggcgctctgaatcacttccgctcccgccagccaatctacatgagtctagcaggctggacctgtcgggacgactgtaagtatgagtgtatgtgggtcaccgttgggctctacctccaggaaggtcacaaagtgcctcagttccatggcaagtggcccttctcccggttcctgttctttcaagagccggcatcggccgtggcctcgtttctcaatggcctggccagcctggtgatgctctgccgctaccgcaccttcgtgccagcctcctcccccatgtaccacacctgtgtggccttcgcctggatgagaaaactgaggcacagcaaggctaaataacttgcccaaggacacacaggaaatgcagagccaggaactgaaccctggcagtctggctgtagggcttgcattcttaatgataccactacctcccaaatctgaggaaagggtgtccctcaatgcatggttctggtccacagttttccacaccagggacactgacctcacagagaaaatggactacttctgtgcctccactgtcatcctacactcaatctacctgtgctgcgtcaggtgagcctgcctgggtggctgcaggggcaaaatcgaaccctgggggcagaaaggggtcacccagccttcccctgggggccttcttcactagtctcccaacacctacgccccccaaccc

SEQ ID NO: 300889 - DNA, 461 bp, Homo sapiens
acttgtggagcgccagctctgcccaagacgccacctgggcggacagccaggagctctccatggccaggctgcctcacgtgcgcaagtgcgtggtggtggtcttgctgctgcaggggctgtccctgctcgagctgcttgacttcccaccgctcttctgggtcctggatgcccatgccatctggcacatcagcaccatccctgtccacgtcctctttttcagctttctggaagatgacagcctgtacctgctgaaggaatcagaggacaagttcaagcgtggttgaagcagactggatttttgctctgcccctgaccccttgtccctctttgagggaggggagctatgctaggactccaacctcagggactcgggtggcctgcgctagcttcttttgatactgaaaacttttaaggtgggagggtggcaagggatgtgcttaataaatcaattccaagcctca

SEQ ID NO: 300890 - DNA, 2530 bp, Homo sapiens
  misc_feature (1409)..(1409): n is a, c, g, or t
cggcggcgagccagggagaaaggatggccggcctggcggcgcggttggtcctgctagctggggcagcggcgctggcgagcggctcccagggcgaccgtgagccggtgtaccgcgactgcgtactgcagtgcgaagagcagaactgctctgggggcgctctgaatcacttccgctcccgccagccaatctacatgagtctagcaggctggacctgtcgggacgactgtaagtatgagtgtatgtgggtcaccgttgggctctacctccaggaaggtcacaaagtgcctcagttccatggcaagtggcccttctcccggttcctgttctttcaagagccggcatcggccgtggcctcgtttctcaatggcctggccagcctggtgatgctctgccgctaccgcaccttcgtgccagcctcctcccccatgtaccacacctgtgtggccttcgcctgggtgtccctcaatgcatggttctggtccacagttttccacaccagggacactgacctcacagagaaaatggactacttctgtgcctccactgtcatcctacactcaatctacctgtgctgcgtcaggcctggtcaacgtggtgtggtggctggcctggtgcctgtggaaccagcggcggctgcctcacgtgcgcaagtgcgtggtggtggtcttgctgctgcaggggctgtccctgctcgagctgcttgacttcccaccgctcttctgggtcctggatgcccatgccatctggcacatcagcaccatccctgtccacgtcctctttttcagctttctggaagatgacagcctgtacctgctgaaggaatcagaggacaagttcaagctggactgaagaccttggagcgagtctgccccagtggggatcctgcccccgccctgctggcctcccttctcccctcaacccttgagatgattttctcttttcaacttcttgaacttggacatgaaggatgtgggcccagaatcatgtggccagcccaccccctgttggccctcaccagccttggagtctgttctagggaaggcctcccagcatctgggactcgagagtgggcagcccctctacctcctggagctgaactggggtggaactgagtgtgctcttagctctaccgggaggacagctgcctgtttcctccccaccagcctcctccccacatccccagctgcctggctgggtcctgaagccctctgtctacctgggagaccagggaccacaggccttagggatacagggggtccccttctgttaccaccccccaccctcctccaggacaccactaggtggtgctggatgcttgttctttggccagccaaggttcacggcgattctccccatgggatcttgagggaccaagctgctgggattgggaaggagtttcaccctgaccnttgccctagccaggttcccaggaggcctcaccatactccctttcagggccagggctccagcaagcccagggcaaggatcctgtgctgctgtctggttgagagcctgccaccgtgtgtcgggagtgtgggccaggctgagtgcataggtgacagggccgtgagcatgggcctgggtgtgtgtgagctcaggcctaggtgcgcagtgtggagacgggtgttgtcggggaagaggtgtggcttcaaagtgtgtgtgtgcagggggtgggtgtgttagcgtgggttaggggaacgtgtgtgcgcgtgctggtgggcatgtgagatgagtgactgccggtgaatgtgtccacagttgagaggttggagcaggatgagggaatcctgtcaccatcaataatcacttgtggagcgccagctctgcccaagacgccacctgggcggacagccaggagctctccatggccaggctgcctgtgtgcatgttccctgtctggtgcccctttgcccgcctcctgcaaacctcacagggtccccacacaacagtgccctccagaagcagcccctcggaggcagaggaaggaaaatggggatggctggggctctctccatcctccttttctccttgccttcgcatggctggccttcccctccaaaacctccattcccctgctgccagcccctttgccatagcctgattttggggaggaggaaggggcgatttgagggagaaggggagaaagcttatggctgggtctggtttcttcccttcccagagggtcttactgttccagggtggccccagggcaggcaggggccacactatgcctgcgccctggtaaaggtgacccctgccatttaccagcagccctggcatgttcctgccccacaggaatagaatggagggagctccagaaactttccatcccaaaggcagtctccgtggttgaagcagactggatttttgctctgcccctgaccccttgtccctctttgagggaggggagctatgctaggactccaacctcagggactcgggtggcctgcgctagcttcttttgatactgaaaacttttaaggtgggagggtggcaagggatgtgcttaataaatcaattccaagcctca

SEQ ID NO: 300891 - DNA, 2325 bp, Homo sapiens
  misc_feature (1204)..(1204): n is a, c, g, or t
cggcggcgagccagggagaaaggatggccggcctggcggcgcggttggtcctgctagctggggcagcggcgctggcgagcggctcccagggcgaccgtgagccggtgtaccgcgactgcgtactgcagtgcgaagagcagaactgctctgggggcgctctgaatcacttccgctcccgccagccaatctacatgagtctagcaggctggacctgtcgggacgactgtaagtatgagtgtatgtgggtcaccgttgggctctacctccaggaaggtcacaaagtgcctcagttccatggcaagtggcccttctcccggttcctgttctttcaagagccggcatcggccgtggcctcgtttctcaatggcctggccagcctggtgatgctctgccgctaccgcaccttcgtgccagcctcctcccccatgtaccacacctgtgtggccttcgcctgggtgtccctcaatgcatggttctggtccacagttttccacaccagggacactgacctcacagagaaaatggactacttctgtgcctccactgtcatcctacactcaatctacctgtgctgcgtcagctttctggaagatgacagcctgtacctgctgaaggaatcagaggacaagttcaagctggactgaagaccttggagcgagtctgccccagtggggatcctgcccccgccctgctggcctcccttctcccctcaacccttgagatgattttctcttttcaacttcttgaacttggacatgaaggatgtgggcccagaatcatgtggccagcccaccccctgttggccctcaccagccttggagtctgttctagggaaggcctcccagcatctgggactcgagagtgggcagcccctctacctcctggagctgaactggggtggaactgagtgtgctcttagctctaccgggaggacagctgcctgtttcctccccaccagcctcctccccacatccccagctgcctggctgggtcctgaagccctctgtctacctgggagaccagggaccacaggccttagggatacagggggtccccttctgttaccaccccccaccctcctccaggacaccactaggtggtgctggatgcttgttctttggccagccaaggttcacggcgattctccccatgggatcttgagggaccaagctgctgggattgggaaggagtttcaccctgaccnttgccctagccaggttcccaggaggcctcaccatactccctttcagggccagggctccagcaagcccagggcaaggatcctgtgctgctgtctggttgagagcctgccaccgtgtgtcgggagtgtgggccaggctgagtgcataggtgacagggccgtgagcatgggcctgggtgtgtgtgagctcaggcctaggtgcgcagtgtggagacgggtgttgtcggggaagaggtgtggcttcaaagtgtgtgtgtgcagggggtgggtgtgttagcgtgggttaggggaacgtgtgtgcgcgtgctggtgggcatgtgagatgagtgactgccggtgaatgtgtccacagttgagaggttggagcaggatgagggaatcctgtcaccatcaataatcacttgtggagcgccagctctgcccaagacgccacctgggcggacagccaggagctctccatggccaggctgcctgtgtgcatgttccctgtctggtgcccctttgcccgcctcctgcaaacctcacagggtccccacacaacagtgccctccagaagcagcccctcggaggcagaggaaggaaaatggggatggctggggctctctccatcctccttttctccttgccttcgcatggctggccttcccctccaaaacctccattcccctgctgccagcccctttgccatagcctgattttggggaggaggaaggggcgatttgagggagaaggggagaaagcttatggctgggtctggtttcttcccttcccagagggtcttactgttccagggtggccccagggcaggcaggggccacactatgcctgcgccctggtaaaggtgacccctgccatttaccagcagccctggcatgttcctgccccacaggaatagaatggagggagctccagaaactttccatcccaaaggcagtctccgtggttgaagcagactggatttttgctctgcccctgaccccttgtccctctttgagggaggggagctatgctaggactccaacctcagggactcgggtggcctgcgctagcttcttttgatactgaaaacttttaaggtgggagggtggcaagggatgtgcttaataaatcaattccaagcctca

SEQ ID NO: 300892 - DNA, 2306 bp, Homo sapiens
  misc_feature (1185)..(1185): n is a, c, g, or t
acatcagctgtcctgggtgaggactctggggtaggactgggggccctggctcctgacaaggagctgtagcacttgctgcccagctgtggcctgtttggtggggagaggggtagtgacttcaggggccatgcaccaatgttggggggaggagatgcttcagggaatgctgctctggggatgggccacctgccctctgagcaaccctggacggtggggcaggaccgtggggctgcagcacccagctgtggtcagtgccttccgggctctcctgctgctcatgctgaccgtgcacgtctcctacctgagcctcatccgcttcgactatggctacaacctggtggccaacgtggctattggcctggtcaacgtggtgtggtggctggcctggtgcctgtggaaccagcggcggctgcctcacgtgcgcaagtgcgtggtggtggtcttgctgctgcaggggctgtccctgctcgagctgcttgacttcccaccgctcttctgggtcctggatgcccatgccatctggcacatcagcaccatccctgtccacgtcctctttttcagctttctggaagatgacagcctgtacctgctgaaggaatcagaggacaagttcaagctggactgaagaccttggagcgagtctgccccagtggggatcctgcccccgccctgctggcctcccttctcccctcaacccttgagatgattttctcttttcaacttcttgaacttggacatgaaggatgtgggcccagaatcatgtggccagcccaccccctgttggccctcaccagccttggagtctgttctagggaaggcctcccagcatctgggactcgagagtgggcagcccctctacctcctggagctgaactggggtggaactgagtgtgctcttagctctaccgggaggacagctgcctgtttcctccccaccagcctcctccccacatccccagctgcctggctgggtcctgaagccctctgtctacctgggagaccagggaccacaggccttagggatacagggggtccccttctgttaccaccccccaccctcctccaggacaccactaggtggtgctggatgcttgttctttggccagccaaggttcacggcgattctccccatgggatcttgagggaccaagctgctgggattgggaaggagtttcaccctgaccnttgccctagccaggttcccaggaggcctcaccatactccctttcagggccagggctccagcaagcccagggcaaggatcctgtgctgctgtctggttgagagcctgccaccgtgtgtcgggagtgtgggccaggctgagtgcataggtgacagggccgtgagcatgggcctgggtgtgtgtgagctcaggcctaggtgcgcagtgtggagacgggtgttgtcggggaagaggtgtggcttcaaagtgtgtgtgtgcagggggtgggtgtgttagcgtgggttaggggaacgtgtgtgcgcgtgctggtgggcatgtgagatgagtgactgccggtgaatgtgtccacagttgagaggttggagcaggatgagggaatcctgtcaccatcaataatcacttgtggagcgccagctctgcccaagacgccacctgggcggacagccaggagctctccatggccaggctgcctgtgtgcatgttccctgtctggtgcccctttgcccgcctcctgcaaacctcacagggtccccacacaacagtgccctccagaagcagcccctcggaggcagaggaaggaaaatggggatggctggggctctctccatcctccttttctccttgccttcgcatggctggccttcccctccaaaacctccattcccctgctgccagcccctttgccatagcctgattttggggaggaggaaggggcgatttgagggagaaggggagaaagcttatggctgggtctggtttcttcccttcccagagggtcttactgttccagggtggccccagggcaggcaggggccacactatgcctgcgccctggtaaaggtgacccctgccatttaccagcagccctggcatgttcctgccccacaggaatagaatggagggagctccagaaactttccatcccaaaggcagtctccgtggttgaagcagactggatttttgctctgcccctgaccccttgtccctctttgagggaggggagctatgctaggactccaacctcagggactcgggtggcctgcgctagcttcttttgatactgaaaacttttaaggtgggagggtggcaagggatgtgcttaataaatcaattccaagcctca

SEQ ID NO: 300893 - DNA, 2024 bp, Homo sapiens
  misc_feature (903)..(903): n is a, c, g, or t
cggcggcgagccagggagaaaggatggccggcctggcggcgcggttggtcctgctagctggggcagcggcgctggcgagcggctcccagggcgaccgtgagccggtgtaccgcgactgcgtactgcagtgcgaagagcagaactgctctgggggcgctctgaatcacttccgctcccgccagccaatctacatgagtctagcaggctggacctgtcgggacgactgtaagtatgagtgtatgtgggtcaccgttgggctctacctccaggaaggtcacaaagtgcctcagttccatggcaagtggcccttctcccggttcctgttctttcaagagccggcatcggccgtggcctcgtttctcaatggcctggccagcctggtgatgctctgccgctaccgcaccttcgtgccagcctcctcccccatgtaccacacctgtgtggccttcgcctggatgagaaaactgaggcacagcaaggctaaataacttgcccaaggacacacaggaaatgcagagccaggaactgaaccctggcagtctggctgtagggcttgcattcttaatgataccactacctcctggagctgaactggggtggaactgagtgtgctcttagctctaccgggaggacagctgcctgtttcctccccaccagcctcctccccacatccccagctgcctggctgggtcctgaagccctctgtctacctgggagaccagggaccacaggccttagggatacagggggtccccttctgttaccaccccccaccctcctccaggacaccactaggtggtgctggatgcttgttctttggccagccaaggttcacggcgattctccccatgggatcttgagggaccaagctgctgggattgggaaggagtttcaccctgaccnttgccctagccaggttcccaggaggcctcaccatactccctttcagggccagggctccagcaagcccagggcaaggatcctgtgctgctgtctggttgagagcctgccaccgtgtgtcgggagtgtgggccaggctgagtgcataggtgacagggccgtgagcatgggcctgggtgtgtgtgagctcaggcctaggtgcgcagtgtggagacgggtgttgtcggggaagaggtgtggcttcaaagtgtgtgtgtgcagggggtgggtgtgttagcgtgggttaggggaacgtgtgtgcgcgtgctggtgggcatgtgagatgagtgactgccggtgaatgtgtccacagttgagaggttggagcaggatgagggaatcctgtcaccatcaataatcacttgtggagcgccagctctgcccaagacgccacctgggcggacagccaggagctctccatggccaggctgcctgtgtgcatgttccctgtctggtgcccctttgcccgcctcctgcaaacctcacagggtccccacacaacagtgccctccagaagcagcccctcggaggcagaggaaggaaaatggggatggctggggctctctccatcctccttttctccttgccttcgcatggctggccttcccctccaaaacctccattcccctgctgccagcccctttgccatagcctgattttggggaggaggaaggggcgatttgagggagaaggggagaaagcttatggctgggtctggtttcttcccttcccagagggtcttactgttccagggtggccccagggcaggcaggggccacactatgcctgcgccctggtaaaggtgacccctgccatttaccagcagccctggcatgttcctgccccacaggaatagaatggagggagctccagaaactttccatcccaaaggcagtctccgtggttgaagcagactggatttttgctctgcccctgaccccttgtccctctttgagggaggggagctatgctaggactccaacctcagggactcgggtggcctgcgctagcttcttttgatactgaaaacttttaaggtgggagggtggcaagggatgtgcttaataaatcaattccaagcctca

SEQ ID NO: 300894 - DNA, 649 bp, Homo sapiens
caatacagctaaggaattatcccttgtaaataccacagacccgccctggagccaggccaagctggactgcataaagattggtatggccttagctcttagccaaacaccttcctgacaccatgagggccagcagcttcttgatcgtggtggtgttcctcatcgctgggacgctggttctagaggcagctgtcacgggagttcctgttaaaggtcaagacactgtcaaaggccgtgttccattcaatggacaagatcccgttaaaggacaagtttcagttaaaggtcaagataaagtcaaagcgcaagagccagtcaaaggtccagtctccactaagcctggctcctgccccattatcttgatccggtgcgccatgttgaatccccctaaccgctgcttgaaagatactgactgcccaggaatcaagaagtgctgtgaaggctcttgcgggatggcctgtttcgttccccagtgagagggagccggtccttgctgcacctgtgccgtccccagagctacaggccccatctggtcctaagtccctgctgcccttccccttcccacactgtccattcttcctcccattcaggatgcccacggctggagctgcctctctcatccactttccaataaagagttccttctgctcca

SEQ ID NO: 300895 - DNA, 521 bp, Homo sapiens
tttccggttcgaaaactagaggatcccctcatcgctgggatgctggttctagtggcagctgtcacgggagttcctgttaaaggtcaagacactgtcaaaggccgtgttccattcaatggacaagatcccgttaaaggacaagtttcagttaaaggtcaagataaagtcaaagcgcaagagccagtcaaaggtccagtctccactaagcctggctcctgccccattatcttgatccggtgcgccatgttgaatccccctaaccgctgcttgaaagatactgactgcccaggaatcaagaagtgctgtgaaggctcttgcgggatggcctgtttcgttccccagtgagagggagccggtccttgctgcacctgtgccgtccccagagctacaggccccatctggtcctaagtccctgctgcccttccccttcccacactgtccattcttcctcccattcaggatgcccacggctggagctgcctctctcatccactttccaataaagagttccttctgctcca

SEQ ID NO: 300896 - DNA, 945 bp, Homo sapiens
caatacagctaaggaattatcccttgtaaataccacagacccgccctggagccaggccaagctggactgcataaagattggtatggccttagctcttagccaaacaccttcctgacaccatgagggccagcagcttcttgatcgtggtggtgttcctcatcgctgggacgctggttctagaggcagctgtcacgggagttcctgttaaaggtcaagacactgtcaaaggccgtgttccattcaatggacaagatcccgttaaaggacaagtttcagttaaaggtcaagataaagtcaaagcgcaagagccagtcaaaggtccagtctccactaagcctggctcctgccccattatcttgatccggtgcgccatgttgaatccccctaaccgctgcttgaaagatactgactgcccaggaatcaagaagtgctgtgaaggctcttgcgggatggcctgtttcgttccccagtgagagggagccggtccttgctgcacctgtgccgtccccagagctacaggccccatctggtcctaagtccctgctgcccttccccttcccacactgtccattcttcctcccattcaggatgcccacggctggagctgcctctctcatccactttccaataaagagttccttctgctccaaaaaaaaaaaaaggaaaaaaaaaaaattgtgcgggcggctcgcggcgcggaaaaggcttcaaacccactcgggtgggcgggcgcccgagtggtatggacactggcaacagctggccaaagaagccgtggctagacaggggggcgttccccccaaaaaaaccgcggcgcccggcgtttgacaaaccagatggggttgggcaaccgggctctcacggcgcacgccgcacccccgcgcggtgcgggaggaagcgacgcagcggagagcagaggcacaacagacacgacagacacgagag

SEQ ID NO: 300897 - DNA, 474 bp, Homo sapiens
gggctcgtttcttcttttaacagttcctgttaaaggtcaagacactgtcaaaggccgtgttccattcaatggacaagatcccgttaaaggacaagtttcagttaaaggtcaagataaagtcaaagcgcaagagccagtcaaaggtccagtctccactaagcctggctcctgccccattatcttgatccggtgcgccatgttgaatccccctaaccgctgcttgaaagatactgactgcccaggaatcaagaagtgctgtgaaggctcttgcgggatggcctgtttcgttccccagtgagagggagccggtccttgctgcacctgtgccgtccccagagctacaggccccatctggtcctaagtccctgctgcccttccccttcccacactgtccattcttcctcccattcaggatgcccacggctggagctgcctctctcatccactttccaataaagagttccttctgctcca

SEQ ID NO: 300898 - DNA, 705 bp, Homo sapiens
caatacagctaaggaattatcccttgtaaataccacagacccgccctggagccaggccaagctggactgcataaagattggtatggccttagctcttagccaaacaccttcctgacaccatgagggccagcagcttcttgatcgtggtggtgttcctcatcgctgggacgctggttctagaggcagctgtcacgggagttcctgttaaaggtcaagacactgtcaaaggccgtgttccattcaatggacaagatcccgttaaaggacaagtttcagttaaaggtcaagataaagtcaaagcgcaagagccagtcaaaggtccagtctccactaagcctggctcctgccccattatcttgatccggtgcgccatgttgaatccccctaaccgctgcttgaaagatactgactgcccaggaatcaagaagtgctgtgaaggctcttgcgggatggcctgtttcgttccccagtgaggtgagcactagctggagaacgaggagacccctgaagacacaaaagaaggctgagcgagggagccggtccttgctgcacctgtgccgtccccagagctacaggccccatctggtcctaagtccctgctgcccttccccttcccacactgtccattcttcctcccattcaggatgcccacggctggagctgcctctctcatccactttccaataaagagttccttctgctcca

SEQ ID NO: 300899 - DNA, 589 bp, Homo sapiens
caatacagctaaggaattatcccttgtaaataccacagacccgccctggagccaggccaagctggactgcataaagattggtatggccttagctcttagccaaacaccttcctgacaccatgagggccagcagcttcttgatcgtggtggtgttcctcatcgctgggacgctggttctagaggcagctgtcacgggagttcctgttaaaggtcaagacactgtcaaaggccgtgttccattcaatggacaagatcccgttaaaggacaagtttcagttaaaggtcaagataaagtcaaagcgcaagagccagtcaaaggtccagtctccactaagcctggctcctgccccattatcttgatccggtgcgccatgttgaatccccctaaccgctgcttgaaagatactgactgcccaggaatcaagaagtgctgtgaaggctcttgcgggatggcctgtttcgttccccagtgagagggggccggtcctgcggcacgtggcggtccccgagctacggcccatcggtccaggtcctgcgcctcccctcccacgccttttctccctcagagccacgctggcgcccctatcgc

SEQ ID NO: 300900 - DNA, 525 bp, Homo sapiens
cgactctagcaggtccctgtctagcctcgccagtctcagcctcgccagtgcagcagggagccggtccttgctgcacctgtgccgtccccagagctacaggccccatctggtcctaagtccctgctgcccttccccttcccacactgtccattcttcctcccattcaggatgcccacggctggagctgcctctctcatccactttccaataaagagttccttctgctccaaaaaaaaaaaaaggaaaaaaaaaaaattgtgcgggcggctcgcggcgcggaaaaggcttcaaacccactcgggtgggcgggcgcccgagtggtatggacactggcaacagctggccaaagaagccgtggctagacaggggggcgttccccccaaaaaaaccgcggcgcccggcgtttgacaaaccagatggggttgggcaaccgggctctcacggcgcacgccgcacccccgcgcggtgcgggaggaagcgacgcagcggagagcagaggcacaacagacacgacagacacgagag

SEQ ID NO: 300901 - DNA, 1634 bp, Homo sapiens
tctgacctctgtgagtgaggctatgctaatgcctgactgcttatacttcacctgtacagtactagtccacacaattcctatgtggagtgttgttggcttgattttgaagtattgtttggggttctctgtaaatcaaagttttatagaaatgtggctattctacattcgtttttgtttaataccagccaccctgaataacatgattttgagaatcagcatactcctaaagtagcccatcatatggcagacacctcaaggctaagagaaatatgaacgttctcatttgtatagggtcatctttttgaaaatgaaagatttattaacacctgaaaaagataatacatagtatataagtagatctaagcacattaattagcaatttgattggttgcagcctctcctaggtaaacttgaatcatgaaggtactgaaatatatcctgcacagaaattcaccagggcaggagattgagtaaagtgctcctccacagagcatagcctggcatcctgaaatagaagtgtaagaatttttttaagtaaaagattattgcatatttatggattctttacacaatttttttattctatagtagatcctttagctcctgtatttaatatacagcagaatatactttttagtttccttggaaaggaacagttttcactgtctggtaataaaacgcaagatgcaataaatttaatccaaaataagttacagtaaaatagggcacttactagtttgaaagaaaatattaaatgattctgttagttcacagtgtggtcaatacctgtacatatgaacttcagtaggaaatttagtcccaggaaggaagaaaggtttaaagtgttccagccagtcttgtctcaagaattccaatcgtctttttttttcctccctggtactcagagtttacactaggtggcatgcaaggaaagctaacaaattcagaaactcgattctgtgggagcaggattctttggtactaatcacgatagtgggtccagctttggagttaaccatttgatttgtgatggtttttcttttctcctccccaccccaggatgaagtgtcctcttgctagcaccaataaaagatttctaattaacacaattaaaaacacattgccctctcataaagagcaagaccatgaacaaaaagagggcgataaggaaccagcgaagagccaggcccagaaagaagaaaacccgaagaaacacagaagccatccttacaagcacagcttccgcgctcgaggttccgccagttactccccgccacgaaagcggagcagccaggacaagtacgaaaagcggtccaaccggcggtgaggctggaaccagggccagccagccctgcgggcctccgtgctccttcggggtgcggtgtgcggagaaggcctgagctggcagggcaaacacctgagagtgactttgacattaggtcctttgttgtttttaaagaggctgctggccacaggcaaaaaaaatgacctagcaactcttgaggaaacaagtgcaaaggaggatgtcttggcaagtttaagctacttctgcagtgtagtagacttacatattgttgtttatcttgtttggaagtgtgtttcaaaataaacatgtctagaatttaaagttttca

SEQ ID NO: 300902 - DNA, 383 bp, Homo sapiens
  misc_feature (20)..(20): n is a, c, g, or t
tgaaatgagctcatgaatgnctgcaaacttgtcaaggcacatgttggcagacattcatgtgcttgacaagtttgaggccagcataaaggactataaggatcaaaaagcaagcagaaatgaatccacattctagtcctttatgcagtatacaaggagaactgtcctgtaggatattctcttcctgatggtgcagaacccagaattagaagtttgtggttacagcatactctgtccttcagaaaggcgtgattctagctgttgaccccttgcagctgttggaatctctgcaagaacctctgtattcttctaataaattccctcttttatttaaataaactagtttgactggtttctgttccatgcaaccaaatggtccttgagga

SEQ ID NO: 300903 - DNA, 2850 bp, Homo sapiens
ccccactcgccccgggctgtccccgccgcccgcctgattcccctgcggaagccccgctggctaggtgtctgcgcgcacccccggccgccgccaagagtggcacagctggggaaggagtgaacatccagaggaatcgcggggcggggtggggggaggccaggagaacaggtggcgcagggaagcagaaacgtagttgcgctggacagctggagtcgggcagggtcggggccagcggcgaggggacaagaagggccgattcgagaggaagcgcacctgagggagcacagcgaaggccgggacgcagggagctggatggagagcgagcctgggcggcgaaaggttgccgaggcgggggctgggcgcctgggaacaaagttgaaaatgcaactgcaagctccccggtgaaacaaataccgccttcaaccttcgtattctgtggtgactcatctcgcacgtgacccccctccctcttcaaggtgtgttgaccgactacagtttaagcctgtcgtcccacaaaaggcccgggagggccggggtcccaggaagggccatcctgggtcaacaccgccccagttgggaagtcgggccgctttcggacttgccactgggaagggaagtgatttgggggcggcaggtaaggccgcgccccttcgccatcacctggggaaaggtaccagagttgagccggggcgcccgcaggcctgtctgggcctcggggtaaggcggcgctggccccgccccctgcccctcccgccgcgagtggcctcgcgtggtcgcccaggtgagccgcggggccgcgagccaccgctcaccccgcgtcggggcgggggctgggggtggagcctcatgccccgccccgcggctgggccctgccgcgccgctgcggctcctcctccctccttccgtcctccgcgccttccgtcggtcggtccttgcttcctgcttcgcctccgcgcctcgcgctatgggacagagcccccgatccgccagcaccacctgaggatccagaaaccgccccagcgatggaagaggatcaggagctggagaggaaagcaatagaagaactgcttaaggaggcaaaacgtgggaaaactagagctgaaacaatgggacccatgggttggatgaagtgtcctcttgctagcaccaataaaagatttctaattaacacaattaaaaacacattgccctctcataaagagcaagaccatgaacaaaaagagggcgataaggaaccagcgaagagccaggcccagaaagaagaaaacccgaagaaacacagaagccatccttacaagcacagcttccgcgctcgaggttccgccagttactccccgccacgaaagcggagcagccaggacaagtacgaaaagcggtccaaccggcggtgaggctggaaccagggccagccagccctgcgggcctccgtgctccttcggggtgcggtgtgcggagaaggcctgagctggcagggcaaacacctgagagtgactttgacattaggtcctttgttgtttttaaagaggctgctggccacaggcaaaaaaaatgacctagcaactcttgaggaaacaagtgcaaaggaggatgtcttggcaagtttaagctacttctgcagtgtagtagacttacatattgttgtttatcttgtttggaagtgtgtttcaaaataaacatgtctagaatttaaagttttcagagattgttaaaactggttccaattttttggtcatttctcagaaaaataaaatacttataaatcctatattttactttttgggggtattacatttaaaatttagaaatcatcagtccagtgaccatatttatgaaaagctgtagccctccaaggtctgggaatttatcgagaagctctttgatagctctgcatttgttttcccttaggtgaacaatgtaggaaatcctcaaagtggctttgaatttaatgctccacttcagttaccagaggttaaaaatgggttttgttgtttcctgtgcattctcaaactcatttattagatagaacaatctttctatatttaatttttttaatatataggtcttaagtggtgctttaaaaagaaccctcacaagttaaaaattaagagttgtttcagtgctagatcttgccagctaaagacttgtgataccactatatagtatagttgttccagaaatcttcattttaaatagaagtgtttacaatgccttttttcccccagtattggttttcaatacctgttttcatatacaattacaaacctttcaaacctgtattccttctttatactcaggaaaatgtcaccaagcaccctcctccccagttcacaaaaggaagaagatgaagattctgtctccctgttccccctccccagttttccaaagtgtctgagcatatgcctggctgtcctcagatcatcaccatgccacatccctgctccctacttcctggcagccaagaaaagccctttctacatgctagaaggaaatacatccaaaaagttagcattggagtgttagaaactagaatagacctctccgccaccgagctgctgtgtcacgccctcagcctgctagggagtgacaagcccaagtcattcttgatccaccccttctcccaccccagatcccagggactcatcctgtgactttgtaaccacactcattcctttcaaacacagaggaggaattattgcttcatctgactttattcaaatctagttatgtattggcctaaattatttgtgcaaaatttgaaatgttttttatttaaatattagaaatagcacaaagtcatggagtttttaaaaattgttataattaagtaaaaataaagctgaattgtgtcat

SEQ ID NO: 300904 - DNA, 1623 bp, Homo sapiens
ccccactcgccccgggctgtccccgccgcccgcctgattcccctgcggaagccccgctggctaggtgtctgcgcgcacccccggccgccgccaagagtggcacagctggggaaggagtgaacatccagaggaatcgcggggcggggtggggggaggccaggagaacaggtggcgcagggaagcagaaacgtagttgcgctggacagctggagtcgggcagggtcggggccagcggcgaggggacaagaagggccgattcgagaggaagcgcacctgagggagcacagcgaaggccgggacgcagggagctggatggagagcgagcctgggcggcgaaaggttgccgaggcgggggctgggcgcctgggaacaaagttgaaaatgcaactgcaagctccccggtgaaacaaataccgccttcaaccttcgtattctgtggtgactcatctcgcacgtgacccccctccctcttcaaggtgtgttgaccgactacagtttaagcctgtcgtcccacaaaaggcccgggagggccggggtcccaggaagggccatcctgggtcaacaccgccccagttgggaagtcgggccgctttcggacttgccactgggaagggaagtgatttgggggcggcaggtaaggccgcgccccttcgccatcacctggggaaaggtaccagagttgagccggggcgcccgcaggcctgtctgggcctcggggtaaggcggcgctggccccgccccctgcccctcccgccgcgagtggcctcgcgtggtcgcccaggtgagccgcggggccgcgagccaccgctcaccccgcgtcggggcgggggctgggggtggagcctcatgccccgccccgcggctgggccctgccgcgccgctgcggctcctcctccctccttccgtcctccgcgccttccgtcggtcggtccttgcttcctgcttcgcctccgcgcctcgcgctatgggacagagcccccgatccgccagcaccacctgaggatccagaaaccgccccagcgatggaagaggatcaggagctggagagaaaaatatctggattgaagacctcaatggctgaaggcgagaggaagacagccctggaaatggtccaggcagctggaacagatagacactgtgtgacatttgtattgcacgaggaagaccataccctaggaaattctctacgttacatgatcatgaagaacccggaagtggaattttgtggttacactacgacccatccttcagagagcaaaattaatttacgcattcagactcgaggtacccttccagctgttgagccatttcagagaggcctgaatgagctcatgaatgtctgccaacatgtgcttgacaagtttgaggccagcataaaggactataaggatcaaaaagcaagcagaaatgaatccacattctagtcctttatgcagtatacaaggagaactgtcctgtaggatattctcttcctgatggtgcagaacccagaattagaagtttgtggttacagcatactctgtccttcagaaaggcgtgattctagctgttgaccccttgcagctgttggaatctctgcaagaacctctgtattcttctaataaattccctcttttatttaaa

SEQ ID NO: 300905 - DNA, 2171 bp, Homo sapiens
ggtatttctttgaataacagtgaatttgaaaaaatatagatatatacatatttggctgttcatgtcttttggttattcaaattaataagaaaagataattcttatattaaggatatatgatttaactgtctcatatcaaaaatatttttccagtttgtaatttttttctcttcaatgttgcttctctttatattaatagtttctttttaatttatgtgttcaaaattgtcaaccatttaaaaaaaaatttgccccagcaatcatgcttcaaaagttagttcctttcccaagatcatggacctggaatgaattgattttcagaacttagtagggtgactgcctctcaaatcttttcctttttcttatcaggaaagcaatagaagaactgcttaaggaggcaaaacgtgggaaaactagagctgaaacaatgggacccatgggttggatgaagtgtcctcttgctagcaccaataaaagatttctaattaacacaattaaaaacacattgccctctcataaagagcaagaccatgaacaaaaagagggcgataaggaaccagcgaagagccaggcccagaaagaagaaaacccgaagaaacacagaagccatccttacaagcacagcttccgcgctcgaggttccgccagttactccccgccacgaaagcggagcagccaggacaagtacgaaaagcggtccaaccggcggtgaggctggaaccagggccagccagccctgcgggcctccgtgctccttcggggtgcggtgtgcggagaaggcctgagctggcagggcaaacacctgagagtgactttgacattaggtcctttgttgtttttaaagaggctgctggccacaggcaaaaaaaatgacctagcaactcttgaggaaacaagtgcaaaggaggatgtcttggcaagtttaagctacttctgcagtgtagtagacttacatattgttgtttatcttgtttggaagtgtgtttcaaaataaacatgtctagaatttaaagttttcagagattgttaaaactggttccaattttttggtcatttctcagaaaaataaaatacttataaatcctatattttactttttgggggtattacatttaaaatttagaaatcatcagtccagtgaccatatttatgaaaagctgtagccctccaaggtctgggaatttatcgagaagctctttgatagctctgcatttgttttcccttaggtgaacaatgtaggaaatcctcaaagtggctttgaatttaatgctccacttcagttaccagaggttaaaaatgggttttgttgtttcctgtgcattctcaaactcatttattagatagaacaatctttctatatttaatttttttaatatataggtcttaagtggtgctttaaaaagaaccctcacaagttaaaaattaagagttgtttcagtgctagatcttgccagctaaagacttgtgataccactatatagtatagttgttccagaaatcttcattttaaatagaagtgtttacaatgccttttttcccccagtattggttttcaatacctgttttcatatacaattacaaacctttcaaacctgtattccttctttatactcaggaaaatgtcaccaagcaccctcctccccagttcacaaaaggaagaagatgaagattctgtctccctgttccccctccccagttttccaaagtgtctgagcatatgcctggctgtcctcagatcatcaccatgccacatccctgctccctacttcctggcagccaagaaaagccctttctacatgctagaaggaaatacatccaaaaagttagcattggagtgttagaaactagaatagacctctccgccaccgagctgctgtgtcacgccctcagcctgctagggagtgacaagcccaagtcattcttgatccaccccttctcccaccccagatcccagggactcatcctgtgactttgtaaccacactcattcctttcaaacacagaggaggaattattgcttcatctgactttattcaaatctagttatgtattggcctaaattatttgtgcaaaatttgaaatgttttttatttaaatattagaaatagcacaaagtcatggagtttttaaaaattgttataattaagtaaaaataaagctgaattgtgtcat

SEQ ID NO: 300906 - DNA, 2786 bp, Homo sapiens
tctgacctctgtgagtgaggctatgctaatgcctgactgcttatacttcacctgtacagtactagtccacacaattcctatgtggagtgttgttggcttgattttgaagtattgtttggggttctctgtaaatcaaagttttatagaaatgtggctattctacattcgtttttgtttaataccagccaccctgaataacatgattttgagaatcagcatactcctaaagtagcccatcatatggcagacacctcaaggctaagagaaatatgaacgttctcatttgtatagggtcatctttttgaaaatgaaagatttattaacacctgaaaaagataatacatagtatataagtagatctaagcacattaattagcaatttgattggttgcagcctctcctaggtaaacttgaatcatgaaggtactgaaatatatcctgcacagaaattcaccagggcaggagattgagtaaagtgctcctccacagagcatagcctggcatcctgaaatagaagtgtaagaatttttttaagtaaaagattattgcatatttatggattctttacacaatttttttattctatagtagatcctttagctcctgtatttaatatacagcagaatatactttttagtttccttggaaaggaacagttttcactgtctggtaataaaacgcaagatgcaataaatttaatccaaaataagttacagtaaaatagggcacttactagtttgaaagaaaatattaaatgattctgttagttcacagtgtggtcaatacctgtacatatgaacttcagtaggaaatttagtcccaggaaggaagaaaggtttaaagtgttccagccagtcttgtctcaagaattccaatcgtctttttttttcctccctggtactcagagtttacactaggtggcatgcaaggaaagctaacaaattcagaaactcgattctgtgggagcaggattctttggtactaatcacgatagtgggtccagctttggagttaaccatttgatttgtgatggtttttcttttctcctccccaccccaggatgaagtgtcctcttgctagcaccaataaaagatttctaattaacacaattaaaaacacattgccctctcataaagagcaagaccatgaacaaaaagagggcgataaggaaccagcgaagagccaggcccagaaagaagaaaacccgaagaaacacagaagccatccttacaagcacagcttccgcgctcgaggttccgccagttactccccgccacgaaagcggagcagccaggacaagtacgaaaagcggtccaaccggcggtgaggctggaaccagggccagccagccctgcgggcctccgtgctccttcggggtgcggtgtgcggagaaggcctgagctggcagggcaaacacctgagagtgactttgacattaggtcctttgttgtttttaaagaggctgctggccacaggcaaaaaaaatgacctagcaactcttgaggaaacaagtgcaaaggaggatgtcttggcaagtttaagctacttctgcagtgtagtagacttacatattgttgtttatcttgtttggaagtgtgtttcaaaataaacatgtctagaatttaaagttttcagagattgttaaaactggttccaattttttggtcatttctcagaaaaataaaatacttataaatcctatattttactttttgggggtattacatttaaaatttagaaatcatcagtccagtgaccatatttatgaaaagctgtagccctccaaggtctgggaatttatcgagaagctctttgatagctctgcatttgttttcccttaggtgaacaatgtaggaaatcctcaaagtggctttgaatttaatgctccacttcagttaccagaggttaaaaatgggttttgttgtttcctgtgcattctcaaactcatttattagatagaacaatctttctatatttaatttttttaatatataggtcttaagtggtgctttaaaaagaaccctcacaagttaaaaattaagagttgtttcagtgctagatcttgccagctaaagacttgtgataccactatatagtatagttgttccagaaatcttcattttaaatagaagtgtttacaatgccttttttcccccagtattggttttcaatacctgttttcatatacaattacaaacctttcaaacctgtattccttctttatactcaggaaaatgtcaccaagcaccctcctccccagttcacaaaaggaagaagatgaagattctgtctccctgttccccctccccagttttccaaagtgtctgagcatatgcctggctgtcctcagatcatcaccatgccacatccctgctccctacttcctggcagccaagaaaagccctttctacatgctagaaggaaatacatccaaaaagttagcattggagtgttagaaactagaatagacctctccgccaccgagctgctgtgtcacgccctcagcctgctagggagtgacaagcccaagtcattcttgatccaccccttctcccaccccagatcccagggactcatcctgtgactttgtaaccacactcattcctttcaaacacagaggaggaattattgcttcatctgactttattcaaatctagttatgtattggcctaaattatttgtgcaaaatttgaaatgttttttatttaaatattagaaatagcacaaagtcatggagtttttaaaaattgttataattaagtaaaaataaagctgaattgtgtcat

SEQ ID NO: 300907 - DNA, 1674 bp, Homo sapiens
ccccactcgccccgggctgtccccgccgcccgcctgattcccctgcggaagccccgctggctaggtgtctgcgcgcacccccggccgccgccaagagtggcacagctggggaaggagtgaacatccagaggaatcgcggggcggggtggggggaggccaggagaacaggtggcgcagggaagcagaaacgtagttgcgctggacagctggagtcgggcagggtcggggccagcggcgaggggacaagaagggccgattcgagaggaagcgcacctgagggagcacagcgaaggccgggacgcagggagctggatggagagcgagcctgggcggcgaaaggttgccgaggcgggggctgggcgcctgggaacaaagttgaaaatgcaactgcaagctccccggtgaaacaaataccgccttcaaccttcgtattctgtggtgactcatctcgcacgtgacccccctccctcttcaaggtgtgttgaccgactacagtttaagcctgtcgtcccacaaaaggcccgggagggccggggtcccaggaagggccatcctgggtcaacaccgccccagttgggaagtcgggccgctttcggacttgccactgggaagggaagtgatttgggggcggcaggtaaggccgcgccccttcgccatcacctggggaaaggtaccagagttgagccggggcgcccgcaggcctgtctgggcctcggggtaaggcggcgctggccccgccccctgcccctcccgccgcgagtggcctcgcgtggtcgcccaggtgagccgcggggccgcgagccaccgctcaccccgcgtcggggcgggggctgggggtggagcctcatgccccgccccgcggctgggccctgccgcgccgctgcggctcctcctccctccttccgtcctccgcgccttccgtcggtcggtccttgcttcctgcttcgcctccgcgcctcgcgctatgggacagagcccccgatccgccagcaccacctgaggatccagaaaccgccccagcgatggaagaggatcaggagctggagagaaaaatatctggattgaagacctcaatggctgaaggcgagaggaagacagccctggaaatggtccaggcagctggaacagatagacactgtgtgacatttgtattgcacgaggaagaccataccctaggaaattctctacgttacatgatcatgaagaacccggaagtggaattttgtggttacactacgacccatccttcagagagcaaaattaatttacgcattcagactcgaggtacccttccagctgttgagccatttcagagaggcctgaatgagctcatgaatgtctgccaacatgtgcttgacaagtttgaggccagcataaaggactataaggatcaaaaagcaagcagaaatgaatccacattctagtcctttatgcagtatacaaggagaactgtcctgtaggatattctcttcctgatggtgcagaacccagaattagaagtttgtggttacagcatactctgtccttcagaaaggcgtgattctagctgttgaccccttgcagctgttggaatctctgcaagaacctctgtattcttctaataaattccctcttttatttaaataaactagtttgactggtttctgttccatgcaaccaaatggtccttgagga

SEQ ID NO: 300908 - DNA, 1550 bp, Homo sapiens
ccccactcgccccgggctgtccccgccgcccgcctgattcccctgcggaagccccgctggctaggtgtctgcgcgcacccccggccgccgccaagagtggcacagctggggaaggagtgaacatccagaggaatcgcggggcggggtggggggaggccaggagaacaggtggcgcagggaagcagaaacgtagttgcgctggacagctggagtcgggcagggtcggggccagcggcgaggggacaagaagggccgattcgagaggaagcgcacctgagggagcacagcgaaggccgggacgcagggagctggatggagagcgagcctgggcggcgaaaggttgccgaggcgggggctgggcgcctgggaacaaagttgaaaatgcaactgcaagctccccggtgaaacaaataccgccttcaaccttcgtattctgtggtgactcatctcgcacgtgacccccctccctcttcaaggtgtgttgaccgactacagtttaagcctgtcgtcccacaaaaggcccgggagggccggggtcccaggaagggccatcctgggtcaacaccgccccagttgggaagtcgggccgctttcggacttgccactgggaagggaagtgatttgggggcggcaggtaaggccgcgccccttcgccatcacctggggaaaggtaccagagttgagccggggcgcccgcaggcctgtctgggcctcggggtaaggcggcgctggccccgccccctgcccctcccgccgcgagtggcctcgcgtggtcgcccaggtgagccgcggggccgcgagccaccgctcaccccgcgtcggggcgggggctgggggtggagcctcatgccccgccccgcggctgggccctgccgcgccgctgcggctcctcctccctccttccgtcctccgcgccttccgtcggtcggtccttgcttcctgcttcgcctccgcgcctcgcgctatgggacagagcccccgatccgccagcaccacctgaggatccagaaaccgccccagcgatggaagaggatcaggagctggagagaaaaatatctggattgaagacctcaatggctgaaggcgagaggaagacagccctggaaattctctacgttacatgatcatgaagaacccggaagtggaattttgtggttacactacgacccatccttcagagagcaaaattaatttacgcattcagactcgaggtacccttccagctgttgagccatttcagagaggcctgaatgagctcatgaatgtctgccaacatgtgcttgacaagtttgaggccagcataaaggactataaggatcaaaaagcaagcagaaatgaatccacattctagtcctttatgcagtatacaaggagaactgtcctgtaggatattctcttcctgatggtgcagaacccagaattagaagtttgtggttacagcatactctgtccttcagaaaggcgtgattctagctgttgaccccttgcagctgttggaatctctgcaagaacctctgtattcttctaataaattccctcttttatttaaa

SEQ ID NO: 300909 - DNA, 971 bp, Homo sapiens
ccccactcgccccgggctgtccccgccgcccgcctgattcccctgcggaagccccgctggctaggtgtctgcgcgcacccccggccgccgccaagagtggcacagctggggaaggagtgaacatccagaggaatcgcggggcggggtggggggaggccaggagaacaggtggcgcagggaagcagaaacgtagttgcgctggacagctggagtcgggcagggtcggggccagcggcgaggggacaagaagggccgattcgagaggaagcgcacctgagggagcacagcgaaggccgggacgcagggagctggatggagagcgagcctgggcggcgaaaggttgccgaggcgggggctgggcgcctgggaacaaagttgaaaatgcaactgcaagctccccggtgaaacaaataccgccttcaaccttcgtattctgtggtgactcatctcgcacgtgacccccctccctcttcaaggtgtgttgaccgactacagtttaagcctgtcgtcccaccccagttgggaagtcgggccgctttcggacttgccactgggaagggaagtgatttgggggcggcaggtaaggccgcgccccttcgccatcacctggggaaaggtaccagagttgagccggggcgcccgcaggcctgtctgggcctcggggtaaggcggcgctggccccgccccctgcccctcccgccgcgagtggcctcgcgtggtcgcccaggtgagccgcggggccgcgagccaccgctcaccccgcgtcggggcgggggctgggggtggagcctcatgccccgccccgcggctgggccctgccgcgccgctgcggctcctcctccctccttccaatcttcatacctttcatcaatcaatccttactgtctacttcacctccataccttgcactattatacataaccccctatcccccactaccaccttaagattcataaaccccccaatcaatt

SEQ ID NO: 300910 - DNA, 1663 bp, Homo sapiens
ccccactcgccccgggctgtccccgccgcccgcctgattcccctgcggaagccccgctggctaggtgtctgcgcgcacccccggccgccgccaagagtggcacagctggggaaggagtgaacatccagaggaatcgcggggcggggtggggggaggccaggagaacaggtggcgcagggaagcagaaacgtagttgcgctggacagctggagtcgggcagggtcggggccagcggcgaggggacaagaagggccgattcgagaggaagcgcacctgagggagcacagcgaaggccgggacgcagggagctggatggagagcgagcctgggcggcgaaaggttgccgaggcgggggctgggcgcctgggaacaaagttgaaaatgcaactgcaagctccccggtgaaacaaataccgccttcaaccttcgtattctgtggtgactcatctcgcacgtgacccccctccctcttcaaggtgtgttgaccgactacagtttaagcctgtcgtcccacaaaaggcccgggagggccggggtcccaggaagggccatcctgggtcaacaccgccccagttgggaagtcgggccgctttcggacttgccactgggaagggaagtgatttgggggcggcaggtaaggccgcgccccttcgccatcacctggggaaaggtaccagagttgagccggggcgcccgcaggcctgtctgggcctcggggtaaggcggcgctggccccgccccctgcccctcccgccgcgagtggcctcgcgtggtcgcccaggtgagccgcggggccgcgagccaccgctcaccccgcgtcggggcgggggctgggggtggagcctcatgccccgccccgcggctgggccctgccgcgccgctgcggctcctcctccctccttccgtcctccgcgccttccgtcggtcggtccttgcttcctgcttcgcctccgcgcctcgcgctatgggacagagcccccgatccgccagcaccacctgaggatccagaaaccgccccagcgatggaagaggatcaggagctggagagaaaaatatctggattgaagacctcaatggctgaaggcgagaggaagacagccctggaaatggtccaggcagctggaacagatagacactgtgtgacatttgtattgcacgaggaagaccataccctaggaaattctctacgttacatgatcatgaagaacccggaagtggaattttgtggttacactacgacccatccttcagagagcaaaattaatttacgcattcagactcgaggtacccttccagctgttgagccatttcagagaggcctgaatgagctcatgaatgtctgccaacatgtgcttgacaagtttgaggccagcataaaggactataaggatcaaaaagcaagcagaaatgaatccacattctagtcctttatgcagtatacaaggagaactgtcctgtaggatattctcttcctgatggtgcagaacccagaattagaagtttgtggttacagcatactctgtccttcagaaaggcgtgattctagctgttgaccccttgcagctgttggaatctctgcaagaacctctgtattcttctaataaattccctcttttatttaaaaacaacagaaaaaaacaaaaaaggggggggggaaagaatc

SEQ ID NO: 300911 - DNA, 1698 bp, Homo sapiens
ccccactcgccccgggctgtccccgccgcccgcctgattcccctgcggaagccccgctggctaggtgtctgcgcgcacccccggccgccgccaagagtggcacagctggggaaggagtgaacatccagaggaatcgcggggcggggtggggggaggccaggagaacaggtggcgcagggaagcagaaacgtagttgcgctggacagctggagtcgggcagggtcggggccagcggcgaggggacaagaagggccgattcgagaggaagcgcacctgagggagcacagcgaaggccgggacgcagggagctggatggagagcgagcctgggcggcgaaaggttgccgaggcgggggctgggcgcctgggaacaaagttgaaaatgcaactgcaagctccccggtgaaacaaataccgccttcaaccttcgtattctgtggtgactcatctcgcacgtgacccccctccctcttcaaggtgtgttgaccgactacagtttaagcctgtcgtcccacaaaaggcccgggagggccggggtcccaggaagggccatcctgggtcaacaccgccccagttgggaagtcgggccgctttcggacttgccactgggaagggaagtgatttgggggcggcaggtaaggccgcgccccttcgccatcacctggggaaaggtaccagagttgagccggggcgcccgcaggcctgtctgggcctcggggtaaggcggcgctggccccgccccctgcccctcccgccgcgagtggcctcgcgtggtcgcccaggtgagccgcggggccgcgagccaccgctcaccccgcgtcggggcgggggctgggggtggagcctcatgccccgccccgcggctgggccctgccgcgccgctgcggctcctcctccctccttccgtcctccgcgccttccgtcggtcggtccttgcttcctgcttcgcctccgcgcctcgcgctatgggacagagcccccgatccgccagcaccacctgaggatccagaaaccgccccagcgatggaagaggatcaggagctggagaggaaagcaatagaagaactgcttaaggaggcaaaacgtgggaaaactagagctgaaacaatgggacccatgggttggatgaagtgtcctcttgctagcaccaataaaagatttctaattaacacaattaaaaacacattgccctctcataaagagcaagaccatgaacaaaaagagggcgataaggaaccagcgaagagccaggcccagaaagaagaaaacccgaagaaacacagaagccatccttacaagcacagcttccgcgctcgaggttccgccagttactccccgccacgaaagcggagcagccaggacaagtacgaaaagcggtccaaccggcggtgaggctggaaccagggccagccagccctgcgggcctccgtgctccttcggggtgcggtgtgcggagaaggcctgagctggcagggcaaacacctgagagtgactttgacattaggtcctttgttgtttttaaagaggctgctggccacaggcaaaaaaaatgacctagcaactcttgaggaaacaagtgcaaaggaggatgtcttggcaagtttaagctacttctgcagtgtagtagacttacatattgttgtttatcttgtttggaagtgtgtttcaaaataaacatgtctagaatttaaagttttca

SEQ ID NO: 300912 - DNA, 1569 bp, Homo sapiens
ccccactcgccccgggctgtccccgccgcccgcctgattcccctgcggaagccccgctggctaggtgtctgcgcgcacccccggccgccgccaagagtggcacagctggggaaggagtgaacatccagaggaatcgcggggcggggtggggggaggccaggagaacaggtggcgcagggaagcagaaacgtagttgcgctggacagctggagtcgggcagggtcggggccagcggcgaggggacaagaagggccgattcgagaggaagcgcacctgagggagcacagcgaaggccgggacgcagggagctggatggagagcgagcctgggcggcgaaaggttgccgaggcgggggctgggcgcctgggaacaaagttgaaaatgcaactgcaagctccccggtgaaacaaataccgccttcaaccttcgtattctgtggtgactcatctcgcacgtgacccccctccctcttcaaggtgtgttgaccgactacagtttaagcctgtcgtcccacaaaaggcccgggagggccggggtcccaggaagggccatcctgggtcaacaccgccccagttgggaagtcgggccgctttcggacttgccactgggaagggaagtgatttgggggcggcaggtaaggccgcgccccttcgccatcacctggggaaaggtaccagagttgagccggggcgcccgcaggcctgtctgggcctcggggtaaggcggcgctggccccgccccctgcccctcccgccgcgagtggcctcgcgtggtcgcccaggtgagccgcggggccgcgagccaccgctcaccccgcgtcggggcgggggctgggggtggagcctcatgccccgccccgcggctgggccctgccgcgccgctgcggctcctcctccctccttccgtcctccgcgccttccgtcggtcggtccttgcttcctgcttcgcctccgcgcctcgcgctatgggacagagcccccgatccgccagcaccacctgaggatccagaaaccgccccagcgatggaagaggatcaggagctggagagaaaaatatctggattgaagacctcaatggctgaaggcgagaggaagacagccctggaaatggtccaggcagctggaacagatagacactgtgtgacatttgtattgcacgaggaagaccataccctaggaaattctctacgttacatgatcatgaagaacccggaagtggaattttgtggttacactacgacccatccttcagagagccagagaggcctgaatgagctcatgaatgtctgccaacatgtgcttgacaagtttgaggccagcataaaggactataaggatcaaaaagcaagcagaaatgaatccacattctagtcctttatgcagtatacaaggagaactgtcctgtaggatattctcttcctgatggtgcagaacccagaattagaagtttgtggttacagcatactctgtccttcagaaaggcgtgattctagctgttgaccccttgcagctgttggaatctctgcaagaacctctgtattcttctaataaattccctcttttatttaaa

SEQ ID NO: 300913 - DNA, 13684 bp, Homo sapiens
cgccgcctgtgcagccgctgccgccgccgccgccgccgccgccgccgccgccgccgccgccgccgctgccgccccggctgccgcgccgcgccgctgcctctgccccggccgcccccgccgccgctgccgccgccggcccgcagccagccaggcgggcggcccagcccgcctgagcccgcagcggctgccgccgcagcgtcgggtcgctgggtgcgcgggctaccgcggaccgagcggacccgagtgggcgaccaggcgcttgcccgcccagtgccactgccgccgcttcctcgccggagcacaggaccagacacctccagcgcccgctgctgctgccgatgcggcccggacacttttagctgggcgggagggctggagagccgggggccgccgagaaccgccagcgagctgtgccgagagccgcgccgacccgctgcgatcagggacaggcgcccgcccgccgccgccgcctggccgctatggatctattcgactttttcagagactgggacttggagcagcagtgtcactatgaacaagaccgtagtgcacttaaaaaaagggaatgggagcggaggaatcaagaagtccagcaagaagacgatctcttttcttcaggctttgatctttttggggagccatacaagacaaacaaaggtgatgcacttgccaaccgagtccagaacacgcttggaaactatgatgaaatgaagaatttgctaactaaccattctaatcagaatcacctagtgggaattccaaagaattctgtgccccagaatcccaacaacaaaaatgaaccaagcttttttccagaacaaaagaacagaataattccacctcaccaggataatacccatccttcagcaccaatgcctccaccttctgttgtgatactgaattcaactctaatacacagcaacagaaaatcaaaacctgagtggtcacgtgatagtcataaccctagcactgtactggcaagccaggccagtggtcagccaaacaagatgcagactttgacacaggaccagtctcaagccaaactggaagacttctttgtctacccagctgaacagccccagattggagaagttgaagagtcaaacccatctgcaaaggaagacagtaaccctaattctagtggagaagatgctttcaaagaaatctttcaatccaattcaccggaagaatctgaattcgccgtgcaagcgcctgggtctcccctagtggcttcctctttattagctcctagcagtggcctttcagttcaaaacttcccaccagggctttactgcaaaacaagcatggggcagcaaaagccaactgcatacgtcagacccatggatggccaggaccaggcaccggacatctcaccaacactgaaaccttcaattgaatttgagaacagctttgggaatctgtcatttggaacactcttggatggaaaacccagtgcagccagttcaaagactaaactgccaaagttcaccatcctccaaacaagtgaagtaagccttcccagtgatccaagctgtgttgaagaaatcttgcgggagatgacccattcctggcctactcctctcacttccatgcatactgctggacactctgagcagagcaccttttccatcccaggacaggaatcgcagcatctgaccccaggattcaccttacaaaagtggaatgacccaaccaccagagcttctacaaagtcagtgtctttcaaatcgatgcttgaggatgacctgaagctgagcagtgatgaagatgaccttgagcctgtgaagaccttgaccactcagtgcactgccactgagctctaccaggctgttgaaaaggcaaaacctaggaataatcctgtgaacccacccttggccactccccagcccccacctgcagtgcaagccagcgggggttctggcagctccagcgaatcggagagcagctctgagtcggattcagacactgaaagtagcaccactgacagcgaatctaatgaggcacctcgtgtggcaactccagagcctgagccaccctcaaccaacaagtggcaactggataaatggcttaacaaagtgacatcccagaacaagtcttttatttgtggccaaaatgaaacacccatggagactatttctctgcctcctccaatcatccaaccaatggaagtccagatgaaagtgaagacgaatgccagtcaggtcccagctgaacccaaagaaaggcctctcctcagtctcattagggagaaagcccgtccacggcccactcagaaaattccagaaacaaaggctttgaagcataagttgtcaacaactagtgagacagtgtctcaaaggacaattgggaaaaaacagcccaaaaaagttgagaagaacaccagcactgacgagtttacctggcccaaaccaaatattaccagcagcactcccaaagaaaaagaaagtgtggagcttcatgacccaccaagaggccgcaacaaagccactgcccacaaaccagcccctaggaaagaaccaagacctaacatccctttggctcccgagaagaagaagtacagagggcctggcaagattgtgccaaagtctcgggaattcattgaaacagattcatctacatctgactccaacacagatcaggaagagaccctgcaaatcaaagtcctgcctccgtgcattatttctggaggtaatactgccaaatccaaggaaatctgtggtgccagcctgaccctcagcaccttaatgagtagcagtggcagcaacaacaacttatccatcagtaatgaagagccaacattttcacctattcctgtcatgcaaactgaaatcctgtcccctctgcgagatcatgagaacctgaaaaacctctgggtgaagattgaccttgacttactctctagagtacctggccacagctcactccatgcagcacctgccaagccagaccacaaggagactgccacaaaacccaagcgtcagacagctgtcacagctgtggagaaaccagcccctaagggcaaacgtaagcacaagccaatagaagttgcagagaagatccctgagaagaagcagcgcctggaggaggccacaactatctgcttgctccctccttgcatctcaccagccccaccccacaagcctcccaacactagagaaaataattcatccaggagagcaaatagaagaaaggaagaaaaactatttcctcctccactttccccactgccagaggaccctccacgccgcagaaatgtcagtggcaataatggtccctttggtcaagacaaaaacatcgccatgactggacaaatcacatctaccaaacctaagagaactgaaggcaaattctgtgctactttcaaagggatatcggtaaatgagggagacactccaaaaaaggcatcctctgccaccatcactgtcaccaatactgctattgccactgctactgtcactgctactgccattgtcaccaccactgtcacagctactgccaccgccacggccaccaccacaactactaccactaccatttccaccatcacctctaccatcactactggcctcatggatagcagtcacctggagatgacgtcctgggcggctctgccccttctatccagcagcagcactaatgtccggagacccaagctcacttttgatgactcggttcacaatgctgattattacatgcaagaagctaagaagctgaagcacaaagctgatgcactgttcgagaaatttggcaaagctgtgaattatgctgatgccgccctctccttcactgaatgtggcaatgccatggaacgcgaccctctggaagcaaagtccccatacaccatgtactctgagactgtggagctcctcaggtatgcaatgaggctgaagaactttgcaagtcccttggcttcggatggggacaaaaagctagcagtactatgctaccgatgtttatcactcctctatttgagaatgtttaagctgaagaaggaccatgctatgaagtactccagatcactgatggaatattttaagcaaaatgcttcaaaagtcgcacagataccctctccatgggtaagcaatggaaagaacactccatccccagtgtctctcaacaacgtctcccccatcaacgcaatggggaactgtaacaatggcccagtcaccattccccagcgcattcaccacatggctgccagccacgtcaacatcactagcaatgtgttacggggctatgaacactgggatatggccgacaaactgacaagagaaaacaaagaattctttggtgatctggacacgctgatggggcctctgacccagcacagcagcatgaccaatcttgtccgctacgttcgccaaggactgtgttggctgcgcatcgatgcccacttgttgtagtgggtgttctcagatctctagcatcacgacccatcactctacctctaccagcgcactgatggtcactggtggaactccactcactggggaacgttctctttggttatgtttgtttttatgcttcttttgttatctgtaaaaaacagaagtcattgtaagttgacactacaacttaagggcagtgtacgttttattacttagtcattttttttcttttagcatttgatatgcatttctcagattccaccatctttttgtgctttatggaatgacagtccctacaatattgttttaagcccacactacccaaaacaaagaatgggaagcacttgtgataaagacaggctcctgagaaatgcaacaagtggtcttacatatacatgagaacttagacacaagggaccatcccccaaactctactcttatacccagaaaagaacatatttcagaatctgtcaaacttttgtgtatcccacagattcaatcttcaggtgagaattttcattgtcaaaacccactggttagatgttgtagcaacatcataaaatcaagagtatcaagaaaataaatgagcatagcaatgctactcttaaaaagatgctatgccacacaaccagaggactttcttgttagcatccctttcctgattccctattttgttaattttaatgataagaagaaagggtgacatttattttgacaagttttaggcatcagctggcatcagtgtttttcaactccattatttgaagtgtaaatcctcacctggggttctctgtgtgcaaagctgtccttttgaagaacagtttggttgatgcatgccttagtagccaaaatgctacactctagacttacaagtgggagttaagagaggtctggaaagtgtccaacaaggaattcacacctctgcctcctttgcaacaacaacatttacacagttggtaagtgggtccataactggcaggatttttaaattgtattttgctcaaatctatgggaacaaaagtcaaggtatcactacctagaagtaatgatatacagttttcttcctagtggcttgaaaatctggacttcctcaattattattcacattttctctcttataggttttctgttttctactttcttttttctcttatctgtgtttccctttcctttgtttggctcattaacttttgactgaattacaattactccttttattaaagtccatattattgtgaatcatttccatgaaaatttctaagaaaactccaaactctctaaatagtagctaacttttatttttttaaaatgagtcgtggggtagtgcttcaccttgagatgctttgaaagagccctaaacattgggaaccattcacctaatttggagacatttctcactggttgtgactacccccttatgatccttcacattcattttatgtccctaaacatcacaatgtaaatatcatttttgatgttccagctcaccagaagattcttacacttggggtaaacactatccatgcattacttactggtaattacctgctggtatataattccatgtagcctttaatatgctgggttatcaaattctgttcactgagttatgaccagataaataatagatatgcacatgaaagatgcaaacttgtgtgattattaaagccagccatgcaggtccatgatagaaacagcaggtgatgactctgcactctcattgtcaaggttagctatatccccagttgcaaaacagccagacttgagctgtgctctggtcatctttgagtttaaggccttttgttgtataaggctgtggaagttgtactccaatggctgaagccatgttgttaatatggctgatgggagcatccctgcagctgaacccagcactttttatgctcccactgtggttgagctttatgtttacagtctcagcaacaacacttatgcatccaaacactcacaaatgaaacctgaaagaatcttttctgagcctcttaaaagaggaaaatgatgataacattaaagactctgaacacccaaggttggtgtcacatataaaaattaagctgatgactttgcagtgactcaagttgtctctttatcatggtttaccaggtagagtgcctggctattactatataatgaagcccactggcttgacttgtaagttcaacctaaaccacaatcctagaccatcatggatttaggagtagattcttcttgaaatcccacatccagaaactagacattagaatgttgaggcagtttcccagagaaacaagcatattgcctcatggatgaaagacttgtagttctagtttcagtgacttgttatatctacttacatacaacagggaggcaagaggattctctgtcatctctggtgactgagtgtaaaatatgtgccaagtctgcagcacagtgaccaaatctgacaatcgagctctggatcaccacttgattatgtagtagactcatttataaagcagcttaggaactaattaaacatggaggatgaattaccttcctatcccttgagataagacatctttcagtttcatgattaaggattgttgctgttttatagttactctgttcatcacagtgtaaatggtgatgcgtgtcgtaggtgtgcagctatttgagggactaagggatggagatattctgtcaaatgaatctcttcagtataccagtttgtgggagggatatgagacatgtggatggcagtgagagatcgtgcctctagatcttgatggaggcttggtgagacacacttaaataagcacgtggaggttagaatagagggcagagtaaaaggaagctccatctgagcaagtacaccaaatgatctcagccctgcaacttgacccaggtagggccaccactacgccttcacttgtcacccaagctccaaccacagagagtttgacaagtttgtgttatgatgttggcttggctttgtatttttaattaactttggatttttagtggttttgtcatataactgtctgagtttggtaggtaggattactttgaaaagggtttactagtgtggtcctccgggtagaatttagctgtaagcatgttgttagccagcctgtagactgttaattacttaataatctcattgggaaaatactagtagttttatatttggatgacataattggaaaaagcagattagctgctactacttttaaaagacttaaggtcgggatgcctttttttccatgtaaggaaatgaaaagacccaaaatcttcaggcaaaaagcaagttgcaaaattagaaaccattggctaaaaatgtgttttgttgagtttccaaatggatgaattttcatttggacattacatcactaaattcattagattttgtctgcattggaaagatactcttctagcatatctttcccaaagatatctaatttggattctgtttcatgcaaatttgcatcccggaggttgaagttggagtttgaggttggaaaatatctttgaaggcagaatcagttgagttgtgagggtgaagcctcacatacttctcaacagacatgataaaattcacctgcatgagttggcaggtgggagaaccaaactggatcactgggtaagactactcagtaaagcaatgaactgcttgcttagagaagcatcactatccccattgagaaaaatgtgtggcaagatgatacagctacacagtatcaaatgaatgggtcaattcagcacccccaaatttaattctgtggggaaaaattattgagccagttgtcagtgttctgttacatgactggcagactaaattcttcatcgttgttgttattgttgttgttgtttctcattttcactcgcacggccttattctcataattaaaatctaattcattttctctttagtgttagtagactccaacaacagaagtggcatctgtgtattcataatcagcatttaccctggcaggagactaatcagataggccggtctcagacattaatcctaccatctgatatttttggtgaaggaaaaagtattaattctctttccatcctcctcctcagaaatatagaagccctctttaccaaaatcatcacattttactctgtaatctaccagctaaaagaaaattgcattgaagccccacaaagccagattgcagttcttgcccctttttgcgtctgacatgagatgttaaagaattattcatagtgctcacattgggttaggggacactgaactgctttttagatccatgatcagtcatcattcttctaagagattggagctttgctgtttcattaactgtgcagtgtagactaatggtgtttaataaaaatcattcaaaatttcaaactcttttgccagtgacctcaattttgttggctctgtgatttgtatcagactttgaggagggaagggggaagtgaaggaagcctacgtccaggcccctgacaggatgctgcagtagcaagctcaagctcgcctgcctgccagcagttgctggtgagcagcagcatgcagaccagctgtgggaagcctcctgaagaatgccccagctgatgctttcagctgggaatagtttgttcctattggggaactcattgttctccagtctctgcagcaggaagccagctgtcatattcggagggaatttcagatgctttacctttttggttttgtcctgcatcactcatgtggctacgaaagtgtctctgagaatagagcccaatgtggtgacaatgggtagtcaaatgcaccccagatgctcaagccctgttgtggttctgcagtgtttatgaaattgggaggaaggagaccctggacagtaagcaaaattggagacactccaacgaggctaagttaatgccgtgttgcccagaacaagatctagcttctcatttggtcagcctagcatgcaaccagtggtgtgctggtaaaatgtttaacaaccagctcgctgagaatagaaagcacctggtttgcaccatttgccaatttccatggcataaatactaccactttagatgattttaagctaccaactgtgatgtcactgaacacatggttggaaagagatgcacgcagttggctcttgcaagcctgggcaaaaatgcttcaacacgccactggatgcagccagtcagagggttcatatttaatatatgtgttcatgtggacacacacagacacacacacacaaactcacccttacacacacacttcgatgactaaaacaattacatagttttaagatatgaatcaatgtgtgaatgtagaaagcttatgataaggccctagaggtatgggttgccctggaagcctaggttttaagcaggagaatagctgagaagaatgaagccctcctgagctgaaaggagagatggatcaatggagatggttccatcatctccttccatatctcacaggtaaaatgggcactcagaaaaccctcacgattgattttttaaaaagataagtgagtgttttttattttattattattgtcatcattattttgatttacaaatgctatttgtaacttttacatgtaactaggataaagtatttacgggaactctatggagaatagcacaatccagaatttactgtgtttttcttttatgtgacgtggaaactcagtaattctcccaccttcacattgttgttcataagaattttactttagttattagggaatctaagttttttgttaacatttgtttttagttaaaagtatctacttactgttttagctctgaactcaaaccagaatatctctgtatcaattgcatgactattcagaaacaataatccaaaccaaaataattctttttccacccagtacgaagaaaactaagctcagtaacaagaaggcataaactaaagtatataatgaggctttcattaaatacacacacacacacactcacacacacacacatacactttttaaatttttaaattaggcctccacacataaatcattttgaaagtagaatagaaaatctcaaagaattcattctcctggtcctgtgcatcttctgcagttaataagaggtttgtatctggaaagatggaagaacttgttctaaaatcttatttttcaaaaaaaaatttccattttctctctgggcctgtatccatggttgaatgttagccctggaggagatccatgtcttactcgctctttctggcccttctgtcttttgcctctgcaattctttttgtagctggcacgatagcagggactgggggtctatcctttcatggtattgctacaatatttgtccttactggaaaatggtaacatccgggtctgatttaattggcattacacttacacagggactctgagcacccccgtcaccacaccagacagtggaccagttttcacagctacaaagagctagaaatgtgtttaacatcatccagtgcatcccctaattcaaaaccatcctcactaatcaatcatattcacccataaatattacaaatgagattgattccatctcaagacaatttgtcaaatacttaattttcttcctggatgattctacttactggatattttagaaagagaaatgtctgagataaaatccctcacatttactcaatataacaaattactgtttctactcctattctgagtagtgcttctgaagattgtttgctgtagtgttgtctttgataaaatgaatgtcagtagtgagccttttagagataccatgctcagacatcctctttgggatcagaagatacctaaaattctccccttttgcccacttggttagatgagtgatatattctttggatcctgcaaagaagagattggtttcttttcttttctggtggtggtagtggttgtatctgtggctgtgatggttgttgttacttgtctctctctctctctggctctggcttttgctttcctgctagtgttctttctctttccaaacaaatagttaaattaaacgtgagcttctgaattgtacttgttcatactttcaaaacataacagattaataaaaatagatgtgtcctgatttaaaacatgccccctggaaaggcatgctgtattatgaaatcgtgataatataactgcattattacatggcagtataaatattagtctgttgaattcatttgtccaattgtataactttgtggagcagtgttttgacctttgatacataattctggagcaagtggagtggttgcaggcagatgagacagtgttatatcaggatttttcaatcaactttagttggaggcctggcaattacaaacatcttcagatgtttctgtaaccattataaatatgaaaaaaacctcttcaaaaaatttcccatagtacttcagtcaagactttttaggtttatcttttttttttcatttctccttttccttttccattatttttcgatgggggggttgttatcattgactgaagaaatattttgattgcaatggtctctctctctctccccctctctctctctctcctctattctttcctccttccctctgtccatcacccctcattaaaatattgaaatctggagtctttgataaatctgcattagaccaggctatatgctaggaatgaaatctgggcaaatatcgatgggttttcaaagaatgctccatgttcattgggccctttcacaccccacagtgataaatgaaaaggatagaggtagttttttcaaaagagcactttaataatatcctctgagacctaatgcagtttaacaaatgactccacctatttttccagtaggtaaattgactgagacttgcaaaatacccctgagagttgtcaggggtgtcttctgcctggtctatagcgtgtgtgtttgctttgtatctaacaggcacattcacgtctcgtgtactcatatgaagtatttcctaacattcccattagcctgtatataagaatcagaaagataatcccaacatgttgtaaatgaagatgtgactctataacctttctcttcttcctggaaaaaaaaggacattttcatgcatattttaaacagaaattttgtatatttaagtgtcatagaaaatatttattgagtaactgggacacaaatgggaatttaattgtcatcatatgctttgtgtgtggggatgcttaccaacaccatgtcgctggaccattgtggcaagccataactgcacaaagagtacacatcgtcagtgtgtgtgtgtgtgtgtgtgtgcgcgcacgcacgtgcgtgtgtgtgtccctgcatgtgcaacatgtctagcttgctgtccttcatgggattttagctttcccttcttgaaaaacattattttacagttccaggaggccctggttacattactatatgaaggcagtgatttgaaatgaaaattcctttcctcttggaagctttggtcataatatcatggttcaattaaacggattccaccggactttgtgatgaaaaaggctctgttaaaatccaattgagtttccaagaggaaattgtagtaggtcaagatgcatgagagggaagatggaggccacctcagctggagaacatgagctgagttgagccctcagtgttgaagttgacttgctccaagctgcagtctaaaaccctggggcccgtgcctggcctatgctccctcccaagtaagtagaggagcagaaccatcaggaacagcctgcctggctcctatgaagaaaacttcctgacgtcctgtccccaaaggaagaccctttccccaagggcaccccaggtggccattaaattgtgatgatcattcagaaagtgcccccttggctttatgagaatccaattagtcttctgaaccaccttttcttgggtgcagatttccaacattcatgctcattgcagatccaccaactgtcactgttcttaacaagcatgctcgtcttgtcagaatttcagtaagttccaatttcctgtacagaccagggtaaactgttctaaaatcaatcaattaatgaaatgttatctggtttttaaaagctggtttcatgtgctttatgtgtataaaactatatctgcctgtgtggctttgcatttcaaatgtgtggcgcacaagcgttttgttggtgctttgttctcagtacagtaactctgtgtacaaacattttaatgtggttttgttgttttccaacaagatgtctctgtaaaaatgatattggctgagctggtgcgttggtttctctcatagaggcattaactatactgccaatgcattgaattatttaaaaatgcaaaataaaatttttatgaaaatctca

SEQ ID NO: 300914 - DNA, 1878 bp, Homo sapiens
cgccgcctgtgcagccgctgccgccgccgccgccgccgccgccgccgccgccgccgccgccgccgctgccgccccggctgccgcgccgcgccgctgcctctgccccggccgcccccgccgccgctgccgccgccggcccgcagccagccaggcgggcggcccagcccgcctgagcccgcagcggctgccgccgcagcgtcgggtcgctgggtgcgcgggctaccgcggaccgagcggacccgagtgggcgaccaggcgcttgcccgcccagtgccactgccgccgcttcctcgccggagcacaggaccagacacctccagcgcccgctgctgctgccgatgcggcccggacacttttagctgggcgggagggctggagagccgggggccgccgagaaccgccagcgagctgtgccgagagccgcgccgacccgctgcgatcagggacaggcgcccgcccgccgccgccgcctggccgctatggatctattcgactttttcagagactgggacttggagcagcagtgtcactatgaacaagaccgtagtgcacttaaaaaaagggaatgggagcggaggaatcaagaagtccagcaagaagacgatctcttttcttcaggctttgatctttttggggagccatacaagacaaacaaaggtgatgcacttgccaaccgagtccagaacacgcttggaaactatgatgaaatgaagaatttgctaactaaccattctaatcagaatcacctagtgggaattccaaagaattctgtgccccagaatcccaacaacaaaaatgaaccaagcttttttccagaacaaaagaacagaataattccacctcaccaggataatacccatccttcagcaccaatgcctccaccttctgttgtgatactgaattcaactctaatacacagcaacagaaaatcaaaacctgagtggtcacgtgatagtcataaccctagcactgtactggcaagccaggccagtggtcagccaaacaagatgcagactttgacacaggaccagtctcaagccaaactggaagacttctttgtctacccagctgaacagccccagattggagaagttgaagagtcaaacccatctgcaaaggaagacagtaaccctaattctagtggagaagatgctttcaaagaaatctttcaatccaattcaccggaagaatctgaattcgccgtgcaagcgcctgggtctcccctagtggcttcctctttattagctcctagcagtggcctttcagttcaaaacttcccaccagggctttactgcaaaacaagcatggggcagcaaaagccaactgcatacgtcagacccatggatggccaggaccaggcaccggacatctcaccaacactgaaaccttcaattgaatttgagaacagctttgggaatctgtcatttggaacactcttggatggaaaacccagtgcagccagttcaaagactaaactgccaaagttcaccatcctccaaacaagtgaagtaagccttcccagtgatccaagctgtgttgaagaaatcttgcgggaatcgcagcatctgaccccaggattcaccttacaaaagtggaatgacccaaccaccagagcttctacaaagatgcttgaggatgacctgaagctgagcagtgatgaagatgaccttgagcctgtgaagaccttgaccactcagtgcactgccactgagctctaccaggctgttgaaaaggcaaaacctaggaataatcctgtgaagtaagttattatttttattagttgcaaatgttaattttaacggactcgatgcatgtgaaaaaataaggtcataaaagagaccttggattttgagttaatctctattcatgacaatttaa

SEQ ID NO: 300915 - DNA, 5254 bp, Homo sapiens
tgttgctatgtgcgaaattgtttatcttaaccatgtcgggaatcttaagtcccctttaaatgtttttgccctcagagtttctttcagtttgtgggtggggaagccccacaaagccagattgcagttcttgcccctttttgcgtctgacatgagatgttaaagaattattcatagtgctcacattgggttaggggacactgaactgctttttagatccatgatcagtcatcattcttctaagagattggagctttgctgtttcattaactgtgcagtgtagactaatggtgtttaataaaaatcattcaaaatttcaaactcttttgccagtgacctcaattttgttggctctgtgatttgtatcagactttgaggagggaagggggaagtgaaggaagcctacgtccaggcccctgacaggatgctgcagtagcaagctcaagctcgcctgcctgccagcagttgctggtgagcagcagcatgcagaccagctgtgggaagcctcctgaagaatgccccagctgatgctttcagctgggaatagtttgttcctattggggaactcattgttctccagtctctgcagcaggaagccagctgtcatattcggagggaatttcagatgctttacctttttggttttgtcctgcatcactcatgtggctacgaaagtgtctctgagaatagagcccaatgtggtgacaatgggtagtcaaatgcaccccagatgctcaagccctgttgtggttctgcagtgtttatgaaattgggaggaaggagaccctggacagtaagcaaaattggagacactccaacgaggctaagttaatgccgtgttgcccagaacaagatctagcttctcatttggtcagcctagcatgcaaccagtggtgtgctggtaaaatgtttaacaaccagctcgctgagaatagaaagcacctggtttgcaccatttgccaatttccatggcataaatactaccactttagatgattttaagctaccaactgtgatgtcactgaacacatggttggaaagagatgcacgcagttggctcttgcaagcctgggcaaaaatgcttcaacacgccactggatgcagccagtcagagggttcatatttaatatatgtgttcatgtggacacacacagacacacacacacaaactcacccttacacacacacttcgatgactaaaacaattacatagttttaagatatgaatcaatgtgtgaatgtagaaagcttatgataaggccctagaggtatgggttgccctggaagcctaggttttaagcaggagaatagctgagaagaatgaagccctcctgagctgaaaggagagatggatcaatggagatggttccatcatctccttccatatctcacaggtaaaatgggcactcagaaaaccctcacgattgattttttaaaaagataagtgagtgttttttattttattattattgtcatcattattttgatttacaaatgctatttgtaacttttacatgtaactaggataaagtatttacgggaactctatggagaatagcacaatccagaatttactgtgtttttcttttatgtgacgtggaaactcagtaattctcccaccttcacattgttgttcataagaattttactttagttattagggaatctaagttttttgttaacatttgtttttagttaaaagtatctacttactgttttagctctgaactcaaaccagaatatctctgtatcaattgcatgactattcagaaacaataatccaaaccaaaataattctttttccacccagtacgaagaaaactaagctcagtaacaagaaggcataaactaaagtatataatgaggctttcattaaatacacacacacacacactcacacacacacacatacactttttaaatttttaaattaggcctccacacataaatcattttgaaagtagaatagaaaatctcaaagaattcattctcctggtcctgtgcatcttctgcagttaataagaggtttgtatctggaaagatggaagaacttgttctaaaatcttatttttcaaaaaaaaatttccattttctctctgggcctgtatccatggttgaatgttagccctggaggagatccatgtcttactcgctctttctggcccttctgtcttttgcctctgcaattctttttgtagctggcacgatagcagggactgggggtctatcctttcatggtattgctacaatatttgtccttactggaaaatggtaacatccgggtctgatttaattggcattacacttacacagggactctgagcacccccgtcaccacaccagacagtggaccagttttcacagctacaaagagctagaaatgtgtttaacatcatccagtgcatcccctaattcaaaaccatcctcactaatcaatcatattcacccataaatattacaaatgagattgattccatctcaagacaatttgtcaaatacttaattttcttcctggatgattctacttactggatattttagaaagagaaatgtctgagataaaatccctcacatttactcaatataacaaattactgtttctactcctattctgagtagtgcttctgaagattgtttgctgtagtgttgtctttgataaaatgaatgtcagtagtgagccttttagagataccatgctcagacatcctctttgggatcagaagatacctaaaattctccccttttgcccacttggttagatgagtgatatattctttggatcctgcaaagaagagattggtttcttttcttttctggtggtggtagtggttgtatctgtggctgtgatggttgttgttacttgtctctctctctctctggctctggcttttgctttcctgctagtgttctttctctttccaaacaaatagttaaattaaacgtgagcttctgaattgtacttgttcatactttcaaaacataacagattaataaaaatagatgtgtcctgatttaaaacatgccccctggaaaggcatgctgtattatgaaatcgtgataatataactgcattattacatggcagtataaatattagtctgttgaattcatttgtccaattgtataactttgtggagcagtgttttgacctttgatacataattctggagcaagtggagtggttgcaggcagatgagacagtgttatatcaggatttttcaatcaactttagttggaggcctggcaattacaaacatcttcagatgtttctgtaaccattataaatatgaaaaaaacctcttcaaaaaatttcccatagtacttcagtcaagactttttaggtttatcttttttttttcatttctccttttccttttccattatttttcgatgggggggttgttatcattgactgaagaaatattttgattgcaatggtctctctctctctccccctctctctctctctcctctattctttcctccttccctctgtccatcacccctcattaaaatattgaaatctggagtctttgataaatctgcattagaccaggctatatgctaggaatgaaatctgggcaaatatcgatgggttttcaaagaatgctccatgttcattgggccctttcacaccccacagtgataaatgaaaaggatagaggtagttttttcaaaagagcactttaataatatcctctgagacctaatgcagtttaacaaatgactccacctatttttccagtaggtaaattgactgagacttgcaaaatacccctgagagttgtcaggggtgtcttctgcctggtctatagcgtgtgtgtttgctttgtatctaacaggcacattcacgtctcgtgtactcatatgaagtatttcctaacattcccattagcctgtatataagaatcagaaagataatcccaacatgttgtaaatgaagatgtgactctataacctttctcttcttcctggaaaaaaaaggacattttcatgcatattttaaacagaaattttgtatatttaagtgtcatagaaaatatttattgagtaactgggacacaaatgggaatttaattgtcatcatatgctttgtgtgtggggatgcttaccaacaccatgtcgctggaccattgtggcaagccataactgcacaaagagtacacatcgtcagtgtgtgtgtgtgtgtgtgtgtgcgcgcacgcacgtgcgtgtgtgtgtccctgcatgtgcaacatgtctagcttgctgtccttcatgggattttagctttcccttcttgaaaaacattattttacagttccaggaggccctggttacattactatatgaaggcagtgatttgaaatgaaaattcctttcctcttggaagctttggtcataatatcatggttcaattaaacggattccaccggactttgtgatgaaaaaggctctgttaaaatccaattgagtttccaagaggaaattgtagtaggtcaagatgcatgagagggaagatggaggccacctcagctggagaacatgagctgagttgagccctcagtgttgaagttgacttgctccaagctgcagtctaaaaccctggggcccgtgcctggcctatgctccctcccaagtaagtagaggagcagaaccatcaggaacagcctgcctggctcctatgaagaaaacttcctgacgtcctgtccccaaaggaagaccctttccccaagggcaccccaggtggccattaaattgtgatgatcattcagaaagtgcccccttggctttatgagaatccaattagtcttctgaaccaccttttcttgggtgcagatttccaacattcatgctcattgcagatccaccaactgtcactgttcttaacaagcatgctcgtcttgtcagaatttcagtaagttccaatttcctgtacagaccagggtaaactgttctaaaatcaatcaattaatgaaatgttatctggtttttaaaagctggtttcatgtgctttatgtgtataaaactatatctgcctgtgtggctttgcatttcaaatgtgtggcgcacaagcgttttgttggtgctttgttctcagtacagtaactctgtgtacaaacattttaatgtggttttgttgttttccaacaagatgtctctgtaaaaatgatattggctgagctggtgcgttggtttctctcatagaggcattaactatactgccaatgcattgaattatttaaaaatgcaaaataaaatttttatgaaaatctca

SEQ ID NO: 300916 - DNA, 13597 bp, Homo sapiens
cgccgcctgtgcagccgctgccgccgccgccgccgccgccgccgccgccgccgccgccgccgccgctgccgccccggctgccgcgccgcgccgctgcctctgccccggccgcccccgccgccgctgccgccgccggcccgcagccagccaggcgggcggcccagcccgcctgagcccgcagcggctgccgccgcagcgtcgggtcgctgggtgcgcgggctaccgcggaccgagcggacccgagtgggcgaccaggcgcttgcccgcccagtgccactgccgccgcttcctcgccggagcacaggaccagacacctccagcgcccgctgctgctgccgatgcggcccggacacttttagctgggcgggagggctggagagccgggggccgccgagaaccgccagcgagctgtgccgagagccgcgccgacccgctgcgatcagggacaggcgcccgcccgccgccgccgcctggccgctatggatctattcgactttttcagagactgggacttggagcagcagtgtcactatgaacaagaccgtagtgcacttaaaaaaagggaatgggagcggaggaatcaagaagtccagcaagaagacgatctcttttcttcaggctttgatctttttggggagccatacaagacaaacaaaggtgatgcacttgccaaccgagtccagaacacgcttggaaactatgatgaaatgaagaatttgctaactaaccattctaatcagaatcacctagtgggaattccaaagaattctgtgccccagaatcccaacaacaaaaatgaaccaagcttttttccagaacaaaagaacagaataattccacctcaccaggataatacccatccttcagcaccaatgcctccaccttctgttgtgatactgaattcaactctaatacacagcaacagaaaatcaaaacctgagtggtcacgtgatagtcataaccctagcactgtactggcaagccaggccagtggtcagccaaacaagatgcagactttgacacaggaccagtctcaagccaaactggaagacttctttgtctacccagctgaacagccccagattggagaagttgaagagtcaaacccatctgcaaaggaagacagtaaccctaattctagtggagaagatgctttcaaagaaatctttcaatccaattcaccggaagaatctgaattcgccgtgcaagcgcctgggtctcccctagtggcttcctctttattagctcctagcagtggcctttcagttcaaaacttcccaccagggctttactgcaaaacaagcatggggcagcaaaagccaactgcatacgtcagacccatggatggccaggaccaggcaccggacatctcaccaacactgaaaccttcaattgaatttgagaacagctttgggaatctgtcatttggaacactcttggatggaaaacccagtgcagccagttcaaagactaaactgccaaagttcaccatcctccaaacaagtgaagtaagccttcccagtgatccaagctgtgttgaagaaatcttgcgggaatcgcagcatctgaccccaggattcaccttacaaaagtggaatgacccaaccaccagagcttctacaaagtcagtgtctttcaaatcgatgcttgaggatgacctgaagctgagcagtgatgaagatgaccttgagcctgtgaagaccttgaccactcagtgcactgccactgagctctaccaggctgttgaaaaggcaaaacctaggaataatcctgtgaacccacccttggccactccccagcccccacctgcagtgcaagccagcgggggttctggcagctccagcgaatcggagagcagctctgagtcggattcagacactgaaagtagcaccactgacagcgaatctaatgaggcacctcgtgtggcaactccagagcctgagccaccctcaaccaacaagtggcaactggataaatggcttaacaaagtgacatcccagaacaagtcttttatttgtggccaaaatgaaacacccatggagactatttctctgcctcctccaatcatccaaccaatggaagtccagatgaaagtgaagacgaatgccagtcaggtcccagctgaacccaaagaaaggcctctcctcagtctcattagggagaaagcccgtccacggcccactcagaaaattccagaaacaaaggctttgaagcataagttgtcaacaactagtgagacagtgtctcaaaggacaattgggaaaaaacagcccaaaaaagttgagaagaacaccagcactgacgagtttacctggcccaaaccaaatattaccagcagcactcccaaagaaaaagaaagtgtggagcttcatgacccaccaagaggccgcaacaaagccactgcccacaaaccagcccctaggaaagaaccaagacctaacatccctttggctcccgagaagaagaagtacagagggcctggcaagattgtgccaaagtctcgggaattcattgaaacagattcatctacatctgactccaacacagatcaggaagagaccctgcaaatcaaagtcctgcctccgtgcattatttctggaggtaatactgccaaatccaaggaaatctgtggtgccagcctgaccctcagcaccttaatgagtagcagtggcagcaacaacaacttatccatcagtaatgaagagccaacattttcacctattcctgtcatgcaaactgaaatcctgtcccctctgcgagatcatgagaacctgaaaaacctctgggtgaagattgaccttgacttactctctagagtacctggccacagctcactccatgcagcacctgccaagccagaccacaaggagactgccacaaaacccaagcgtcagacagctgtcacagctgtggagaaaccagcccctaagggcaaacgtaagcacaagccaatagaagttgcagagaagatccctgagaagaagcagcgcctggaggaggccacaactatctgcttgctccctccttgcatctcaccagccccaccccacaagcctcccaacactagagaaaataattcatccaggagagcaaatagaagaaaggaagaaaaactatttcctcctccactttccccactgccagaggaccctccacgccgcagaaatgtcagtggcaataatggtccctttggtcaagacaaaaacatcgccatgactggacaaatcacatctaccaaacctaagagaactgaaggcaaattctgtgctactttcaaagggatatcggtaaatgagggagacactccaaaaaaggcatcctctgccaccatcactgtcaccaatactgctattgccactgctactgtcactgctactgccattgtcaccaccactgtcacagctactgccaccgccacggccaccaccacaactactaccactaccatttccaccatcacctctaccatcactactggcctcatggatagcagtcacctggagatgacgtcctgggcggctctgccccttctatccagcagcagcactaatgtccggagacccaagctcacttttgatgactcggttcacaatgctgattattacatgcaagaagctaagaagctgaagcacaaagctgatgcactgttcgagaaatttggcaaagctgtgaattatgctgatgccgccctctccttcactgaatgtggcaatgccatggaacgcgaccctctggaagcaaagtccccatacaccatgtactctgagactgtggagctcctcaggtatgcaatgaggctgaagaactttgcaagtcccttggcttcggatggggacaaaaagctagcagtactatgctaccgatgtttatcactcctctatttgagaatgtttaagctgaagaaggaccatgctatgaagtactccagatcactgatggaatattttaagcaaaatgcttcaaaagtcgcacagataccctctccatgggtaagcaatggaaagaacactccatccccagtgtctctcaacaacgtctcccccatcaacgcaatggggaactgtaacaatggcccagtcaccattccccagcgcattcaccacatggctgccagccacgtcaacatcactagcaatgtgttacggggctatgaacactgggatatggccgacaaactgacaagagaaaacaaagaattctttggtgatctggacacgctgatggggcctctgacccagcacagcagcatgaccaatcttgtccgctacgttcgccaaggactgtgttggctgcgcatcgatgcccacttgttgtagtgggtgttctcagatctctagcatcacgacccatcactctacctctaccagcgcactgatggtcactggtggaactccactcactggggaacgttctctttggttatgtttgtttttatgcttcttttgttatctgtaaaaaacagaagtcattgtaagttgacactacaacttaagggcagtgtacgttttattacttagtcattttttttcttttagcatttgatatgcatttctcagattccaccatctttttgtgctttatggaatgacagtccctacaatattgttttaagcccacactacccaaaacaaagaatgggaagcacttgtgataaagacaggctcctgagaaatgcaacaagtggtcttacatatacatgagaacttagacacaagggaccatcccccaaactctactcttatacccagaaaagaacatatttcagaatctgtcaaacttttgtgtatcccacagattcaatcttcaggtgagaattttcattgtcaaaacccactggttagatgttgtagcaacatcataaaatcaagagtatcaagaaaataaatgagcatagcaatgctactcttaaaaagatgctatgccacacaaccagaggactttcttgttagcatccctttcctgattccctattttgttaattttaatgataagaagaaagggtgacatttattttgacaagttttaggcatcagctggcatcagtgtttttcaactccattatttgaagtgtaaatcctcacctggggttctctgtgtgcaaagctgtccttttgaagaacagtttggttgatgcatgccttagtagccaaaatgctacactctagacttacaagtgggagttaagagaggtctggaaagtgtccaacaaggaattcacacctctgcctcctttgcaacaacaacatttacacagttggtaagtgggtccataactggcaggatttttaaattgtattttgctcaaatctatgggaacaaaagtcaaggtatcactacctagaagtaatgatatacagttttcttcctagtggcttgaaaatctggacttcctcaattattattcacattttctctcttataggttttctgttttctactttcttttttctcttatctgtgtttccctttcctttgtttggctcattaacttttgactgaattacaattactccttttattaaagtccatattattgtgaatcatttccatgaaaatttctaagaaaactccaaactctctaaatagtagctaacttttatttttttaaaatgagtcgtggggtagtgcttcaccttgagatgctttgaaagagccctaaacattgggaaccattcacctaatttggagacatttctcactggttgtgactacccccttatgatccttcacattcattttatgtccctaaacatcacaatgtaaatatcatttttgatgttccagctcaccagaagattcttacacttggggtaaacactatccatgcattacttactggtaattacctgctggtatataattccatgtagcctttaatatgctgggttatcaaattctgttcactgagttatgaccagataaataatagatatgcacatgaaagatgcaaacttgtgtgattattaaagccagccatgcaggtccatgatagaaacagcaggtgatgactctgcactctcattgtcaaggttagctatatccccagttgcaaaacagccagacttgagctgtgctctggtcatctttgagtttaaggccttttgttgtataaggctgtggaagttgtactccaatggctgaagccatgttgttaatatggctgatgggagcatccctgcagctgaacccagcactttttatgctcccactgtggttgagctttatgtttacagtctcagcaacaacacttatgcatccaaacactcacaaatgaaacctgaaagaatcttttctgagcctcttaaaagaggaaaatgatgataacattaaagactctgaacacccaaggttggtgtcacatataaaaattaagctgatgactttgcagtgactcaagttgtctctttatcatggtttaccaggtagagtgcctggctattactatataatgaagcccactggcttgacttgtaagttcaacctaaaccacaatcctagaccatcatggatttaggagtagattcttcttgaaatcccacatccagaaactagacattagaatgttgaggcagtttcccagagaaacaagcatattgcctcatggatgaaagacttgtagttctagtttcagtgacttgttatatctacttacatacaacagggaggcaagaggattctctgtcatctctggtgactgagtgtaaaatatgtgccaagtctgcagcacagtgaccaaatctgacaatcgagctctggatcaccacttgattatgtagtagactcatttataaagcagcttaggaactaattaaacatggaggatgaattaccttcctatcccttgagataagacatctttcagtttcatgattaaggattgttgctgttttatagttactctgttcatcacagtgtaaatggtgatgcgtgtcgtaggtgtgcagctatttgagggactaagggatggagatattctgtcaaatgaatctcttcagtataccagtttgtgggagggatatgagacatgtggatggcagtgagagatcgtgcctctagatcttgatggaggcttggtgagacacacttaaataagcacgtggaggttagaatagagggcagagtaaaaggaagctccatctgagcaagtacaccaaatgatctcagccctgcaacttgacccaggtagggccaccactacgccttcacttgtcacccaagctccaaccacagagagtttgacaagtttgtgttatgatgttggcttggctttgtatttttaattaactttggatttttagtggttttgtcatataactgtctgagtttggtaggtaggattactttgaaaagggtttactagtgtggtcctccgggtagaatttagctgtaagcatgttgttagccagcctgtagactgttaattacttaataatctcattgggaaaatactagtagttttatatttggatgacataattggaaaaagcagattagctgctactacttttaaaagacttaaggtcgggatgcctttttttccatgtaaggaaatgaaaagacccaaaatcttcaggcaaaaagcaagttgcaaaattagaaaccattggctaaaaatgtgttttgttgagtttccaaatggatgaattttcatttggacattacatcactaaattcattagattttgtctgcattggaaagatactcttctagcatatctttcccaaagatatctaatttggattctgtttcatgcaaatttgcatcccggaggttgaagttggagtttgaggttggaaaatatctttgaaggcagaatcagttgagttgtgagggtgaagcctcacatacttctcaacagacatgataaaattcacctgcatgagttggcaggtgggagaaccaaactggatcactgggtaagactactcagtaaagcaatgaactgcttgcttagagaagcatcactatccccattgagaaaaatgtgtggcaagatgatacagctacacagtatcaaatgaatgggtcaattcagcacccccaaatttaattctgtggggaaaaattattgagccagttgtcagtgttctgttacatgactggcagactaaattcttcatcgttgttgttattgttgttgttgtttctcattttcactcgcacggccttattctcataattaaaatctaattcattttctctttagtgttagtagactccaacaacagaagtggcatctgtgtattcataatcagcatttaccctggcaggagactaatcagataggccggtctcagacattaatcctaccatctgatatttttggtgaaggaaaaagtattaattctctttccatcctcctcctcagaaatatagaagccctctttaccaaaatcatcacattttactctgtaatctaccagctaaaagaaaattgcattgaagccccacaaagccagattgcagttcttgcccctttttgcgtctgacatgagatgttaaagaattattcatagtgctcacattgggttaggggacactgaactgctttttagatccatgatcagtcatcattcttctaagagattggagctttgctgtttcattaactgtgcagtgtagactaatggtgtttaataaaaatcattcaaaatttcaaactcttttgccagtgacctcaattttgttggctctgtgatttgtatcagactttgaggagggaagggggaagtgaaggaagcctacgtccaggcccctgacaggatgctgcagtagcaagctcaagctcgcctgcctgccagcagttgctggtgagcagcagcatgcagaccagctgtgggaagcctcctgaagaatgccccagctgatgctttcagctgggaatagtttgttcctattggggaactcattgttctccagtctctgcagcaggaagccagctgtcatattcggagggaatttcagatgctttacctttttggttttgtcctgcatcactcatgtggctacgaaagtgtctctgagaatagagcccaatgtggtgacaatgggtagtcaaatgcaccccagatgctcaagccctgttgtggttctgcagtgtttatgaaattgggaggaaggagaccctggacagtaagcaaaattggagacactccaacgaggctaagttaatgccgtgttgcccagaacaagatctagcttctcatttggtcagcctagcatgcaaccagtggtgtgctggtaaaatgtttaacaaccagctcgctgagaatagaaagcacctggtttgcaccatttgccaatttccatggcataaatactaccactttagatgattttaagctaccaactgtgatgtcactgaacacatggttggaaagagatgcacgcagttggctcttgcaagcctgggcaaaaatgcttcaacacgccactggatgcagccagtcagagggttcatatttaatatatgtgttcatgtggacacacacagacacacacacacaaactcacccttacacacacacttcgatgactaaaacaattacatagttttaagatatgaatcaatgtgtgaatgtagaaagcttatgataaggccctagaggtatgggttgccctggaagcctaggttttaagcaggagaatagctgagaagaatgaagccctcctgagctgaaaggagagatggatcaatggagatggttccatcatctccttccatatctcacaggtaaaatgggcactcagaaaaccctcacgattgattttttaaaaagataagtgagtgttttttattttattattattgtcatcattattttgatttacaaatgctatttgtaacttttacatgtaactaggataaagtatttacgggaactctatggagaatagcacaatccagaatttactgtgtttttcttttatgtgacgtggaaactcagtaattctcccaccttcacattgttgttcataagaattttactttagttattagggaatctaagttttttgttaacatttgtttttagttaaaagtatctacttactgttttagctctgaactcaaaccagaatatctctgtatcaattgcatgactattcagaaacaataatccaaaccaaaataattctttttccacccagtacgaagaaaactaagctcagtaacaagaaggcataaactaaagtatataatgaggctttcattaaatacacacacacacacactcacacacacacacatacactttttaaatttttaaattaggcctccacacataaatcattttgaaagtagaatagaaaatctcaaagaattcattctcctggtcctgtgcatcttctgcagttaataagaggtttgtatctggaaagatggaagaacttgttctaaaatcttatttttcaaaaaaaaatttccattttctctctgggcctgtatccatggttgaatgttagccctggaggagatccatgtcttactcgctctttctggcccttctgtcttttgcctctgcaattctttttgtagctggcacgatagcagggactgggggtctatcctttcatggtattgctacaatatttgtccttactggaaaatggtaacatccgggtctgatttaattggcattacacttacacagggactctgagcacccccgtcaccacaccagacagtggaccagttttcacagctacaaagagctagaaatgtgtttaacatcatccagtgcatcccctaattcaaaaccatcctcactaatcaatcatattcacccataaatattacaaatgagattgattccatctcaagacaatttgtcaaatacttaattttcttcctggatgattctacttactggatattttagaaagagaaatgtctgagataaaatccctcacatttactcaatataacaaattactgtttctactcctattctgagtagtgcttctgaagattgtttgctgtagtgttgtctttgataaaatgaatgtcagtagtgagccttttagagataccatgctcagacatcctctttgggatcagaagatacctaaaattctccccttttgcccacttggttagatgagtgatatattctttggatcctgcaaagaagagattggtttcttttcttttctggtggtggtagtggttgtatctgtggctgtgatggttgttgttacttgtctctctctctctctggctctggcttttgctttcctgctagtgttctttctctttccaaacaaatagttaaattaaacgtgagcttctgaattgtacttgttcatactttcaaaacataacagattaataaaaatagatgtgtcctgatttaaaacatgccccctggaaaggcatgctgtattatgaaatcgtgataatataactgcattattacatggcagtataaatattagtctgttgaattcatttgtccaattgtataactttgtggagcagtgttttgacctttgatacataattctggagcaagtggagtggttgcaggcagatgagacagtgttatatcaggatttttcaatcaactttagttggaggcctggcaattacaaacatcttcagatgtttctgtaaccattataaatatgaaaaaaacctcttcaaaaaatttcccatagtacttcagtcaagactttttaggtttatcttttttttttcatttctccttttccttttccattatttttcgatgggggggttgttatcattgactgaagaaatattttgattgcaatggtctctctctctctccccctctctctctctctcctctattctttcctccttccctctgtccatcacccctcattaaaatattgaaatctggagtctttgataaatctgcattagaccaggctatatgctaggaatgaaatctgggcaaatatcgatgggttttcaaagaatgctccatgttcattgggccctttcacaccccacagtgataaatgaaaaggatagaggtagttttttcaaaagagcactttaataatatcctctgagacctaatgcagtttaacaaatgactccacctatttttccagtaggtaaattgactgagacttgcaaaatacccctgagagttgtcaggggtgtcttctgcctggtctatagcgtgtgtgtttgctttgtatctaacaggcacattcacgtctcgtgtactcatatgaagtatttcctaacattcccattagcctgtatataagaatcagaaagataatcccaacatgttgtaaatgaagatgtgactctataacctttctcttcttcctggaaaaaaaaggacattttcatgcatattttaaacagaaattttgtatatttaagtgtcatagaaaatatttattgagtaactgggacacaaatgggaatttaattgtcatcatatgctttgtgtgtggggatgcttaccaacaccatgtcgctggaccattgtggcaagccataactgcacaaagagtacacatcgtcagtgtgtgtgtgtgtgtgtgtgtgcgcgcacgcacgtgcgtgtgtgtgtccctgcatgtgcaacatgtctagcttgctgtccttcatgggattttagctttcccttcttgaaaaacattattttacagttccaggaggccctggttacattactatatgaaggcagtgatttgaaatgaaaattcctttcctcttggaagctttggtcataatatcatggttcaattaaacggattccaccggactttgtgatgaaaaaggctctgttaaaatccaattgagtttccaagaggaaattgtagtaggtcaagatgcatgagagggaagatggaggccacctcagctggagaacatgagctgagttgagccctcagtgttgaagttgacttgctccaagctgcagtctaaaaccctggggcccgtgcctggcctatgctccctcccaagtaagtagaggagcagaaccatcaggaacagcctgcctggctcctatgaagaaaacttcctgacgtcctgtccccaaaggaagaccctttccccaagggcaccccaggtggccattaaattgtgatgatcattcagaaagtgcccccttggctttatgagaatccaattagtcttctgaaccaccttttcttgggtgcagatttccaacattcatgctcattgcagatccaccaactgtcactgttcttaacaagcatgctcgtcttgtcagaatttcagtaagttccaatttcctgtacagaccagggtaaactgttctaaaatcaatcaattaatgaaatgttatctggtttttaaaagctggtttcatgtgctttatgtgtataaaactatatctgcctgtgtggctttgcatttcaaatgtgtggcgcacaagcgttttgttggtgctttgttctcagtacagtaactctgtgtacaaacattttaatgtggttttgttgttttccaacaagatgtctctgtaaaaatgatattggctgagctggtgcgttggtttctctcatagaggcattaactatactgccaatgcattgaattatttaaaaatgcaaaataaaatttttatgaaaatctca

SEQ ID NO: 300917 - DNA, 13579 bp, Homo sapiens
cgccgcctgtgcagccgctgccgccgccgccgccgccgccgccgccgccgccgccgccgccgccgctgccgccccggctgccgcgccgcgccgctgcctctgccccggccgcccccgccgccgctgccgccgccggcccgcagccagccaggcgggcggcccagcccgcctgagcccgcagcggctgccgccgcagcgtcgggtcgctgggtgcgcgggctaccgcggaccgagcggacccgagtgggcgaccaggcgcttgcccgcccagtgccactgccgccgcttcctcgccggagcacaggaccagacacctccagcgcccgctgctgctgccgatgcggcccggacacttttagctgggcgggagggctggagagccgggggccgccgagaaccgccagcgagctgtgccgagagccgcgccgacccgctgcgatcagggacaggcgcccgcccgccgccgccgcctggccgctatggatctattcgactttttcagagactgggacttggagcagcagtgtcactatgaacaagaccgtagtgcacttaaaaaaagggaatgggagcggaggaatcaagaagtccagcaagaagacgatctcttttcttcaggctttgatctttttggggagccatacaagacaaacaaaggtgatgcacttgccaaccgagtccagaacacgcttggaaactatgatgaaatgaagaatttgctaactaaccattctaatcagaatcacctagtgggaattccaaagaattctgtgccccagaatcccaacaacaaaaatgaaccaagcttttttccagaacaaaagaacagaataattccacctcaccaggataatacccatccttcagcaccaatgcctccaccttctgttgtgatactgaattcaactctaatacacagcaacagaaaatcaaaacctgagtggtcacgtgatagtcataaccctagcactgtactggcaagccaggccagtggtcagccaaacaagatgcagactttgacacaggaccagtctcaagccaaactggaagacttctttgtctacccagctgaacagccccagattggagaagttgaagagtcaaacccatctgcaaaggaagacagtaaccctaattctagtggagaagatgctttcaaagaaatctttcaatccaattcaccggaagaatctgaattcgccgtgcaagcgcctgggtctcccctagtggcttcctctttattagctcctagcagtggcctttcagttcaaaacttcccaccagggctttactgcaaaacaagcatggggcagcaaaagccaactgcatacgtcagacccatggatggccaggaccaggcaccggacatctcaccaacactgaaaccttcaattgaatttgagaacagctttgggaatctgtcatttggaacactcttggatggaaaacccagtgcagccagttcaaagactaaactgccaaagttcaccatcctccaaacaagtgaagtaagccttcccagtgatccaagctgtgttgaagaaatcttgcgggaatcgcagcatctgaccccaggattcaccttacaaaagtggaatgacccaaccaccagagcttctacaaagatgcttgaggatgacctgaagctgagcagtgatgaagatgaccttgagcctgtgaagaccttgaccactcagtgcactgccactgagctctaccaggctgttgaaaaggcaaaacctaggaataatcctgtgaacccacccttggccactccccagcccccacctgcagtgcaagccagcgggggttctggcagctccagcgaatcggagagcagctctgagtcggattcagacactgaaagtagcaccactgacagcgaatctaatgaggcacctcgtgtggcaactccagagcctgagccaccctcaaccaacaagtggcaactggataaatggcttaacaaagtgacatcccagaacaagtcttttatttgtggccaaaatgaaacacccatggagactatttctctgcctcctccaatcatccaaccaatggaagtccagatgaaagtgaagacgaatgccagtcaggtcccagctgaacccaaagaaaggcctctcctcagtctcattagggagaaagcccgtccacggcccactcagaaaattccagaaacaaaggctttgaagcataagttgtcaacaactagtgagacagtgtctcaaaggacaattgggaaaaaacagcccaaaaaagttgagaagaacaccagcactgacgagtttacctggcccaaaccaaatattaccagcagcactcccaaagaaaaagaaagtgtggagcttcatgacccaccaagaggccgcaacaaagccactgcccacaaaccagcccctaggaaagaaccaagacctaacatccctttggctcccgagaagaagaagtacagagggcctggcaagattgtgccaaagtctcgggaattcattgaaacagattcatctacatctgactccaacacagatcaggaagagaccctgcaaatcaaagtcctgcctccgtgcattatttctggaggtaatactgccaaatccaaggaaatctgtggtgccagcctgaccctcagcaccttaatgagtagcagtggcagcaacaacaacttatccatcagtaatgaagagccaacattttcacctattcctgtcatgcaaactgaaatcctgtcccctctgcgagatcatgagaacctgaaaaacctctgggtgaagattgaccttgacttactctctagagtacctggccacagctcactccatgcagcacctgccaagccagaccacaaggagactgccacaaaacccaagcgtcagacagctgtcacagctgtggagaaaccagcccctaagggcaaacgtaagcacaagccaatagaagttgcagagaagatccctgagaagaagcagcgcctggaggaggccacaactatctgcttgctccctccttgcatctcaccagccccaccccacaagcctcccaacactagagaaaataattcatccaggagagcaaatagaagaaaggaagaaaaactatttcctcctccactttccccactgccagaggaccctccacgccgcagaaatgtcagtggcaataatggtccctttggtcaagacaaaaacatcgccatgactggacaaatcacatctaccaaacctaagagaactgaaggcaaattctgtgctactttcaaagggatatcggtaaatgagggagacactccaaaaaaggcatcctctgccaccatcactgtcaccaatactgctattgccactgctactgtcactgctactgccattgtcaccaccactgtcacagctactgccaccgccacggccaccaccacaactactaccactaccatttccaccatcacctctaccatcactactggcctcatggatagcagtcacctggagatgacgtcctgggcggctctgccccttctatccagcagcagcactaatgtccggagacccaagctcacttttgatgactcggttcacaatgctgattattacatgcaagaagctaagaagctgaagcacaaagctgatgcactgttcgagaaatttggcaaagctgtgaattatgctgatgccgccctctccttcactgaatgtggcaatgccatggaacgcgaccctctggaagcaaagtccccatacaccatgtactctgagactgtggagctcctcaggtatgcaatgaggctgaagaactttgcaagtcccttggcttcggatggggacaaaaagctagcagtactatgctaccgatgtttatcactcctctatttgagaatgtttaagctgaagaaggaccatgctatgaagtactccagatcactgatggaatattttaagcaaaatgcttcaaaagtcgcacagataccctctccatgggtaagcaatggaaagaacactccatccccagtgtctctcaacaacgtctcccccatcaacgcaatggggaactgtaacaatggcccagtcaccattccccagcgcattcaccacatggctgccagccacgtcaacatcactagcaatgtgttacggggctatgaacactgggatatggccgacaaactgacaagagaaaacaaagaattctttggtgatctggacacgctgatggggcctctgacccagcacagcagcatgaccaatcttgtccgctacgttcgccaaggactgtgttggctgcgcatcgatgcccacttgttgtagtgggtgttctcagatctctagcatcacgacccatcactctacctctaccagcgcactgatggtcactggtggaactccactcactggggaacgttctctttggttatgtttgtttttatgcttcttttgttatctgtaaaaaacagaagtcattgtaagttgacactacaacttaagggcagtgtacgttttattacttagtcattttttttcttttagcatttgatatgcatttctcagattccaccatctttttgtgctttatggaatgacagtccctacaatattgttttaagcccacactacccaaaacaaagaatgggaagcacttgtgataaagacaggctcctgagaaatgcaacaagtggtcttacatatacatgagaacttagacacaagggaccatcccccaaactctactcttatacccagaaaagaacatatttcagaatctgtcaaacttttgtgtatcccacagattcaatcttcaggtgagaattttcattgtcaaaacccactggttagatgttgtagcaacatcataaaatcaagagtatcaagaaaataaatgagcatagcaatgctactcttaaaaagatgctatgccacacaaccagaggactttcttgttagcatccctttcctgattccctattttgttaattttaatgataagaagaaagggtgacatttattttgacaagttttaggcatcagctggcatcagtgtttttcaactccattatttgaagtgtaaatcctcacctggggttctctgtgtgcaaagctgtccttttgaagaacagtttggttgatgcatgccttagtagccaaaatgctacactctagacttacaagtgggagttaagagaggtctggaaagtgtccaacaaggaattcacacctctgcctcctttgcaacaacaacatttacacagttggtaagtgggtccataactggcaggatttttaaattgtattttgctcaaatctatgggaacaaaagtcaaggtatcactacctagaagtaatgatatacagttttcttcctagtggcttgaaaatctggacttcctcaattattattcacattttctctcttataggttttctgttttctactttcttttttctcttatctgtgtttccctttcctttgtttggctcattaacttttgactgaattacaattactccttttattaaagtccatattattgtgaatcatttccatgaaaatttctaagaaaactccaaactctctaaatagtagctaacttttatttttttaaaatgagtcgtggggtagtgcttcaccttgagatgctttgaaagagccctaaacattgggaaccattcacctaatttggagacatttctcactggttgtgactacccccttatgatccttcacattcattttatgtccctaaacatcacaatgtaaatatcatttttgatgttccagctcaccagaagattcttacacttggggtaaacactatccatgcattacttactggtaattacctgctggtatataattccatgtagcctttaatatgctgggttatcaaattctgttcactgagttatgaccagataaataatagatatgcacatgaaagatgcaaacttgtgtgattattaaagccagccatgcaggtccatgatagaaacagcaggtgatgactctgcactctcattgtcaaggttagctatatccccagttgcaaaacagccagacttgagctgtgctctggtcatctttgagtttaaggccttttgttgtataaggctgtggaagttgtactccaatggctgaagccatgttgttaatatggctgatgggagcatccctgcagctgaacccagcactttttatgctcccactgtggttgagctttatgtttacagtctcagcaacaacacttatgcatccaaacactcacaaatgaaacctgaaagaatcttttctgagcctcttaaaagaggaaaatgatgataacattaaagactctgaacacccaaggttggtgtcacatataaaaattaagctgatgactttgcagtgactcaagttgtctctttatcatggtttaccaggtagagtgcctggctattactatataatgaagcccactggcttgacttgtaagttcaacctaaaccacaatcctagaccatcatggatttaggagtagattcttcttgaaatcccacatccagaaactagacattagaatgttgaggcagtttcccagagaaacaagcatattgcctcatggatgaaagacttgtagttctagtttcagtgacttgttatatctacttacatacaacagggaggcaagaggattctctgtcatctctggtgactgagtgtaaaatatgtgccaagtctgcagcacagtgaccaaatctgacaatcgagctctggatcaccacttgattatgtagtagactcatttataaagcagcttaggaactaattaaacatggaggatgaattaccttcctatcccttgagataagacatctttcagtttcatgattaaggattgttgctgttttatagttactctgttcatcacagtgtaaatggtgatgcgtgtcgtaggtgtgcagctatttgagggactaagggatggagatattctgtcaaatgaatctcttcagtataccagtttgtgggagggatatgagacatgtggatggcagtgagagatcgtgcctctagatcttgatggaggcttggtgagacacacttaaataagcacgtggaggttagaatagagggcagagtaaaaggaagctccatctgagcaagtacaccaaatgatctcagccctgcaacttgacccaggtagggccaccactacgccttcacttgtcacccaagctccaaccacagagagtttgacaagtttgtgttatgatgttggcttggctttgtatttttaattaactttggatttttagtggttttgtcatataactgtctgagtttggtaggtaggattactttgaaaagggtttactagtgtggtcctccgggtagaatttagctgtaagcatgttgttagccagcctgtagactgttaattacttaataatctcattgggaaaatactagtagttttatatttggatgacataattggaaaaagcagattagctgctactacttttaaaagacttaaggtcgggatgcctttttttccatgtaaggaaatgaaaagacccaaaatcttcaggcaaaaagcaagttgcaaaattagaaaccattggctaaaaatgtgttttgttgagtttccaaatggatgaattttcatttggacattacatcactaaattcattagattttgtctgcattggaaagatactcttctagcatatctttcccaaagatatctaatttggattctgtttcatgcaaatttgcatcccggaggttgaagttggagtttgaggttggaaaatatctttgaaggcagaatcagttgagttgtgagggtgaagcctcacatacttctcaacagacatgataaaattcacctgcatgagttggcaggtgggagaaccaaactggatcactgggtaagactactcagtaaagcaatgaactgcttgcttagagaagcatcactatccccattgagaaaaatgtgtggcaagatgatacagctacacagtatcaaatgaatgggtcaattcagcacccccaaatttaattctgtggggaaaaattattgagccagttgtcagtgttctgttacatgactggcagactaaattcttcatcgttgttgttattgttgttgttgtttctcattttcactcgcacggccttattctcataattaaaatctaattcattttctctttagtgttagtagactccaacaacagaagtggcatctgtgtattcataatcagcatttaccctggcaggagactaatcagataggccggtctcagacattaatcctaccatctgatatttttggtgaaggaaaaagtattaattctctttccatcctcctcctcagaaatatagaagccctctttaccaaaatcatcacattttactctgtaatctaccagctaaaagaaaattgcattgaagccccacaaagccagattgcagttcttgcccctttttgcgtctgacatgagatgttaaagaattattcatagtgctcacattgggttaggggacactgaactgctttttagatccatgatcagtcatcattcttctaagagattggagctttgctgtttcattaactgtgcagtgtagactaatggtgtttaataaaaatcattcaaaatttcaaactcttttgccagtgacctcaattttgttggctctgtgatttgtatcagactttgaggagggaagggggaagtgaaggaagcctacgtccaggcccctgacaggatgctgcagtagcaagctcaagctcgcctgcctgccagcagttgctggtgagcagcagcatgcagaccagctgtgggaagcctcctgaagaatgccccagctgatgctttcagctgggaatagtttgttcctattggggaactcattgttctccagtctctgcagcaggaagccagctgtcatattcggagggaatttcagatgctttacctttttggttttgtcctgcatcactcatgtggctacgaaagtgtctctgagaatagagcccaatgtggtgacaatgggtagtcaaatgcaccccagatgctcaagccctgttgtggttctgcagtgtttatgaaattgggaggaaggagaccctggacagtaagcaaaattggagacactccaacgaggctaagttaatgccgtgttgcccagaacaagatctagcttctcatttggtcagcctagcatgcaaccagtggtgtgctggtaaaatgtttaacaaccagctcgctgagaatagaaagcacctggtttgcaccatttgccaatttccatggcataaatactaccactttagatgattttaagctaccaactgtgatgtcactgaacacatggttggaaagagatgcacgcagttggctcttgcaagcctgggcaaaaatgcttcaacacgccactggatgcagccagtcagagggttcatatttaatatatgtgttcatgtggacacacacagacacacacacacaaactcacccttacacacacacttcgatgactaaaacaattacatagttttaagatatgaatcaatgtgtgaatgtagaaagcttatgataaggccctagaggtatgggttgccctggaagcctaggttttaagcaggagaatagctgagaagaatgaagccctcctgagctgaaaggagagatggatcaatggagatggttccatcatctccttccatatctcacaggtaaaatgggcactcagaaaaccctcacgattgattttttaaaaagataagtgagtgttttttattttattattattgtcatcattattttgatttacaaatgctatttgtaacttttacatgtaactaggataaagtatttacgggaactctatggagaatagcacaatccagaatttactgtgtttttcttttatgtgacgtggaaactcagtaattctcccaccttcacattgttgttcataagaattttactttagttattagggaatctaagttttttgttaacatttgtttttagttaaaagtatctacttactgttttagctctgaactcaaaccagaatatctctgtatcaattgcatgactattcagaaacaataatccaaaccaaaataattctttttccacccagtacgaagaaaactaagctcagtaacaagaaggcataaactaaagtatataatgaggctttcattaaatacacacacacacacactcacacacacacacatacactttttaaatttttaaattaggcctccacacataaatcattttgaaagtagaatagaaaatctcaaagaattcattctcctggtcctgtgcatcttctgcagttaataagaggtttgtatctggaaagatggaagaacttgttctaaaatcttatttttcaaaaaaaaatttccattttctctctgggcctgtatccatggttgaatgttagccctggaggagatccatgtcttactcgctctttctggcccttctgtcttttgcctctgcaattctttttgtagctggcacgatagcagggactgggggtctatcctttcatggtattgctacaatatttgtccttactggaaaatggtaacatccgggtctgatttaattggcattacacttacacagggactctgagcacccccgtcaccacaccagacagtggaccagttttcacagctacaaagagctagaaatgtgtttaacatcatccagtgcatcccctaattcaaaaccatcctcactaatcaatcatattcacccataaatattacaaatgagattgattccatctcaagacaatttgtcaaatacttaattttcttcctggatgattctacttactggatattttagaaagagaaatgtctgagataaaatccctcacatttactcaatataacaaattactgtttctactcctattctgagtagtgcttctgaagattgtttgctgtagtgttgtctttgataaaatgaatgtcagtagtgagccttttagagataccatgctcagacatcctctttgggatcagaagatacctaaaattctccccttttgcccacttggttagatgagtgatatattctttggatcctgcaaagaagagattggtttcttttcttttctggtggtggtagtggttgtatctgtggctgtgatggttgttgttacttgtctctctctctctctggctctggcttttgctttcctgctagtgttctttctctttccaaacaaatagttaaattaaacgtgagcttctgaattgtacttgttcatactttcaaaacataacagattaataaaaatagatgtgtcctgatttaaaacatgccccctggaaaggcatgctgtattatgaaatcgtgataatataactgcattattacatggcagtataaatattagtctgttgaattcatttgtccaattgtataactttgtggagcagtgttttgacctttgatacataattctggagcaagtggagtggttgcaggcagatgagacagtgttatatcaggatttttcaatcaactttagttggaggcctggcaattacaaacatcttcagatgtttctgtaaccattataaatatgaaaaaaacctcttcaaaaaatttcccatagtacttcagtcaagactttttaggtttatcttttttttttcatttctccttttccttttccattatttttcgatgggggggttgttatcattgactgaagaaatattttgattgcaatggtctctctctctctccccctctctctctctctcctctattctttcctccttccctctgtccatcacccctcattaaaatattgaaatctggagtctttgataaatctgcattagaccaggctatatgctaggaatgaaatctgggcaaatatcgatgggttttcaaagaatgctccatgttcattgggccctttcacaccccacagtgataaatgaaaaggatagaggtagttttttcaaaagagcactttaataatatcctctgagacctaatgcagtttaacaaatgactccacctatttttccagtaggtaaattgactgagacttgcaaaatacccctgagagttgtcaggggtgtcttctgcctggtctatagcgtgtgtgtttgctttgtatctaacaggcacattcacgtctcgtgtactcatatgaagtatttcctaacattcccattagcctgtatataagaatcagaaagataatcccaacatgttgtaaatgaagatgtgactctataacctttctcttcttcctggaaaaaaaaggacattttcatgcatattttaaacagaaattttgtatatttaagtgtcatagaaaatatttattgagtaactgggacacaaatgggaatttaattgtcatcatatgctttgtgtgtggggatgcttaccaacaccatgtcgctggaccattgtggcaagccataactgcacaaagagtacacatcgtcagtgtgtgtgtgtgtgtgtgtgtgcgcgcacgcacgtgcgtgtgtgtgtccctgcatgtgcaacatgtctagcttgctgtccttcatgggattttagctttcccttcttgaaaaacattattttacagttccaggaggccctggttacattactatatgaaggcagtgatttgaaatgaaaattcctttcctcttggaagctttggtcataatatcatggttcaattaaacggattccaccggactttgtgatgaaaaaggctctgttaaaatccaattgagtttccaagaggaaattgtagtaggtcaagatgcatgagagggaagatggaggccacctcagctggagaacatgagctgagttgagccctcagtgttgaagttgacttgctccaagctgcagtctaaaaccctggggcccgtgcctggcctatgctccctcccaagtaagtagaggagcagaaccatcaggaacagcctgcctggctcctatgaagaaaacttcctgacgtcctgtccccaaaggaagaccctttccccaagggcaccccaggtggccattaaattgtgatgatcattcagaaagtgcccccttggctttatgagaatccaattagtcttctgaaccaccttttcttgggtgcagatttccaacattcatgctcattgcagatccaccaactgtcactgttcttaacaagcatgctcgtcttgtcagaatttcagtaagttccaatttcctgtacagaccagggtaaactgttctaaaatcaatcaattaatgaaatgttatctggtttttaaaagctggtttcatgtgctttatgtgtataaaactatatctgcctgtgtggctttgcatttcaaatgtgtggcgcacaagcgttttgttggtgctttgttctcagtacagtaactctgtgtacaaacattttaatgtggttttgttgttttccaacaagatgtctctgtaaaaatgatattggctgagctggtgcgttggtttctctcatagaggcattaactatactgccaatgcattgaattatttaaaaatgcaaaataaaatttttatgaaaatctca

SEQ ID NO: 300918 - DNA, 13213 bp, Homo sapiens
agagccgactgcatacgtcagacccacggatggccaggaccaggcaccggacatctcaccaacactgaaaccttcaattgaatttgagaacagctttgggaatctgtcatttggaacactcttggatggaaaacccagtgcacccagttcaaaagactaaactgccaaagttcaccatcctccaaacaagtgaaacaaacaaaggtgatgcacttgccaaccgagtccagaacacgcttggaaactatgatgaaatgaagaatttgctaactaaccattctaatcagaatcacctagtgggaattccaaagaattctgtgccccagaatcccaacaacaaaaatgaaccaagcttttttccagaacaaaagaacagaataattccacctcaccaggataatacccatccttcagcaccaatgcctccaccttctgttgtgatactgaattcaactctaatacacagcaacagaaaatcaaaacctgagtggtcacgtgatagtcataaccctagcactgtactggcaagccaggccagtggtcagccaaacaagatgcagactttgacacaggaccagtctcaagccaaactggaagacttctttgtctacccagctgaacagccccagattggagaagttgaagagtcaaacccatctgcaaaggaagacagtaaccctaattctagtggagaagatgctttcaaagaaatctttcaatccaattcaccggaagaatctgaattcgccgtgcaagcgcctgggtctcccctagtggcttcctctttattagctcctagcagtggcctttcagttcaaaacttcccaccagggctttactgcaaaacaagcatggggcagcaaaagccaactgcatacgtcagacccatggatggccaggaccaggcaccggacatctcaccaacactgaaaccttcaattgaatttgagaacagctttgggaatctgtcatttggaacactcttggatggaaaacccagtgcagccagttcaaagactaaactgccaaagttcaccatcctccaaacaagtgaagtaagccttcccagtgatccaagctgtgttgaagaaatcttgcgggagatgacccattcctggcctactcctctcacttccatgcatactgctggacactctgagcagagcaccttttccatcccaggacaggaatcgcagcatctgaccccaggattcaccttacaaaagtggaatgacccaaccaccagagcttctacaaagatgcttgaggatgacctgaagctgagcagtgatgaagatgaccttgagcctgtgaagaccttgaccactcagtgcactgccactgagctctaccaggctgttgaaaaggcaaaacctaggaataatcctgtgaacccacccttggccactccccagcccccacctgcagtgcaagccagcgggggttctggcagctccagcgaatcggagagcagctctgagtcggattcagacactgaaagtagcaccactgacagcgaatctaatgaggcacctcgtgtggcaactccagagcctgagccaccctcaaccaacaagtggcaactggataaatggcttaacaaagtgacatcccagaacaagtcttttatttgtggccaaaatgaaacacccatggagactatttctctgcctcctccaatcatccaaccaatggaagtccagatgaaagtgaagacgaatgccagtcaggtcccagctgaacccaaagaaaggcctctcctcagtctcattagggagaaagcccgtccacggcccactcagaaaattccagaaacaaaggctttgaagcataagttgtcaacaactagtgagacagtgtctcaaaggacaattgggaaaaaacagcccaaaaaagttgagaagaacaccagcactgacgagtttacctggcccaaaccaaatattaccagcagcactcccaaagaaaaagaaagtgtggagcttcatgacccaccaagaggccgcaacaaagccactgcccacaaaccagcccctaggaaagaaccaagacctaacatccctttggctcccgagaagaagaagtacagagggcctggcaagattgtgccaaagtctcgggaattcattgaaacagattcatctacatctgactccaacacagatcaggaagagaccctgcaaatcaaagtcctgcctccgtgcattatttctggaggtaatactgccaaatccaaggaaatctgtggtgccagcctgaccctcagcaccttaatgagtagcagtggcagcaacaacaacttatccatcagtaatgaagagccaacattttcacctattcctgtcatgcaaactgaaatcctgtcccctctgcgagatcatgagaacctgaaaaacctctgggtgaagattgaccttgacttactctctagagtacctggccacagctcactccatgcagcacctgccaagccagaccacaaggagactgccacaaaacccaagcgtcagacagctgtcacagctgtggagaaaccagcccctaagggcaaacgtaagcacaagccaatagaagttgcagagaagatccctgagaagaagcagcgcctggaggaggccacaactatctgcttgctccctccttgcatctcaccagccccaccccacaagcctcccaacactagagaaaataattcatccaggagagcaaatagaagaaaggaagaaaaactatttcctcctccactttccccactgccagaggaccctccacgccgcagaaatgtcagtggcaataatggtccctttggtcaagacaaaaacatcgccatgactggacaaatcacatctaccaaacctaagagaactgaaggcaaattctgtgctactttcaaagggatatcggtaaatgagggagacactccaaaaaaggcatcctctgccaccatcactgtcaccaatactgctattgccactgctactgtcactgctactgccattgtcaccaccactgtcacagctactgccaccgccacggccaccaccacaactactaccactaccatttccaccatcacctctaccatcactactggcctcatggatagcagtcacctggagatgacgtcctgggcggctctgccccttctatccagcagcagcactaatgtccggagacccaagctcacttttgatgactcggttcacaatgctgattattacatgcaagaagctaagaagctgaagcacaaagctgatgcactgttcgagaaatttggcaaagctgtgaattatgctgatgccgccctctccttcactgaatgtggcaatgccatggaacgcgaccctctggaagcaaagtccccatacaccatgtactctgagactgtggagctcctcaggtatgcaatgaggctgaagaactttgcaagtcccttggcttcggatggggacaaaaagctagcagtactatgctaccgatgtttatcactcctctatttgagaatgtttaagctgaagaaggaccatgctatgaagtactccagatcactgatggaatattttaagcaaaatgcttcaaaagtcgcacagataccctctccatgggtaagcaatggaaagaacactccatccccagtgtctctcaacaacgtctcccccatcaacgcaatggggaactgtaacaatggcccagtcaccattccccagcgcattcaccacatggctgccagccacgtcaacatcactagcaatgtgttacggggctatgaacactgggatatggccgacaaactgacaagagaaaacaaagaattctttggtgatctggacacgctgatggggcctctgacccagcacagcagcatgaccaatcttgtccgctacgttcgccaaggactgtgttggctgcgcatcgatgcccacttgttgtagtgggtgttctcagatctctagcatcacgacccatcactctacctctaccagcgcactgatggtcactggtggaactccactcactggggaacgttctctttggttatgtttgtttttatgcttcttttgttatctgtaaaaaacagaagtcattgtaagttgacactacaacttaagggcagtgtacgttttattacttagtcattttttttcttttagcatttgatatgcatttctcagattccaccatctttttgtgctttatggaatgacagtccctacaatattgttttaagcccacactacccaaaacaaagaatgggaagcacttgtgataaagacaggctcctgagaaatgcaacaagtggtcttacatatacatgagaacttagacacaagggaccatcccccaaactctactcttatacccagaaaagaacatatttcagaatctgtcaaacttttgtgtatcccacagattcaatcttcaggtgagaattttcattgtcaaaacccactggttagatgttgtagcaacatcataaaatcaagagtatcaagaaaataaatgagcatagcaatgctactcttaaaaagatgctatgccacacaaccagaggactttcttgttagcatccctttcctgattccctattttgttaattttaatgataagaagaaagggtgacatttattttgacaagttttaggcatcagctggcatcagtgtttttcaactccattatttgaagtgtaaatcctcacctggggttctctgtgtgcaaagctgtccttttgaagaacagtttggttgatgcatgccttagtagccaaaatgctacactctagacttacaagtgggagttaagagaggtctggaaagtgtccaacaaggaattcacacctctgcctcctttgcaacaacaacatttacacagttggtaagtgggtccataactggcaggatttttaaattgtattttgctcaaatctatgggaacaaaagtcaaggtatcactacctagaagtaatgatatacagttttcttcctagtggcttgaaaatctggacttcctcaattattattcacattttctctcttataggttttctgttttctactttcttttttctcttatctgtgtttccctttcctttgtttggctcattaacttttgactgaattacaattactccttttattaaagtccatattattgtgaatcatttccatgaaaatttctaagaaaactccaaactctctaaatagtagctaacttttatttttttaaaatgagtcgtggggtagtgcttcaccttgagatgctttgaaagagccctaaacattgggaaccattcacctaatttggagacatttctcactggttgtgactacccccttatgatccttcacattcattttatgtccctaaacatcacaatgtaaatatcatttttgatgttccagctcaccagaagattcttacacttggggtaaacactatccatgcattacttactggtaattacctgctggtatataattccatgtagcctttaatatgctgggttatcaaattctgttcactgagttatgaccagataaataatagatatgcacatgaaagatgcaaacttgtgtgattattaaagccagccatgcaggtccatgatagaaacagcaggtgatgactctgcactctcattgtcaaggttagctatatccccagttgcaaaacagccagacttgagctgtgctctggtcatctttgagtttaaggccttttgttgtataaggctgtggaagttgtactccaatggctgaagccatgttgttaatatggctgatgggagcatccctgcagctgaacccagcactttttatgctcccactgtggttgagctttatgtttacagtctcagcaacaacacttatgcatccaaacactcacaaatgaaacctgaaagaatcttttctgagcctcttaaaagaggaaaatgatgataacattaaagactctgaacacccaaggttggtgtcacatataaaaattaagctgatgactttgcagtgactcaagttgtctctttatcatggtttaccaggtagagtgcctggctattactatataatgaagcccactggcttgacttgtaagttcaacctaaaccacaatcctagaccatcatggatttaggagtagattcttcttgaaatcccacatccagaaactagacattagaatgttgaggcagtttcccagagaaacaagcatattgcctcatggatgaaagacttgtagttctagtttcagtgacttgttatatctacttacatacaacagggaggcaagaggattctctgtcatctctggtgactgagtgtaaaatatgtgccaagtctgcagcacagtgaccaaatctgacaatcgagctctggatcaccacttgattatgtagtagactcatttataaagcagcttaggaactaattaaacatggaggatgaattaccttcctatcccttgagataagacatctttcagtttcatgattaaggattgttgctgttttatagttactctgttcatcacagtgtaaatggtgatgcgtgtcgtaggtgtgcagctatttgagggactaagggatggagatattctgtcaaatgaatctcttcagtataccagtttgtgggagggatatgagacatgtggatggcagtgagagatcgtgcctctagatcttgatggaggcttggtgagacacacttaaataagcacgtggaggttagaatagagggcagagtaaaaggaagctccatctgagcaagtacaccaaatgatctcagccctgcaacttgacccaggtagggccaccactacgccttcacttgtcacccaagctccaaccacagagagtttgacaagtttgtgttatgatgttggcttggctttgtatttttaattaactttggatttttagtggttttgtcatataactgtctgagtttggtaggtaggattactttgaaaagggtttactagtgtggtcctccgggtagaatttagctgtaagcatgttgttagccagcctgtagactgttaattacttaataatctcattgggaaaatactagtagttttatatttggatgacataattggaaaaagcagattagctgctactacttttaaaagacttaaggtcgggatgcctttttttccatgtaaggaaatgaaaagacccaaaatcttcaggcaaaaagcaagttgcaaaattagaaaccattggctaaaaatgtgttttgttgagtttccaaatggatgaattttcatttggacattacatcactaaattcattagattttgtctgcattggaaagatactcttctagcatatctttcccaaagatatctaatttggattctgtttcatgcaaatttgcatcccggaggttgaagttggagtttgaggttggaaaatatctttgaaggcagaatcagttgagttgtgagggtgaagcctcacatacttctcaacagacatgataaaattcacctgcatgagttggcaggtgggagaaccaaactggatcactgggtaagactactcagtaaagcaatgaactgcttgcttagagaagcatcactatccccattgagaaaaatgtgtggcaagatgatacagctacacagtatcaaatgaatgggtcaattcagcacccccaaatttaattctgtggggaaaaattattgagccagttgtcagtgttctgttacatgactggcagactaaattcttcatcgttgttgttattgttgttgttgtttctcattttcactcgcacggccttattctcataattaaaatctaattcattttctctttagtgttagtagactccaacaacagaagtggcatctgtgtattcataatcagcatttaccctggcaggagactaatcagataggccggtctcagacattaatcctaccatctgatatttttggtgaaggaaaaagtattaattctctttccatcctcctcctcagaaatatagaagccctctttaccaaaatcatcacattttactctgtaatctaccagctaaaagaaaattgcattgaagccccacaaagccagattgcagttcttgcccctttttgcgtctgacatgagatgttaaagaattattcatagtgctcacattgggttaggggacactgaactgctttttagatccatgatcagtcatcattcttctaagagattggagctttgctgtttcattaactgtgcagtgtagactaatggtgtttaataaaaatcattcaaaatttcaaactcttttgccagtgacctcaattttgttggctctgtgatttgtatcagactttgaggagggaagggggaagtgaaggaagcctacgtccaggcccctgacaggatgctgcagtagcaagctcaagctcgcctgcctgccagcagttgctggtgagcagcagcatgcagaccagctgtgggaagcctcctgaagaatgccccagctgatgctttcagctgggaatagtttgttcctattggggaactcattgttctccagtctctgcagcaggaagccagctgtcatattcggagggaatttcagatgctttacctttttggttttgtcctgcatcactcatgtggctacgaaagtgtctctgagaatagagcccaatgtggtgacaatgggtagtcaaatgcaccccagatgctcaagccctgttgtggttctgcagtgtttatgaaattgggaggaaggagaccctggacagtaagcaaaattggagacactccaacgaggctaagttaatgccgtgttgcccagaacaagatctagcttctcatttggtcagcctagcatgcaaccagtggtgtgctggtaaaatgtttaacaaccagctcgctgagaatagaaagcacctggtttgcaccatttgccaatttccatggcataaatactaccactttagatgattttaagctaccaactgtgatgtcactgaacacatggttggaaagagatgcacgcagttggctcttgcaagcctgggcaaaaatgcttcaacacgccactggatgcagccagtcagagggttcatatttaatatatgtgttcatgtggacacacacagacacacacacacaaactcacccttacacacacacttcgatgactaaaacaattacatagttttaagatatgaatcaatgtgtgaatgtagaaagcttatgataaggccctagaggtatgggttgccctggaagcctaggttttaagcaggagaatagctgagaagaatgaagccctcctgagctgaaaggagagatggatcaatggagatggttccatcatctccttccatatctcacaggtaaaatgggcactcagaaaaccctcacgattgattttttaaaaagataagtgagtgttttttattttattattattgtcatcattattttgatttacaaatgctatttgtaacttttacatgtaactaggataaagtatttacgggaactctatggagaatagcacaatccagaatttactgtgtttttcttttatgtgacgtggaaactcagtaattctcccaccttcacattgttgttcataagaattttactttagttattagggaatctaagttttttgttaacatttgtttttagttaaaagtatctacttactgttttagctctgaactcaaaccagaatatctctgtatcaattgcatgactattcagaaacaataatccaaaccaaaataattctttttccacccagtacgaagaaaactaagctcagtaacaagaaggcataaactaaagtatataatgaggctttcattaaatacacacacacacacactcacacacacacacatacactttttaaatttttaaattaggcctccacacataaatcattttgaaagtagaatagaaaatctcaaagaattcattctcctggtcctgtgcatcttctgcagttaataagaggtttgtatctggaaagatggaagaacttgttctaaaatcttatttttcaaaaaaaaatttccattttctctctgggcctgtatccatggttgaatgttagccctggaggagatccatgtcttactcgctctttctggcccttctgtcttttgcctctgcaattctttttgtagctggcacgatagcagggactgggggtctatcctttcatggtattgctacaatatttgtccttactggaaaatggtaacatccgggtctgatttaattggcattacacttacacagggactctgagcacccccgtcaccacaccagacagtggaccagttttcacagctacaaagagctagaaatgtgtttaacatcatccagtgcatcccctaattcaaaaccatcctcactaatcaatcatattcacccataaatattacaaatgagattgattccatctcaagacaatttgtcaaatacttaattttcttcctggatgattctacttactggatattttagaaagagaaatgtctgagataaaatccctcacatttactcaatataacaaattactgtttctactcctattctgagtagtgcttctgaagattgtttgctgtagtgttgtctttgataaaatgaatgtcagtagtgagccttttagagataccatgctcagacatcctctttgggatcagaagatacctaaaattctccccttttgcccacttggttagatgagtgatatattctttggatcctgcaaagaagagattggtttcttttcttttctggtggtggtagtggttgtatctgtggctgtgatggttgttgttacttgtctctctctctctctggctctggcttttgctttcctgctagtgttctttctctttccaaacaaatagttaaattaaacgtgagcttctgaattgtacttgttcatactttcaaaacataacagattaataaaaatagatgtgtcctgatttaaaacatgccccctggaaaggcatgctgtattatgaaatcgtgataatataactgcattattacatggcagtataaatattagtctgttgaattcatttgtccaattgtataactttgtggagcagtgttttgacctttgatacataattctggagcaagtggagtggttgcaggcagatgagacagtgttatatcaggatttttcaatcaactttagttggaggcctggcaattacaaacatcttcagatgtttctgtaaccattataaatatgaaaaaaacctcttcaaaaaatttcccatagtacttcagtcaagactttttaggtttatcttttttttttcatttctccttttccttttccattatttttcgatgggggggttgttatcattgactgaagaaatattttgattgcaatggtctctctctctctccccctctctctctctctcctctattctttcctccttccctctgtccatcacccctcattaaaatattgaaatctggagtctttgataaatctgcattagaccaggctatatgctaggaatgaaatctgggcaaatatcgatgggttttcaaagaatgctccatgttcattgggccctttcacaccccacagtgataaatgaaaaggatagaggtagttttttcaaaagagcactttaataatatcctctgagacctaatgcagtttaacaaatgactccacctatttttccagtaggtaaattgactgagacttgcaaaatacccctgagagttgtcaggggtgtcttctgcctggtctatagcgtgtgtgtttgctttgtatctaacaggcacattcacgtctcgtgtactcatatgaagtatttcctaacattcccattagcctgtatataagaatcagaaagataatcccaacatgttgtaaatgaagatgtgactctataacctttctcttcttcctggaaaaaaaaggacattttcatgcatattttaaacagaaattttgtatatttaagtgtcatagaaaatatttattgagtaactgggacacaaatgggaatttaattgtcatcatatgctttgtgtgtggggatgcttaccaacaccatgtcgctggaccattgtggcaagccataactgcacaaagagtacacatcgtcagtgtgtgtgtgtgtgtgtgtgtgcgcgcacgcacgtgcgtgtgtgtgtccctgcatgtgcaacatgtctagcttgctgtccttcatgggattttagctttcccttcttgaaaaacattattttacagttccaggaggccctggttacattactatatgaaggcagtgatttgaaatgaaaattcctttcctcttggaagctttggtcataatatcatggttcaattaaacggattccaccggactttgtgatgaaaaaggctctgttaaaatccaattgagtttccaagaggaaattgtagtaggtcaagatgcatgagagggaagatggaggccacctcagctggagaacatgagctgagttgagccctcagtgttgaagttgacttgctccaagctgcagtctaaaaccctggggcccgtgcctggcctatgctccctcccaagtaagtagaggagcagaaccatcaggaacagcctgcctggctcctatgaagaaaacttcctgacgtcctgtccccaaaggaagaccctttccccaagggcaccccaggtggccattaaattgtgatgatcattcagaaagtgcccccttggctttatgagaatccaattagtcttctgaaccaccttttcttgggtgcagatttccaacattcatgctcattgcagatccaccaactgtcactgttcttaacaagcatgctcgtcttgtcagaatttcagtaagttccaatttcctgtacagaccagggtaaactgttctaaaatcaatcaattaatgaaatgttatctggtttttaaaagctggtttcatgtgctttatgtgtataaaactatatctgcctgtgtggctttgcatttcaaatgtgtggcgcacaagcgttttgttggtgctttgttctcagtacagtaactctgtgtacaaacattttaatgtggttttgttgttttccaacaagatgtctctgtaaaaatgatattggctgagctggtgcgttggtttctctcatagaggcattaactatactgccaatgcattgaattatttaaaaatgcaaaataaaatttttatgaaaatctca

SEQ ID NO: 300919 - DNA, 11293 bp, Homo sapiens
tgtatccagacatggacagagctgattacccgccgactgcatacagacatggacagagctggcttcatgacccaccaagaggccgcaacaaagccactgcccacaaaccagcccctaggaaagaaccaagacctaacatccctttggctcccgagaagaagaagtacagagggcctggcaagattgtgccaaagtctcgggaattcattgaaacagattcatctacatctgactccaacacagatcaggaagagaccctgcaaatcaaagtcctgcctccgtgcattatttctggaggtaatactgccaaatccaaggaaatctgtggtgccagcctgaccctcagcaccttaatgagtagcagtggcagcaacaacaacttatccatcagtaatgaagagccaacattttcacctattcctgtcatgcaaactgaaatcctgtcccctctgcgagatcatgagaacctgaaaaacctctgggtgaagattgaccttgacttactctctagagtacctggccacagctcactccatgcagcacctgccaagccagaccacaaggagactgccacaaaacccaagcgtcagacagctgtcacagctgtggagaaaccagcccctaagggcaaacgtaagcacaagccaatagaagttgcagagaagatccctgagaagaagcagcgcctggaggaggccacaactatctgcttgctccctccttgcatctcaccagccccaccccacaagcctcccaacactagagaaaataattcatccaggagagcaaatagaagaaaggaagaaaaactatttcctcctccactttccccactgccagaggaccctccacgccgcagaaatgtcagtggcaataatggtccctttggtcaagacaaaaacatcgccatgactggacaaatcacatctaccaaacctaagagaactgaaggcaaattctgtgctactttcaaagggatatcggtaaatgagggagacactccaaaaaaggcatcctctgccaccatcactgtcaccaatactgctattgccactgctactgtcactgctactgccattgtcaccaccactgtcacagctactgccaccgccacggccaccaccacaactactaccactaccatttccaccatcacctctaccatcactactggcctcatggatagcagtcacctggagatgacgtcctgggcggctctgccccttctatccagcagcagcactaatgtccggagacccaagctcacttttgatgactcggttcacaatgctgattattacatgcaagaagctaagaagctgaagcacaaagctgatgcactgttcgagaaatttggcaaagctgtgaattatgctgatgccgccctctccttcactgaatgtggcaatgccatggaacgcgaccctctggaagcaaagtccccatacaccatgtactctgagactgtggagctcctcaggtatgcaatgaggctgaagaactttgcaagtcccttggcttcggatggggacaaaaagctagcagtactatgctaccgatgtttatcactcctctatttgagaatgtttaagctgaagaaggaccatgctatgaagtactccagatcactgatggaatattttaagcaaaatgcttcaaaagtcgcacagataccctctccatgggtaagcaatggaaagaacactccatccccagtgtctctcaacaacgtctcccccatcaacgcaatggggaactgtaacaatggcccagtcaccattccccagcgcattcaccacatggctgccagccacgtcaacatcactagcaatgtgttacggggctatgaacactgggatatggccgacaaactgacaagagaaaacaaagaattctttggtgatctggacacgctgatggggcctctgacccagcacagcagcatgaccaatcttgtccgctacgttcgccaaggactgtgttggctgcgcatcgatgcccacttgttgtagtgggtgttctcagatctctagcatcacgacccatcactctacctctaccagcgcactgatggtcactggtggaactccactcactggggaacgttctctttggttatgtttgtttttatgcttcttttgttatctgtaaaaaacagaagtcattgtaagttgacactacaacttaagggcagtgtacgttttattacttagtcattttttttcttttagcatttgatatgcatttctcagattccaccatctttttgtgctttatggaatgacagtccctacaatattgttttaagcccacactacccaaaacaaagaatgggaagcacttgtgataaagacaggctcctgagaaatgcaacaagtggtcttacatatacatgagaacttagacacaagggaccatcccccaaactctactcttatacccagaaaagaacatatttcagaatctgtcaaacttttgtgtatcccacagattcaatcttcaggtgagaattttcattgtcaaaacccactggttagatgttgtagcaacatcataaaatcaagagtatcaagaaaataaatgagcatagcaatgctactcttaaaaagatgctatgccacacaaccagaggactttcttgttagcatccctttcctgattccctattttgttaattttaatgataagaagaaagggtgacatttattttgacaagttttaggcatcagctggcatcagtgtttttcaactccattatttgaagtgtaaatcctcacctggggttctctgtgtgcaaagctgtccttttgaagaacagtttggttgatgcatgccttagtagccaaaatgctacactctagacttacaagtgggagttaagagaggtctggaaagtgtccaacaaggaattcacacctctgcctcctttgcaacaacaacatttacacagttggtaagtgggtccataactggcaggatttttaaattgtattttgctcaaatctatgggaacaaaagtcaaggtatcactacctagaagtaatgatatacagttttcttcctagtggcttgaaaatctggacttcctcaattattattcacattttctctcttataggttttctgttttctactttcttttttctcttatctgtgtttccctttcctttgtttggctcattaacttttgactgaattacaattactccttttattaaagtccatattattgtgaatcatttccatgaaaatttctaagaaaactccaaactctctaaatagtagctaacttttatttttttaaaatgagtcgtggggtagtgcttcaccttgagatgctttgaaagagccctaaacattgggaaccattcacctaatttggagacatttctcactggttgtgactacccccttatgatccttcacattcattttatgtccctaaacatcacaatgtaaatatcatttttgatgttccagctcaccagaagattcttacacttggggtaaacactatccatgcattacttactggtaattacctgctggtatataattccatgtagcctttaatatgctgggttatcaaattctgttcactgagttatgaccagataaataatagatatgcacatgaaagatgcaaacttgtgtgattattaaagccagccatgcaggtccatgatagaaacagcaggtgatgactctgcactctcattgtcaaggttagctatatccccagttgcaaaacagccagacttgagctgtgctctggtcatctttgagtttaaggccttttgttgtataaggctgtggaagttgtactccaatggctgaagccatgttgttaatatggctgatgggagcatccctgcagctgaacccagcactttttatgctcccactgtggttgagctttatgtttacagtctcagcaacaacacttatgcatccaaacactcacaaatgaaacctgaaagaatcttttctgagcctcttaaaagaggaaaatgatgataacattaaagactctgaacacccaaggttggtgtcacatataaaaattaagctgatgactttgcagtgactcaagttgtctctttatcatggtttaccaggtagagtgcctggctattactatataatgaagcccactggcttgacttgtaagttcaacctaaaccacaatcctagaccatcatggatttaggagtagattcttcttgaaatcccacatccagaaactagacattagaatgttgaggcagtttcccagagaaacaagcatattgcctcatggatgaaagacttgtagttctagtttcagtgacttgttatatctacttacatacaacagggaggcaagaggattctctgtcatctctggtgactgagtgtaaaatatgtgccaagtctgcagcacagtgaccaaatctgacaatcgagctctggatcaccacttgattatgtagtagactcatttataaagcagcttaggaactaattaaacatggaggatgaattaccttcctatcccttgagataagacatctttcagtttcatgattaaggattgttgctgttttatagttactctgttcatcacagtgtaaatggtgatgcgtgtcgtaggtgtgcagctatttgagggactaagggatggagatattctgtcaaatgaatctcttcagtataccagtttgtgggagggatatgagacatgtggatggcagtgagagatcgtgcctctagatcttgatggaggcttggtgagacacacttaaataagcacgtggaggttagaatagagggcagagtaaaaggaagctccatctgagcaagtacaccaaatgatctcagccctgcaacttgacccaggtagggccaccactacgccttcacttgtcacccaagctccaaccacagagagtttgacaagtttgtgttatgatgttggcttggctttgtatttttaattaactttggatttttagtggttttgtcatataactgtctgagtttggtaggtaggattactttgaaaagggtttactagtgtggtcctccgggtagaatttagctgtaagcatgttgttagccagcctgtagactgttaattacttaataatctcattgggaaaatactagtagttttatatttggatgacataattggaaaaagcagattagctgctactacttttaaaagacttaaggtcgggatgcctttttttccatgtaaggaaatgaaaagacccaaaatcttcaggcaaaaagcaagttgcaaaattagaaaccattggctaaaaatgtgttttgttgagtttccaaatggatgaattttcatttggacattacatcactaaattcattagattttgtctgcattggaaagatactcttctagcatatctttcccaaagatatctaatttggattctgtttcatgcaaatttgcatcccggaggttgaagttggagtttgaggttggaaaatatctttgaaggcagaatcagttgagttgtgagggtgaagcctcacatacttctcaacagacatgataaaattcacctgcatgagttggcaggtgggagaaccaaactggatcactgggtaagactactcagtaaagcaatgaactgcttgcttagagaagcatcactatccccattgagaaaaatgtgtggcaagatgatacagctacacagtatcaaatgaatgggtcaattcagcacccccaaatttaattctgtggggaaaaattattgagccagttgtcagtgttctgttacatgactggcagactaaattcttcatcgttgttgttattgttgttgttgtttctcattttcactcgcacggccttattctcataattaaaatctaattcattttctctttagtgttagtagactccaacaacagaagtggcatctgtgtattcataatcagcatttaccctggcaggagactaatcagataggccggtctcagacattaatcctaccatctgatatttttggtgaaggaaaaagtattaattctctttccatcctcctcctcagaaatatagaagccctctttaccaaaatcatcacattttactctgtaatctaccagctaaaagaaaattgcattgaagccccacaaagccagattgcagttcttgcccctttttgcgtctgacatgagatgttaaagaattattcatagtgctcacattgggttaggggacactgaactgctttttagatccatgatcagtcatcattcttctaagagattggagctttgctgtttcattaactgtgcagtgtagactaatggtgtttaataaaaatcattcaaaatttcaaactcttttgccagtgacctcaattttgttggctctgtgatttgtatcagactttgaggagggaagggggaagtgaaggaagcctacgtccaggcccctgacaggatgctgcagtagcaagctcaagctcgcctgcctgccagcagttgctggtgagcagcagcatgcagaccagctgtgggaagcctcctgaagaatgccccagctgatgctttcagctgggaatagtttgttcctattggggaactcattgttctccagtctctgcagcaggaagccagctgtcatattcggagggaatttcagatgctttacctttttggttttgtcctgcatcactcatgtggctacgaaagtgtctctgagaatagagcccaatgtggtgacaatgggtagtcaaatgcaccccagatgctcaagccctgttgtggttctgcagtgtttatgaaattgggaggaaggagaccctggacagtaagcaaaattggagacactccaacgaggctaagttaatgccgtgttgcccagaacaagatctagcttctcatttggtcagcctagcatgcaaccagtggtgtgctggtaaaatgtttaacaaccagctcgctgagaatagaaagcacctggtttgcaccatttgccaatttccatggcataaatactaccactttagatgattttaagctaccaactgtgatgtcactgaacacatggttggaaagagatgcacgcagttggctcttgcaagcctgggcaaaaatgcttcaacacgccactggatgcagccagtcagagggttcatatttaatatatgtgttcatgtggacacacacagacacacacacacaaactcacccttacacacacacttcgatgactaaaacaattacatagttttaagatatgaatcaatgtgtgaatgtagaaagcttatgataaggccctagaggtatgggttgccctggaagcctaggttttaagcaggagaatagctgagaagaatgaagccctcctgagctgaaaggagagatggatcaatggagatggttccatcatctccttccatatctcacaggtaaaatgggcactcagaaaaccctcacgattgattttttaaaaagataagtgagtgttttttattttattattattgtcatcattattttgatttacaaatgctatttgtaacttttacatgtaactaggataaagtatttacgggaactctatggagaatagcacaatccagaatttactgtgtttttcttttatgtgacgtggaaactcagtaattctcccaccttcacattgttgttcataagaattttactttagttattagggaatctaagttttttgttaacatttgtttttagttaaaagtatctacttactgttttagctctgaactcaaaccagaatatctctgtatcaattgcatgactattcagaaacaataatccaaaccaaaataattctttttccacccagtacgaagaaaactaagctcagtaacaagaaggcataaactaaagtatataatgaggctttcattaaatacacacacacacacactcacacacacacacatacactttttaaatttttaaattaggcctccacacataaatcattttgaaagtagaatagaaaatctcaaagaattcattctcctggtcctgtgcatcttctgcagttaataagaggtttgtatctggaaagatggaagaacttgttctaaaatcttatttttcaaaaaaaaatttccattttctctctgggcctgtatccatggttgaatgttagccctggaggagatccatgtcttactcgctctttctggcccttctgtcttttgcctctgcaattctttttgtagctggcacgatagcagggactgggggtctatcctttcatggtattgctacaatatttgtccttactggaaaatggtaacatccgggtctgatttaattggcattacacttacacagggactctgagcacccccgtcaccacaccagacagtggaccagttttcacagctacaaagagctagaaatgtgtttaacatcatccagtgcatcccctaattcaaaaccatcctcactaatcaatcatattcacccataaatattacaaatgagattgattccatctcaagacaatttgtcaaatacttaattttcttcctggatgattctacttactggatattttagaaagagaaatgtctgagataaaatccctcacatttactcaatataacaaattactgtttctactcctattctgagtagtgcttctgaagattgtttgctgtagtgttgtctttgataaaatgaatgtcagtagtgagccttttagagataccatgctcagacatcctctttgggatcagaagatacctaaaattctccccttttgcccacttggttagatgagtgatatattctttggatcctgcaaagaagagattggtttcttttcttttctggtggtggtagtggttgtatctgtggctgtgatggttgttgttacttgtctctctctctctctggctctggcttttgctttcctgctagtgttctttctctttccaaacaaatagttaaattaaacgtgagcttctgaattgtacttgttcatactttcaaaacataacagattaataaaaatagatgtgtcctgatttaaaacatgccccctggaaaggcatgctgtattatgaaatcgtgataatataactgcattattacatggcagtataaatattagtctgttgaattcatttgtccaattgtataactttgtggagcagtgttttgacctttgatacataattctggagcaagtggagtggttgcaggcagatgagacagtgttatatcaggatttttcaatcaactttagttggaggcctggcaattacaaacatcttcagatgtttctgtaaccattataaatatgaaaaaaacctcttcaaaaaatttcccatagtacttcagtcaagactttttaggtttatcttttttttttcatttctccttttccttttccattatttttcgatgggggggttgttatcattgactgaagaaatattttgattgcaatggtctctctctctctccccctctctctctctctcctctattctttcctccttccctctgtccatcacccctcattaaaatattgaaatctggagtctttgataaatctgcattagaccaggctatatgctaggaatgaaatctgggcaaatatcgatgggttttcaaagaatgctccatgttcattgggccctttcacaccccacagtgataaatgaaaaggatagaggtagttttttcaaaagagcactttaataatatcctctgagacctaatgcagtttaacaaatgactccacctatttttccagtaggtaaattgactgagacttgcaaaatacccctgagagttgtcaggggtgtcttctgcctggtctatagcgtgtgtgtttgctttgtatctaacaggcacattcacgtctcgtgtactcatatgaagtatttcctaacattcccattagcctgtatataagaatcagaaagataatcccaacatgttgtaaatgaagatgtgactctataacctttctcttcttcctggaaaaaaaaggacattttcatgcatattttaaacagaaattttgtatatttaagtgtcatagaaaatatttattgagtaactgggacacaaatgggaatttaattgtcatcatatgctttgtgtgtggggatgcttaccaacaccatgtcgctggaccattgtggcaagccataactgcacaaagagtacacatcgtcagtgtgtgtgtgtgtgtgtgtgtgcgcgcacgcacgtgcgtgtgtgtgtccctgcatgtgcaacatgtctagcttgctgtccttcatgggattttagctttcccttcttgaaaaacattattttacagttccaggaggccctggttacattactatatgaaggcagtgatttgaaatgaaaattcctttcctcttggaagctttggtcataatatcatggttcaattaaacggattccaccggactttgtgatgaaaaaggctctgttaaaatccaattgagtttccaagaggaaattgtagtaggtcaagatgcatgagagggaagatggaggccacctcagctggagaacatgagctgagttgagccctcagtgttgaagttgacttgctccaagctgcagtctaaaaccctggggcccgtgcctggcctatgctccctcccaagtaagtagaggagcagaaccatcaggaacagcctgcctggctcctatgaagaaaacttcctgacgtcctgtccccaaaggaagaccctttccccaagggcaccccaggtggccattaaattgtgatgatcattcagaaagtgcccccttggctttatgagaatccaattagtcttctgaaccaccttttcttgggtgcagatttccaacattcatgctcattgcagatccaccaactgtcactgttcttaacaagcatgctcgtcttgtcagaatttcagtaagttccaatttcctgtacagaccagggtaaactgttctaaaatcaatcaattaatgaaatgttatctggtttttaaaagctggtttcatgtgctttatgtgtataaaactatatctgcctgtgtggctttgcatttcaaatgtgtggcgcacaagcgttttgttggtgctttgttctcagtacagtaactctgtgtacaaacattttaatgtggttttgttgttttccaacaagatgtctctgtaaaaatgatattggctgagctggtgcgttggtttctctcatagaggcattaactatactgccaatgcattgaattatttaaaaatgcaaaataaaatttttatgaaaatctca

SEQ ID NO: 300920 - DNA, 370 bp, Homo sapiens
tttgtttgatctatttggacaactgtaatggttggggttggagcatgtggttatttatcctaatgggccattatgtacttcagatttcatttacagtattatttcaaggttggttatgatatgaatgacagcattagtctgcctttttcaaggcattatatgggaataaatttatagcagaaaaggtttgatgattcagtcttttactgaaaagatgaagcattggtttctgaaagagcttgttttgtttatttagggttcacaatgctgattattacatgcaagaagctaagaagctgaagcacaaagctgatgcactggtaagtttcctttttctcattgctttgttcctattaaggatttatgtttc

SEQ ID NO: 300921 - DNA, 2123 bp, Homo sapiens
accggcccagcgactctcccgggctgccagccgggacgcgcggccgccgccgctgcagacgacgagtccgccctcgtcccgcgcccccggggctcgcggagccaggtctccacctctgggcaggagagttgccgaccacctcgggggtgctttctctgcgcttgaacatctatagctgcttctgaggggctgggagccgggcccctgggagagacgagccatgaaccccccacagcctctgcatttggggacctcaccttaggagagtgccatttacagcttccgccagggcaaaggagctgagcagccatcccaagcccagcccacctccctcccccggcccctggtaggcatggactagcagctgtgagcagccagagctgatgcccggcccccaggggggcagaggcgccgccaccatgagcctgggcaagctctcgcctgtgggctgggtgtccagttcacagggaaagaggcggctgactgcagacatgatcagccacccactcggggacttccgccacaccatgcatgtgggccgtggcggggatgtcttcggggacacgtccttcctcagcaaccacggtggcagctccgggagcacccatcgctcaccccgcagcttcctggccaagaagctgcagctggtgcggagggtgggggcgcccccccggaggatggcatctccccctgcaccctccccggctccaccggccatctcccccatcatcaagaacgccatctccctgccccagctcaaccaggccgcctacgacagcctcgtggttggcaagctcagcttcgacagcagccccaccagctccacggacggccactccagctacggcctggactctgggttctgcaccatctcccgcctgccccgctcggaaaagccgcatgaccgagaccgggatggttccttcccctctgagcccgggcttcgccgctctgactctctcttgtccttccgcctggacctcgaccttgggccctcactcctcagcgagctgctaggggtcatgagcctgccagaagcccctgcagctgagactccagcccccgctgcaaaccccccagcccctactgcaaaccccacgggtcctgctgcaaaccccccagccactactgcaaaccccccagcgcctgccgcaacccccacgggtcctgctgcaaatcccccagcccctgccgcaagctccacaccccatggacactgtcccaatggggtaacagctgggttgggcccagtggctgaggtgaagtccagcccagtgggagggggtccccgaggacctgctggccctgccctcggcaggcactggggagcaggctgggatggcggccaccactacccagagatggatgcgcggcaggagcgggtggaggtgctgccccaagcccgggcctcctgggagagcctggacgaagagtggagggcgccccaggcaggcagcaggaccccagtgcccagcacagtgcaagcaaacacctttgaatttgcggatgctgaggaggatgatgaggtcaaggtgtgaggggctggggcacggtcccagggccccacctaggtgcagagccggcccctcacctaacagctggttcctaccagaccggagaggggagaagtcatgttgcccctaaacccctccccacctctgcaggacagacatgggagggaggacagggaaggccaggcttgctctgggacttttatgctcccagaggccctgccaaactgaccacctcccccgactgccactctggacctaatagctgttccttaggccccactccatgccacccccaccagctggaggacccagcctcacagtgtgtcctttgtgccagaccaagcggcccgtggggggtggggggcagggagtgtaccacacagggccattgtctcacctcccaaagggaccgcctgcccccagctcatcccagagcgtccctgctgcaaccctgacagccgtctcccaggccgcttccccaacatccccgccccagcctccctcttaccccagaaaggtcaggtatgacctcccggggaggaatcccacctgcctgtataccccagacttgcctctggggcctgattaaataaggctgttttgataaaa

SEQ ID NO: 300922 - DNA, 2144 bp, Homo sapiens
accggcccagcgactctcccgggctgccagccgggacgcgcggccgccgccgctgcagacgacgagtccgccctcgtcccgcgcccccggggctcgcggagccaggtctccacctctgggcaggagagttgccgaccacctcgggggtgctttctctgcgcttgaacatctatagctgcttctgaggggctgggagccgggcccctgggagagacgagccatgaaccccccacagcctctgcatttggggacctcaccttaggagagtgccatttacagcttccgccagggcaaaggagctgagcagccatcccaagcccagcccacctccctcccccggcccctggtaggcatggactagcagctgtgagcagccagagctgatgcccggcccccaggggggcagaggcgccgccaccatgagcctgggcaagctctcgcctgtgggctgggtgtccagttcacagggaaagaggcggctgactgcagacatgatcagccacccactcggggacttccgccacaccatgcatgtgggccgtggcggggatgtcttcggggacacgtccttcctcagcaaccacggtggcagctccgggagcacccatcgctcaccccgcagcttcctggccaagaagctgcagctggtgcggagggtgggggcgcccccccggaggatggcatctccccctgcaccctccccggctccaccggccatctcccccatcatcaagaacgccatctccctgccccagctcaaccaggccgcctacgacagcctcgtggttggcaagctcagcttcgacagcagccccaccagctccacggacggccactccagctacggcctggactctgggttctgcaccatctcccgcctgccccgctcggaaaagccgcatgaccgagaccgggatggttccttcccctctgagcccgggcttcgccgctctgactctctcttgtccttccgcctggacctcgaccttgggccctcactcctcagcgagctgctaggggtcatgagcctgccagaagcccctgcagctgagactccagcccccgctgcaaaccccccagcccctactgcaaaccccacgggtcctgctgcaaaccccccagccactactgcaaaccccccagcgcctgctgcaaacccctcagcacctgccgcaacccccacgggtcctgctgcaaatcccccagcccctgccgcaagctccacaccccatggacactgtcccaatggggtaacagctgggttgggcccagtggctgaggtgaagtccagcccagtgggagggggtccccgaggacctgctggccctgccctcggcaggcactggggagcaggctgggatggcggccaccactacccagagatggatgcgcggcaggagcgggtggaggtgctgccccaagcccgggcctcctgggagagcctggacgaagagtggagggcgccccaggcaggcagcaggaccccagtgcccagcacagtgcaagcaaacacctttgaatttgcggatgctgaggaggatgatgaggtcaaggtgtgaggggctggggcacggtcccagggccccacctaggtgcagagccggcccctcacctaacagctggttcctaccagaccggagaggggagaagtcatgttgcccctaaacccctccccacctctgcaggacagacatgggagggaggacagggaaggccaggcttgctctgggacttttatgctcccagaggccctgccaaactgaccacctcccccgactgccactctggacctaatagctgttccttaggccccactccatgccacccccaccagctggaggacccagcctcacagtgtgtcctttgtgccagaccaagcggcccgtggggggtggggggcagggagtgtaccacacagggccattgtctcacctcccaaagggaccgcctgcccccagctcatcccagagcgtccctgctgcaaccctgacagccgtctcccaggccgcttccccaacatccccgccccagcctccctcttaccccagaaaggtcaggtatgacctcccggggaggaatcccacctgcctgtataccccagacttgcctctggggcctgattaaataaggctgttttgataaaa

SEQ ID NO: 300923 - DNA, 1352 bp, Homo sapiens
accggcccagcgactctcccgggctgccagccgggacgcgcggccgccgccgctgcagacgacgagtccgccctcgtcccgcgcccccggggctcgcggagccaggtctccacctctgggcaggagagttgccgaccacctcgggggtgctttctctgcgcttgaacatctatagctgcttctgaggggctgggagccgggcccctgggagagacgagccatgaaccccccacagcctctgcatttggggacctcaccttaggagagtgccatttacagcttccgccagggcaaaggagctgagcagccatcccaagcccagcccacctccctcccccggcccctggtaggcatggactagcagctgtgagcagccagagctgatgcccggcccccaggggggcagaggcgccgccaccatgagcctgggcaagctctcgcctgtgggctgggtgtccagttcacagggaaagaggcggctgactgcagacatgatcagccacccactcggggacttccgccacaccatgcatgtgggccgtggcggggatgtcttcggggacacgtccttcctcagcaaccacggtggcagctccgggagcacccatcgctcaccccgcagcttcctggccaagaagctgcagctggtgcggagggtgggggcgcccccccggaggatggcatctccccctgcaccctccccggctccaccggccatctcccccatcatcaagaacgccatctccctgccccagctcaaccaggccgcctacgacagcctcgtggttggcaagctcagcttcgacagcagccccaccagctccacggacggccactccagctacggcctggactctgggttctgcaccatctcccgcctgccccgctcggaaaagccgcatgaccgagaccgggatggttccttcccctctgagcccgggcttcgccgctctgactctctcttgtccttccgcctggacctcgaccttgggccctcactcctcagcgagctgctaggggtcatgagcctgtcgggctagtcggggccccgactagcccgacagcgtgaccatctcctggacccgccagaatggcgaagctgtgaaaacccacaccaacatctccgagagccaccccaatgccactttcagcgaccactagggtgacgaccagcatccgcgaggatgactggaattccgggaagagtttcacacgcaccgtgacccacacagacccgccctccacactgaagcagaccatctcccggccacaagggcgagatcctgcacagccccgatgtctactcgcagccaccaacccgggaacagcatgaacctgtcgggctagtcggg

SEQ ID NO: 300924 - DNA, 2108 bp, Homo sapiens
accggcccagcgactctcccgggctgccagccgggacgcgcggccgccgccgctgcagacgacgagtccgccctcgtcccgcgcccccggggctcgcggagccaggtctccacctctgggcaggagagttgccgaccacctcgggggtgctttctctgcgcttgaacatctatagctgcttctgaggggctgggagccgggcccctgggagagacgagccatgaaccccccacagcctctgcatttggggacctcaccttaggagagtgccatttacagcttccgccagggcaaaggagctgagcagccatcccaagcccagcccacctccctcccccggcccctggtaggcatggactagcagctgtgagcagccagagctgatgcccggcccccaggggggcagaggcgccgccaccatgagcctgggcaagctctcgcctgtgggctgggtgtccagttcacagggaaagaggcggctgactgcagacatgatcagccacccactcggggatgtcttcggggacacgtccttcctcagcaaccacggtggcagctccgggagcacccatcgctcaccccgcagcttcctggccaagaagctgcagctggtgcggagggtgggggcgcccccccggaggatggcatctccccctgcaccctccccggctccaccggccatctcccccatcatcaagaacgccatctccctgccccagctcaaccaggccgcctacgacagcctcgtggttggcaagctcagcttcgacagcagccccaccagctccacggacggccactccagctacggcctggactctgggttctgcaccatctcccgcctgccccgctcggaaaagccgcatgaccgagaccgggatggttccttcccctctgagcccgggcttcgccgctctgactctctcttgtccttccgcctggacctcgaccttgggccctcactcctcagcgagctgctaggggtcatgagcctgccagaagcccctgcagctgagactccagcccccgctgcaaaccccccagcccctactgcaaaccccacgggtcctgctgcaaaccccccagccactactgcaaaccccccagcgcctgctgcaaacccctcagcacctgccgcaacccccacgggtcctgctgcaaatcccccagcccctgccgcaagctccacaccccatggacactgtcccaatggggtaacagctgggttgggcccagtggctgaggtgaagtccagcccagtgggagggggtccccgaggacctgctggccctgccctcggcaggcactggggagcaggctgggatggcggccaccactacccagagatggatgcgcggcaggagcgggtggaggtgctgccccaagcccgggcctcctgggagagcctggacgaagagtggagggcgccccaggcaggcagcaggaccccagtgcccagcacagtgcaagcaaacacctttgaatttgcggatgctgaggaggatgatgaggtcaaggtgtgaggggctggggcacggtcccagggccccacctaggtgcagagccggcccctcacctaacagctggttcctaccagaccggagaggggagaagtcatgttgcccctaaacccctccccacctctgcaggacagacatgggagggaggacagggaaggccaggcttgctctgggacttttatgctcccagaggccctgccaaactgaccacctcccccgactgccactctggacctaatagctgttccttaggccccactccatgccacccccaccagctggaggacccagcctcacagtgtgtcctttgtgccagaccaagcggcccgtggggggtggggggcagggagtgtaccacacagggccattgtctcacctcccaaagggaccgcctgcccccagctcatcccagagcgtccctgctgcaaccctgacagccgtctcccaggccgcttccccaacatccccgccccagcctccctcttaccccagaaaggtcaggtatgacctcccggggaggaatcccacctgcctgtataccccagacttgcctctggggcctgattaaataaggctgttttgataaaa

SEQ ID NO: 300925 - DNA, 2123 bp, Homo sapiens
accggcccagcgactctcccgggctgccagccgggacgcgcggccgccgccgctgcagacgacgagtccgccctcgtcccgcgcccccggggctcgcggagccaggtctccacctctgggcaggagagttgccgaccacctcgggggtgctttctctgcgcttgaacatctatagctgcttctgaggggctgggagccgggcccctgggagagacgagccatgaaccccccacagcctctgcatttggggacctcaccttaggagagtgccatttacagcttccgccagggcaaaggagctgagcagccatcccaagcccagcccacctccctcccccggcccctggtaggcatggactagcagctgtgagcagccagagctgatgcccggcccccaggggggcagaggcgccgccaccatgagcctgggcaagctctcgcctgtgggctgggtgtccagttcacagggaaagaggcggctgactgcagacatgatcagccacccactcggggacttccgccacaccatgcatgtgggccgtggcggggatgtcttcggggacacgtccttcctcagcaaccacggtggcagctccgggagcacccatcgctcaccccgcagcttcctggccaagaagctgcagctggtgcggagggtgggggcgcccccccggaggatggcatctccccctgcaccctccccggctccaccggccatctcccccatcatcaagaacgccatctccctgccccagctcaaccaggccgcctacgacagcctcgtggttggcaagctcagcttcgacagcagccccaccagctccacggacggccactccagctacggcctggactctgggttctgcaccatctcccgcctgccccgctcggaaaagccgcatgaccgagaccgggatggttccttcccctctgagcccgggcttcgccgctctgactctctcttgtccttccgcctggacctcgaccttgggccctcactcctcagcgagctgctaggggtcatgagcctgccagaagcccctgcagctgagactccagcccccgctgcaaaccccccagcccctactgcaaaccccacgggtcctgctgcaaaccccccagccactactgcaaaccccccagcgcctgctgcaaacccctcagcacctgccgcaacccccacgggtcctgctgcaaatcccccagcccctgccgcaagctccacaccccatggacactgtcccaatggggtaacagctgggttgggcccagtggctgaggtgaagtccagcccagtgggagggggtccccgaggacctgctggccctgccctcggcaggcactggggagcaggctgggatggcggccaccactacccagagatggatgcgcggcaggagcgggtggaggtgctgccccaagcccgggcctcctgggagagcctggacgaagagtggagggcgccccaggcaggcagcaggaccccagtgcccagcacagtgcaagcaaacacctttgaatttgcggatgctgaggaggatgatgaggtcaaggtgtgaggggctggggcacggtcccagggccccacctaggtgcagagccggcccctcacctaacagctggttcctaccagaccggagaggggagaagtcatgttgcccctaaacccctccccacctctgcaggacagacatgggagggaggacagggaaggccaggcttgctctgggacttttatgctcccagaggccctgccaaactgaccacctcccccgactgccactctggacctaatagctgttccttaggccccactccatgccacccccaccagctggaggacccagcctcacagtgtgtcctttgtgccagaccaagcggcccgtggggggtggggggcagggagtgtaccacacagggccattgtctcacctcccaaagggaccgcctgcccccagctcatcccagagcgtccctgctgcaaccctgacagccgtctcccaggccgcttccccaacatccccgccccagcctccctcttacctcccggggaggaatcccacctgcctgtataccccagacttgcctctggggcctgattaaataaggctgttttgataaaa

SEQ ID NO: 300926 - DNA, 1036 bp, Homo sapiens
accggcccagcgactctcccgggctgccagccgggacgcgcggccgccgccgctgcagacgacgagtccgccctcgtcccgcgcccccggggctcgcggagccaggtctccacctctgggcaggagagttgccgaccacctcgggggtgctttctctgcgcttgaacatctatagctgcttctgaggggctgggagccgggcccctgggagagacgagccatgaaccccccacagcctctgcatttggggacctcaccttaggagagtgccatttacagcttccgccagggcaaaggagctgagcagccatcccaagcccagcccacctccctcccccggcccctggtaggcatggactagcagctgtgagcagccagagctgatgcccggcccccaggggggcagaggcgccgccaccatgagcctgggcaagctctcgcctgtgggctgggtgtccagttcacagggaaagaggcggctgactgcagacatgatcagccacccactcggggacttccgccacaccatgcatgtgggccgtggcggggatgtcttcggggacacgtccttcctcagcaaccacggtggcagctccgggagcacccatcgctcaccccgcagcttcctggccaagaagctgcagctggtgcggagggtgggggcgcccccccggaggatggcatctccccctgcaccctccccggctccaccggccatctcccccatcatcaagaacgccatctccctgccccagctcaaccaggccgcctacgacagcctcgtggttggcaagctcagcttcgacagcagccccaccagctccacggacggccactccagctacggcctggactctgggttctgcaccatctcccgcctgccccgctcggaaaagccgcatgaccgagaccgggatggttccttcccctctgagcccgggcttcgccgctctgactctctcttgcttcttcgcactcatcctaatcctactcctaatcacataagctattcccccgaggggtaaggggctcccgg

SEQ ID NO: 300927 - DNA, 1478 bp, Homo sapiens
acaggaagatcacacaggtgaccatggagtgtattctattggaaagatgggagaaaccgaggccagagaggggagggactagccagaggccacacagcaagccaggactggtcctgtctcccctcctgaattcctggtgagggaccccagctctgagcccactgcccatttctcttctaggcctggactctgggttctgcaccatctcccgcctgccccgctcggaaaagccgcatgaccgagaccgggatggttccttcccctctgagcccgggcttcgccgctctgactctctcttgtccttccgcctggacctcgaccttgggccctcactcctcagcgagctgctaggggtcatgagcctgccagaagcccctgcagctgagactccagcccccgctgcaaaccccccagcccctactgcaaaccccacgggtcctgctgcaaaccccccagccactactgcaaaccccccagcgcctgctgcaaacccctcagcacctgccgcaacccccacgggtcctgctgcaaatcccccagcccctgccgcaagctccacaccccatggacactgtcccaatggggtaacagctgggttgggcccagtggctgaggtgaagtccagcccagtgggagggggtccccgaggacctgctggccctgccctcggcaggcactggggagcaggctgggatggcggccaccactacccagagatggatgcgcggcaggagcgggtggaggtgctgccccaagcccgggcctcctgggagagcctggacgaagagtggagggcgccccaggcaggcagcaggaccccagtgcccagcacagtgcaagcaaacacctttgaatttgcggatgctgaggaggatgatgaggtcaaggtgtgaggggctggggcacggtcccagggccccacctaggtgcagagccggcccctcacctaacagctggttcctaccagaccggagaggggagaagtcatgttgcccctaaacccctccccacctctgcaggacagacatgggagggaggacagggaaggccaggcttgctctgggacttttatgctcccagaggccctgccaaactgaccacctcccccgactgccactctggacctaatagctgttccttaggccccactccatgccacccccaccagctggaggacccagcctcacagtgtgtcctttgtgccagaccaagcggcccgtggggggtggggggcagggagtgtaccacacagggccattgtctcacctcccaaagggaccgcctgcccccagctcatcccagagcgtccctgctgcaaccctgacagccgtctcccaggccgcttccccaacatccccgccccagcctccctcttaccccagaaaggtcaggtatgacctcccggggaggaatcccacctgcctgtataccccagacttgcctctggggcctgattaaataaggctgttttgataaaa

SEQ ID NO: 300928 - DNA, 2635 bp, Homo sapiens
attgcagcattctttggattttgagaaaagttccacagaaggcagtgaaagctccataatggggaattccattgacacagtcagatatggcaaagaatcagatttaggggatgttagtgaagaacatggtgaaaataaggaaagctcaaataacgagcaggacaatagtctgcttgaacagtatttaacttcagttcaacagctggaagatgctgatgagaggaccaattttgatacagagacaagagatagcaaacttcacattgcttgtttcccagtacagttagatacattgtctgacggtgcttctgtagatgagagtcatggcatatctcctcctttgcaaggtgaaattagccagacacaagagaattctaaattaaatgcagaagttcaagggcagcagccagaatgtgattctacatttcagctattgcatgttggtgttactgtgtagcatgtcttttgggaggcagatatccacttaacttttcttaaaaatactttcagttgcctttgcttttttttggagggaaatactccctacccctaattttgttactacttatatagaatttgtattcatgtcttatatttttcagattctagatattgagctgagttttcattttgattttgttagctttttacttagctgtaaggtaccaaactatttatattgaaagctatatgcactttatttcttaactgaattgcatcaacaatgttcctgtttctttcatgtactcatttactttcaaaaataagctagaatatattaaagaaaatagaaaaaattaccttaaatatataaataagagaattttggcccttctgtgtctgagaaaattaattatatagcaaggaatgaaatttgataaagcaaatataaatgagaaatatgaggattgtgaattattgaaatttgccagtctccctggtgtaaaatgtttttttaaagccttttttcctcctttcggagtcaaggaaagcctttctataagcaaattaaggaagaaaaggtaggattataagatttctcaatggggatgattaaattgtctcatggaaaacttcagttaatgtcatgcatcagttttaacatatgaagtaaagtgttctatccaggattaaagtcaagtttacttaggcaacacaagaatatttcacttagatatgaagaaaggaaacactagtctccattcacttgaaatactctcatggcaaatatttatcctctcattaagtgctttttcaccctataggtaagcatttttgtgccaacatgttgtcagaaattaatgtatgttcatctcctctgttcctgcttatttttacttatatatttcagcagaaggtccgtggccattcacttcaattttgacctctgtcccatagtgaagaacatttaaagtaatactactggtcgaatatgaatgactttttaggaactactttttgtctaacctgaaaaagttccacatttggaagacaatttaatgatggtgaagaaataataaacctcactttacttgttaaaagggatatatatatatatatatatgtctgcaacttcagggagaaataagattgtgtttgaatattgtaggtagatgcatttgtaattaaggataatatcgtttaacaacatgtatttggtttccctcaacttacagacatacagctatttaaaactatggcaatacttaagcatctctaaatttaggtgctaaatatctattattctgttgtagtcattaggtgcccttctctgaagttatgtaaaataaaagcatctgatccttcaaggataaagttgaggatcacatggtacgtggcatttgttgttattgttttttaaagagatggaggctggctctgttggtgcggtgccatgatcatagttcactataacctcgaactcctggctcaagtgatctcccacttcagcctcccgagtatctgggattataagcaagagccactgctcccagctcatggtatttgttgatagtcataacatttttcctgtatggtaagacgtatttttctcagtttataaatacgtagcactcaggttgagacgacttggattttattcttagaaatccagaatcccttgaaaaggaaatattttctgtttcttataaataaaagagtaatcttactttcagaaggattttccttagtgaaacatgtgtaacattgaatgcatgttaaataaaaatggaatttctaactttttttcaatagtgctaattatcttttctgaatgattttgaatgtcttcttaaatataccctatttttctattttaaagttaagtgcctcacttgctgtccatagttagacaaagaaaaaccaatttccactgcactagtaccaaaatactactttatacattagtttttcataaaagctgctggaatgtcatgattcagtattacctaaatagatttctgctaaaatcctctccctcctgtcttttttaagttatggaaaaacacaactaaattcatttgatcatcagcacttgttagcaggatttccttttttacctttgccttgtttctttagcccacaaatagtactcagcatactttcattaaaaatttggcacaatatgataattgtt

SEQ ID NO: 300929 - DNA, 5468 bp, Homo sapiens
attgcagcattctttggattttgagaaaagttccacagaaggcagtgaaagctccataatggggaattccattgacacagtcagatatggcaaagaatcagatttaggggatgttagtgaagaacatggtgaaaataaggaaagctcaaataacgagcaggacaatagtctgcttgaacagtatttaacttcagttcaacagctggaagatgctgatgagaggaccaattttgatacagagacaagagatagcaaacttcacattgcttgtttcccagtacagttagatacattgtctgacggtgcttctgtagatgagagtcatggcatatctcctcctttgcaaggtgaaattagccagacacaagagaattctaaattaaatgcagaagttcaagggcagcagccagaatgtgattctacatttcagctattgcatgttggtgttactgtgtagcatgtcttttgggaggcagatatccacttaacttttcttaaaaatactttcagttgcctttgcttttttttggagggaaatactccctacccctaattttgttactacttatatagaatttgtattcatgtcttatatttttcagattctagatattgagctgagttttcattttgattttgttagctttttacttagctgtaaggtaccaaactatttatattgaaagctatatgcactttatttcttaactgaattgcatcaacaatgttcctgtttctttcatgtactcatttactttcaaaaataagctagaatatattaaagaaaatagaaaaaattaccttaaatatataaataagagaattttggcccttctgtgtctgagaaaattaattatatagcaaggaatgaaatttgataaagcaaatataaatgagaaatatgaggattgtgaattattgaaatttgccagtctccctggtgtaaaatgtttttttaaagccttttttcctcctttcggagtcaaggaaagcctttctataagcaaattaaggaagaaaaggtaggattataagatttctcaatggggatgattaaattgtctcatggaaaacttcagttaatgtcatgcatcagttttaacatatgaagtaaagtgttctatccaggattaaagtcaagtttacttaggcaacacaagaatatttcacttagatatgaagaaaggaaacactagtctccattcacttgaaatactctcatggcaaatatttatcctctcattaagtgctttttcaccctataggtaagcatttttgtgccaacatgttgtcagaaattaatgtatgttcatctcctctgttcctgcttatttttacttatatatttcagcagaaggtccgtggccattcacttcaattttgacctctgtcccatagtgaagaacatttaaagtaatactactggtcgaatatgaatgactttttaggaactactttttgtctaacctgaaaaagttccacatttggaagacaatttaatgatggtgaagaaataataaacctcactttacttgttaaaagggatatatatatatatatatatgtctgcaacttcagggagaaataagattgtgtttgaatattgtaggtagatgcatttgtaattaaggataatatcgtttaacaacatgtatttggtttccctcaacttacagacatacagctatttaaaactatggcaatacttaagcatctctaaatttaggtgctaaatatctattattctgttgtagtcattaggtgcccttctctgaagttatgtaaaataaaagcatctgatccttcaaggataaagttgaggatcacatggtacgtggcatttgttgttattgttttttaaagagatggaggctggctctgttggtgcggtgccatgatcatagttcactataacctcgaactcctggctcaagtgatctcccacttcagcctcccgagtatctgggattataagcaagagccactgctcccagctcatggtatttgttgatagtcataacatttttcctgtatggtaagacgtatttttctcagtttataaatacgtagcactcaggttgagacgacttggattttattcttagaaatccagaatcccttgaaaaggaaatattttctgtttcttataaataaaagagtaatcttactttcagaaggattttccttagtgaaacatgtgtaacattgaatgcatgttaaataaaaatggaatttctaactttttttcaatagtgctaattatcttttctgaatgattttgaatgtcttcttaaatataccctatttttctattttaaagttaagtgcctcacttgctgtccatagttagacaaagaaaaaccaatttccactgcactagtaccaaaatactactttatacattagtttttcataaaagctgctggaatgtcatgattcagtattacctaaatagatttctgctaaaatcctctccctcctgtcttttttaagttatggaaaaacacaactaaattcatttgatcatcagcacttgttagcaggatttccttttttacctttgccttgtttctttagcccacaaatagtactcagcatactttcattaaaaatttggcacaatatgataattgttaatattctgttcttcgtctgtgttttatttaacttttactagtgtttagaagtgcaagaatattaaatagccccttccttaactgtacatattatcttgaatgtagataaaatgaaaatactgtaaattagagtgtaggaaaactggcatagagttaatatattttaatgggtttacattatactttaaaagtaatttatataattaaaatatttggttttaactctatgggctattctttggttggctgaagagggaatgggtctagtaaggtttggaaagttaagctttgaacatggtctttgtgtttttttcctaacaaggaaaggtttagttcagctgtgctattttagtacacatcagttctcttgatttatggaagattcagtttatcaattaagaattcctgcagaagcacagaatcataccatgtaagagttggaaggaagcttaagagatttctgttcgaatctctttgtttcaaagatgaaactaaagcacagcatgttaaatgacttgtctaagttatagctagttagtagtaaataaactgaaaacctatatgctactgtagtccaaaattttattatgtcctcttaatctttacatttagtgagtcagtaaggaaatctctgcatatttctcattctctttgaaagaggaaaaaaacttctaagagagctacaactctatcactcatgacagagttgcttgtagaaaataactaattccttcagaaccctgagtgaattttttctaagaaatgtgacttgattaaaatggtttcaaaagagcaatagtggaaattaaagttttagaaaagagacctggcgtggtggttgacaactgtaatcccagtgctttgggaggctgaggccagaggatcacttgaggccaggagttcaagaccagcctggacaacatagcaagacccccctctctacaaaaaaaaattttttctgaaaagaataagtacattttagagtccatttatttgacgacaggcagtatgacaggttgctgaggtatataaaattttctagagaaatgctgagtttgatgacattttatcttcagttttgtagaacagatgttaaaatgttaactctcctggtgtgcagaaagctgtaatcatgacagttgataatatgcaatttagtttgattttataggtttaattataaaaggcttcacaatatgcatgttttaggaaaatgttcatttatttagtcatataatcgtttgtatatatgtaaataactttattctggaataatgtgggtgccatcttgagcgtgtgtttttatctgttttggattattttttgtatacaaacaccataatactgtattttcctgttatctacttaagtctagttctactttttcccaataatttcaggaaaatacaagcttgagatattatactatctcccttggtattttttgtgtgcaaagtcttagaattggatttataacattgataataaaaatataaaacgtttttcctcgggagttaagatggtaaaaagaaaaaaatagaatgaatatgatcatttctccatcataaaggaaagaagagacttcattgtgtgtgtgttttttttttttttttcgagatagagtttcactgttgtcacccaggctggtctcagctcactgcaacctccacttcctgggtacaagcgattctcctgcctcagcttcctgtgtagctgggattacaggtgtgcaaccacaaggctcggctaatttttttgtatttttagtagagatggggtttcaccatgttggccaggctggtctcgaactcctgacctcaagtgatccacccacctcggcctcgcaaagtgctgagattacaggtgtgagccactgtgcccagccgagacttcattgtttaatgtatatttttattttttccaaacaccagctcgaatcagagtatatttttattttgccacatacctttaaaaggtatttattgtgtcataatgttttaaatgttaaatatatgataccctcattcatgaagtgaagcagaaagggtctgtaaggaacattctaaacatttttaatgatattgcttttactgatcaagcttgttgtgccatattaaaattaaaagtcaaataaacaaagcagtcctcacagccttggaaagaaatagataattgtcttcttaagatgaggtgctttttatctgtggatgaatggaaatcacactgaattttaattcttatttattttagtggatagcaggaatcactctgtagtagttgtgttcattttcttttctttttcttttcttttttttgagagagtctcgctctgtcaccaggctggagtgcagtggcgtgatctcggctcactgcaacctccatctcctgggttcaagtgattctcctgcctcatcctcccgagtagctaagactacaggcacacgccaccatgcccagctaatttttatatttttagtagagatggggtttcaccatgttggccaggatggtctcaatctcttgacctcgtgatccacccagtttggcctcccaaagtgctgggattacaggcgtgagccactacacctggccttgttcatcttctaattaaatatctttgaatgttttgtaataattttaatgttgacaataagagtttaaaaataatttgattttggactgtatttagatttctctttaattttgctgtagaaatagtaaatgatttaaagtggttatgatgtgttttatgaaggcttactattttatattgtacttatttaatttgtatttgagtctgtctaattttaaataaaaggtttatacatttga

SEQ ID NO: 300930 - DNA, 5467 bp, Homo sapiens
  misc_feature (4889)..(4889): n is a, c, g, or t
  misc_feature (4892)..(4892): n is a, c, g, or t
  misc_feature (4909)..(4909): n is a, c, g, or t
  misc_feature (4918)..(4918): n is a, c, g, or t
  misc_feature (4939)..(4939): n is a, c, g, or t
attgcagcattctttggattttgagaaaagttccacagaaggcagtgaaagctccataatggggaattccattgacacagtcagatatggcaaagaatcagatttaggggatgttagtgaagaacatggtgaaaataaggaaagctcaaataacgagcaggacaatagtctgcttgaacagtatttaacttcagttcaacagctggaagatgctgatgagaggaccaattttgatacagagacaagagatagcaaacttcacattgcttgtttcccagtacagttagatacattgtctgacggtgcttctgtagatgagagtcatggcatatctcctcctttgcaaggtgaaattagccagacacaagagaattctaaattaaatgcagaagttcaagggcagcagccagaatgtgattctacatttcagctattgcatgttggtgttactgtgtagcatgtcttttgggaggcagatatccacttaacttttcttaaaaatactttcagttgcctttgcttttttttggagggaaatactccctacccctaattttgttactacttatatagaatttgtattcatgtcttatatttttcagattctagatattgagctgagttttcattttgattttgttagctttttacttagctgtaaggtaccaaactatttatattgaaagctatatgcactttatttcttaactgaattgcatcaacaatgttcctgtttctttcatgtactcatttactttcaaaaataagctagaatatattaaagaaaatagaaaaaattaccttaaatatataaataagagaattttggcccttctgtgtctgagaaaattaattatatagcaaggaatgaaatttgataaagcaaatataaatgagaaatatgaggattgtgaattattgaaatttgccagtctccctggtgtaaaatgtttttttaaagccttttttcctcctttcggagtcaaggaaagcctttctataagcaaattaaggaagaaaaggtaggattataagatttctcaatggggatgattaaattgtctcatggaaaacttcagttaatgtcatgcatcagttttaacatatgaagtaaagtgttctatccaggattaaagtcaagtttacttaggcaacacaagaatatttcacttagatatgaagaaaggaaacactagtctccattcacttgaaatactctcatggcaaatatttatcctctcattaagtgctttttcaccctataggtaagcatttttgtgccaacatgttgtcagaaattaatgtatgttcatctcctctgttcctgcttatttttacttatatatttcagcagaaggtccgtggccattcacttcaattttgacctctgtcccatagtgaagaacatttaaagtaatactactggtcgaatatgaatgactttttaggaactactttttgtctaacctgaaaaagttccacatttggaagacaatttaatgatggtgaagaaataataaacctcactttacttgttaaaagggatatatatatatatatatatgtctgcaacttcagggagaaataagattgtgtttgaatattgtaggtagatgcatttgtaattaaggataatatcgtttaacaacatgtatttggtttccctcaacttacagacatacagctatttaaaactatggcaatacttaagcatctctaaatttaggtgctaaatatctattattctgttgtagtcattaggtgcccttctctgaagttatgtaaaataaaagcatctgatccttcaaggataaagttgaggatcacatggtacgtggcatttgttgttattgttttttaaagagatggaggctggctctgttggtgcggtgccatgatcatagttcactataacctcgaactcctggctcaagtgatctcccacttcagcctcccgagtatctgggattataagcaagagccactgctcccagctcatggtatttgttgatagtcataacatttttcctgtatggtaagacgtatttttctcagtttataaatacgtagcactcaggttgagacgacttggattttattcttagaaatccagaatcccttgaaaaggaaatattttctgtttcttataaataaaagagtaatcttactttcagaaggattttccttagtgaaacatgtgtaacattgaatgcatgttaaataaaaatggaatttctaactttttttcaatagtgctaattatcttttctgaatgattttgaatgtcttcttaaatataccctatttttctattttaaagttaagtgcctcacttgctgtccatagttagacaaagaaaaaccaatttccactgcactagtaccaaaatactactttatacattagtttttcataaaagctgctggaatgtcatgattcagtattacctaaatagatttctgctaaaatcctctccctcctgtcttttttaagttatggaaaaacacaactaaattcatttgatcatcagcacttgttagcaggatttccttttttacctttgccttgtttctttagcccacaaatagtactcagcatactttcattaaaaatttggcacaatatgataattgttaatattctgttcttcgtctgtgttttatttaacttttactagtgtttagaagtgcaagaatattaaatagccccttccttaactgtacatattatcttgaatgtagataaaatgaaaatactgtaaattagagtgtaggaaaactggcatagagttaatatattttaatgggtttacattatactttaaaagtaatttatataattaaaatatttggttttaactctatgggctattctttggttggctgaagagggaatgggtctagtaaggtttggaaagttaagctttgaacatggtctttgtgtttttttcctaacaaggaaaggtttagttcagctgtgctattttagtacacatcagttctcttgatttatggaagattcagtttatcaattaagaattcctgcagaagcacagaatcataccatgtaagagttggaaggaagcttaagagatttctgttcgaatctctttgtttcaaagatgaaactaaagcacagcatgttaaatgacttgtctaagttatagctagttagtagtaaataaactgaaaacctatatgctactgtagtccaaaattttattatgtcctcttaatctttacatttagtgagtcagtaaggaaatctctgcatatttctcattctctttgaaagaggaaaaaaacttctaagagagctacaactctatcactcatgacagagttgcttgtagaaaataactaattccttcagaaccctgagtgaattttttctaagaaatgtgacttgattaaaatggtttcaaaagagcaatagtggaaattaaagttttagaaaagagacctggcgtggtggttgacaactgtaatcccagtgctttgggaggctgaggccagaggatcacttgaggccaggagttcaagaccagcctggacaacatagcaagacccccctctctacaaaaaaaaattttttctgaaaagaataagtacattttagagtccatttatttgacgacaggcagtatgacaggttgctgaggtatataaaattttctagagaaatgctgagtttgatgacattttatcttcagttttgtagaacagatgttaaaatgttaactctcctggtgtgcagaaagctgtaatcatgacagttgataatatgcaatttagtttgattttataggtttaattataaaaggcttcacaatatgcatgttttaggaaaatgttcatttatttagtcatataatcgtttgtatatatgtaaataactttattctggaataatgtgggtgccatcttgagcgtgtgtttttatctgttttggattattttttgtatacaaacaccataatactgtattttcctgttatctacttaagtctagttctactttttcccaataatttcaggaaaatacaagcttgagatattatactatctcccttggtattttttgtgtgcaaagtcttagaattggatttataacattgataataaaaatataaaacgtttttcctcgggagttaagatggtaaaaagaaaaaaatagaatgaatatgatcatttctccatcataaaggaaagaagagacttcattgtgtgtgtgttttttttttttttttcgagatagagtttcactgttgtcacccaggctggtctcagctcactgcaacctccacttcctgggtacaagcgattctcctgcctcagcttcctgtgtagctgggattacaggtgtgcaaccacaaggctcggctaatttttttgtatttttagtagagatggggtttcaccatgttggccaggctggtctcgaactcctgacctcaagtgatccacccacctcggcctcgcaaagtgctgagattacaggtgtgagccactgtgcccagccgagacttcattgtttaatgtatatttttattttttccaaacaccagctcgaatcagagtatatttttattttgccacatacctttaaaaggtatttattgtgtcataatgttttaaatgttaaatatatgataccctcattcatgaagtgaagcagaaagggtctgtaaggaacattctaaacatttttaatgatattgcttttactgatcaagcttgttgtgccatattaaaattaaaagtcaaataaacaaagcagtcctcacagccttggaaagaaatagataattgtcttcttaagatgaggtgctttttatctgtggatgaatggaaatcacaccgcacaccccaacccccacccacccccancgnacagcagcaacaccccncagcagccncgcccacccccccctcccctnccctccccgagcagacccccgcccccccaccagcggctggagtgcagtggcgtgatctcggctcactgcaacctccatctcctgggttcaagtgattctcctgcctcatcctcccgagtagctaagactacaggcacacgccaccatgcccagctaatttttatatttttagtagagatggggtttcaccatgttggccaggatggtctcaatctcttgacctcgtgatccacccagtttggcctcccaaagtgctgggattacaggcgtgagccactacacctggccttgttcatcttctaattaaatatctttgaatgttttgtaataattttaatgttgacaataagagtttaaaaataatttgattttggactgtatttagatttctctttaattttgctgtagaaatagtaaatgatttaaagtggttatgatgtgttttatgaaggcttactattttatattgtacttatttaatttgtatttgagtctgtctaattttaaataaaaggtttatacatttga

SEQ ID NO: 300931 - DNA, 4377 bp, Homo sapiens
attgcagcattctttggattttgagaaaagttccacagaaggcagtgaaagctccataatggggaattccattgacacagtcagatatggcaaagaatcagatttaggggatgttagtgaagaacatggtgaaaataaggaaagctcaaataacgagcaggacaatagtctgcttgaacagtatttaacttcagttcaacagctggaagatgctgatgagaggaccaattttgatacagagacaagagatagcaaacttcacattgcttgtttcccagtacagttagatacattgtctgacggtgcttctgtagatgagagtcatggcatatctcctcctttgcaaggtgaaattagccagacacaagagaattctaaattaaatgcagaagttcaagggcagcagccagaatgtgattctacatttcagctattgcatgttggtgttactgtgtagcatgtcttttgggaggcagatatccacttaacttttcttaaaaatactttcagttgcctttgcttttttttggagggaaatactccctacccctaattttgttactacttatatagaatttgtattcatgtcttatatttttcagattctagatattgagctgagttttcattttgattttgttagctttttacttagctgtaaggtaccaaactatttatattgaaagctatatgcactttatttcttaactgaattgcatcaacaatgttcctgtttctttcatgtactcatttactttcaaaaataagctagaatatattaaagaaaatagaaaaaattaccttaaatatataaataagagaattttggcccttctgtgtctgagaaaattaattatatagcaaggaatgaaatttgataaagcaaatataaatgagaaatatgaggattgtgaattattgaaatttgccagtctccctggtgtaaaatgtttttttaaagccttttttcctcctttcggagtcaaggaaagcctttctataagcaaattaaggaagaaaaggtaggattataagatttctcaatggggatgattaaattgtctcatggaaaacttcagttaatgtcatgcatcagttttaacatatgaagtaaagtgttctatccaggattaaagtcaagtttacttaggcaacacaagaatatttcacttagatatgaagaaaggaaacactagtctccattcacttgaaatactctcatggcaaatatttatcctctcattaagtgctttttcaccctataggtaagcatttttgtgccaacatgttgtcagaaattaatgtatgttcatctcctctgttcctgcttatttttacttatatatttcagcagaaggtccgtggccattcacttcaattttgacctctgtcccatagtgaagaacatttaaagtaatactactggtcgaatatgaatgactttttaggaactactttttgtctaacctgaaaaagttccacatttggaagacaatttaatgatggtgaagaaataataaacctcactttacttgttaaaagggatatatatatatatatatatgtctgcaacttcagggagaaataagattgtgtttgaatattgtaggtagatgcatttgtaattaaggataatatcgtttaacaacatgtatttggtttccctcaacttacagacatacagctatttaaaactatggcaatacttaagcatctctaaatttaggtgctaaatatctattattctgttgtagtcattaggtgcccttctctgaagttatgtaaaataaaagcatctgatccttcaaggataaagttgaggatcacatggtacgtggcatttgttgttattgttttttaaagagatggaggctggctctgttggtgcggtgccatgatcatagttcactataacctcgaactcctggctcaagtgatctcccacttcagcctcccgagtatctgggattataagcaagagccactgctcccagctcatggtatttgttgatagtcataacatttttcctgtatggtaagacgtatttttctcagtttataaatacgtagcactcaggttgagacgacttggattttattcttagaaatccagaatcccttgaaaaggaaatattttctgtttcttataaataaaagagtaatcttactttcagaaggattttccttagtgaaacatgtgtaacattgaatgcatgttaaataaaaatggaatttctaactttttttcaatagtgctaattatcttttctgaatgattttgaatgtcttcttaaatataccctatttttctattttaaagttaagtgcctcacttgctgtccatagttagacaaagaaaaaccaatttccactgcactagtaccaaaatactactttatacattagtttttcataaaagctgctggaatgtcatgattcagtattacctaaatagatttctgctaaaatcctctccctcctgtcttttttaagttatggaaaaacacaactaaattcatttgatcatcagcacttgttagcaggatttccttttttacctttgccttgtttctttagcccacaaatagtactcagcatactttcattaaaaatttggcacaatatgataattgttaatattctgttcttcgtctgtgttttatttaacttttactagtgtttagaagtgcaagaatattaaatagccccttccttaactgtacatattatcttgaatgtagataaaatgaaaatactgtaaattagagtgtaggaaaactggcatagagttaatatattttaatgggtttacattatactttaaaagtaatttatataattaaaatatttggttttaactctatgggctattctttggttggctgaagagggaatgggtctagtaaggtttggaaagttaagctttgaacatggtctttgtgtttttttcctaacaaggaaaggtttagttcagctgtgctattttagtacacatcagttctcttgatttatggaagattcagtttatcaattaagaattcctgcagaagcacagaatcataccatgtaagagttggaaggaagcttaagagatttctgttcgaatctctttgtttcaaagatgaaactaaagcacagcatgttaaatgacttgtctaagttatagctagttagtagtaaataaactgaaaacctatatgctactgtagtccaaaattttattatgtcctcttaatctttacatttagtgagtcagtaaggaaatctctgcatatttctcattctctttgaaagaggaaaaaaacttctaagagagctacaactctatcactcatgacagagttgcttgtagaaaataactaattccttcagaaccctgagtgaattttttctaagaaatgtgacttgattaaaatggtttcaaaagagcaatagtggaaattaaagttttagaaaagagacctggcgtggtggttgacaactgtaatcccagtgctttgggaggctgaggccagaggatcacttgaggccaggagttcaagaccagcctggacaacatagcaagacccccctctctacaaaaaaaaattttttctgaaaagaataagtacattttagagtccatttatttgacgacaggcagtatgacaggttgctgaggtatataaaattttctagagaaatgctgagtttgatgacattttatcttcagttttgtagaacagatgttaaaatgttaactctcctggtgtgcagaaagctgtaatcatgacagttgataatatgcaatttagtttgattttataggtttaattataaaaggcttcacaatatgcatgttttaggaaaatgttcatttatttagtcatataatcgtttgtatatatgtaaataactttattctggaataatgtgggtgccatcttgagcgtgtgtttttatctgttttggattattttttgtatacaaacaccataatactgtattttcctgttatctacttaagtctagttctactttttcccaataatttcaggaaaatacaagcttgagatattatactatctcccttggtattttttgtgtgcaaagtcttagaattggatttataacattgataataaaaatataaaacgtttttcctcgggagttaagatggtaaaaagaaaaaaatagaatgaatatgatcatttctccatcataaaggaaagaagagacttcattgtgtgtgtgttttttttttttttttcgagatagagtcaagaccttttcgaaaaaaatattaaaagccaggcgtggtggctcacactgataatcccagtactttgggaagccaaggcgggtggatcatggtgaaaccctgtctctactggaaaa

SEQ ID NO: 300932 - DNA, 1887 bp, Homo sapiens
acttggtcttagttcccagtcgcggccaaatcacgcctcagccacctcccgcaagcctctcactgcctcagccacgctttccaggctggtttctggtccccatccgcggctggtccggccctgggaccgaatcacttcccagcgagaggaaggtcaaatttctcgaccggctacgggaaggtcgcggccgccgccctgtcagccgcctcggcgcccccaggacccctcgggtctctttaaccggaagcggaagtgcgtgtcggcgggatcatggcgactttggtcgaactgccggactcggtcctgctcgagatcttctcttacctcccggtacgggaccggatccgcatctccagggtctgtcaccgctggaagaggctggtggacgaccggtggctgtggcgacatgtcgacctgacgctctacacgatgcgacctaaagtcatgtggcacctccttcgaaggtacatggcatcccggctccattccctgcggatgggtggctacctgttctctggctcccaggccccccagttgtcccctgctctgttgagagccctgggccagaagtgccccaacctgaagcgcctctgcctgcacgtggccgacctgagcatggtgcccatcaccagcctgcccagcaccttgaggaccctggagctgcacagctgcgagatctccatggcctggctccacaagcagcaggaccccaccgtgctgcccctgcttgaatgcatcgtgctggaccgcgtccccgccttccgtgacgagcacctgcagggcctgacgcgcttccgggccttgcgctcgctggtgctgggtggtacctaccgtgtgaccgagacagggctggatgctggcctgcaggagctcagctatctgcagaggcttgaggtgctgggctgcaccctgtctgccgacagcaccctgctggccatcagccgccacctccgagatgtgcgcaagatccggctgaccgtgaggggcctctctgcccctggcctggctgtgctggagggaatgccggccctggagagtctgtgcctgcagggtcccctcgtcaccccagaaatgccctcccccactgaaatcctctcctcctgcctcactatgcccaagctcagagtccttgagctgcaggggctggggtgggagggtcaggaggcggagaagatcctgtgtaaggggctgccccactgtatggtcatcgtcagggcttgccccaaagagtctatggactggtggatgtaactactccacctgcccttgggacccatcccagttttcatcattgagccccagaccctctgagcagcaccttgaagagggcagataatcagacttgaggaaactgaaagccccaggttgagagaacagaggcctagggacctccagaccattggaatcactgtttgccagctgtgtggccttggtcatatcatcagcctctgggaagcctagttcccacatctggaaataaggatgatcatagctacctcacggttacattgcaaagccttactctaaaagctcccagcctccagaggctctcaatgaagagtcaccttcatggtcgtcttcaggaacaggacggatgaagaaggggtggggttaagactcaggggcacctgagggtctgagcccccttatgagtacccaagaaggactgtctatgcatgcacacccacaagcctatacaccatttatatacctacacgcacgcaagagacgcggagagataggcgatgcagactcgcgattcaatgatcgatatgctcataaaagtgctcaattatattttctgtattttgtatgctgtattttccaagacgtatattattttactattaaagaaaaaaatcatttttttttcccgaaaaaaaaaaa

SEQ ID NO: 300933 - DNA, 1931 bp, Homo sapiens
acttggtcttagttcccagtcgcggccaaatcacgcctcagccacctcccgcaagcctctcactgcctcagccacgctttccaggctggtttctggtccccatccgcggctggtccggccctgggaccgaatcacttcccagcgagaggaaggtcaaatttctcgaccggctacgggaaggtcgcggccgccgccctgtcagccgcctcggcgcccccaggacccctcgggtctctttaaccggaagcggaagtgcgtgtcggcgggatcatggcgactttggtcgaactgccggactcggtcctgctcgagatcttctcttacctcccggtacgggaccggatccgcatctccagggtctgtcaccgctggaagaggctggtggacgaccggtggctgtggcgacatgtcgacctgacgctctacacggccctatgatgccaagtagagaaatccagcaataaaaggcagatatgcgacctaaagtcatgtggcacctccttcgaaggtacatggcatcccggctccattccctgcggatgggtggctacctgttctctggctcccaggccccccagttgtcccctgctctgttgagagccctgggccagaagtgccccaacctgaagcgcctctgcctgcacgtggccgacctgagcatggtgcccatcaccagcctgcccagcaccttgaggaccctggagctgcacagctgcgagatctccatggcctggctccacaagcagcaggaccccaccgtgctgcccctgcttgaatgcatcgtgctggaccgcgtccccgccttccgtgacgagcacctgcagggcctgacgcgcttccgggccttgcgctcgctggtgctgggtggtacctaccgtgtgaccgagacagggctggatgctggcctgcaggagctcagctatctgcagaggcttgaggtgctgggctgcaccctgtctgccgacagcaccctgctggccatcagccgccacctccgagatgtgcgcaagatccggctgaccgtgaggggcctctctgcccctggcctggctgtgctggagggaatgccggccctggagagtctgtgcctgcagggtcccctcgtcaccccagaaatgccctcccccactgaaatcctctcctcctgcctcactatgcccaagctcagagtccttgagctgcaggggctggggtgggagggtcaggaggcggagaagatcctgtgtaaggggctgccccactgtatggtcatcgtcagggcttgccccaaagagtctatggactggtggatgtaactactccacctgcccttgggacccatcccagttttcatcattgagccccagaccctctgagcagcaccttgaagagggcagataatcagacttgaggaaactgaaagccccaggttgagagaacagaggcctagggacctccagaccattggaatcactgtttgccagctgtgtggccttggtcatatcatcagcctctgggaagcctagttcccacatctggaaataaggatgatcatagctacctcacggttacattgcaaagccttactctaaaagctcccagcctccagaggctctcaatgaagagtcaccttcatggtcgtcttcaggaacaggacggatgaagaaggggtggggttaagactcaggggcacctgagggtctgagcccccttatgagtacccaagaaggactgtctatgcatgcacacccacaagcctatacaccatttatatacctacacgcacgcaagagacgcggagagataggcgatgcagactcgcgattcaatgatcgatatgctcataaaagtgctcaattatattttctgtattttgtatgctgtattttccaagacgtatattattttactattaaagaaaaaaatcatttttttttcccgaaaaaaaaaaa

SEQ ID NO: 300934 - DNA, 1641 bp, Homo sapiens
  misc_feature (47)..(47): n is a, c, g, or t
cggtgactgagatcgtgccattgcactccagcctgggcaacaagcanaactccgtctcaaaaaaaaagaaaagaaaagaaacacctttgtaagcacacataaagaatatgttattagacaattttcctttttccattaggccctatgatgccaagtagagaaatccagcaataaaaggcagatatgcgacctaaagtcatgtggcacctccttcgaaggtacatggcatcccggctccattccctgcggatgggtggctacctgttctctggctcccaggccccccagttgtcccctgctctgttgagagccctgggccagaagtgccccaacctgaagcgcctctgcctgcacgtggccgacctgagcatggtgcccatcaccagcctgcccagcaccttgaggaccctggagctgcacagctgcgagatctccatggcctggctccacaagcagcaggaccccaccgtgctgcccctgcttgaatgcatcgtgctggaccgcgtccccgccttccgtgacgagcacctgcagggcctgacgcgcttccgggccttgcgctcgctggtgctgggtggtacctaccgtgtgaccgagacagggctggatgctggcctgcaggagctcagctatctgcagaggcttgaggtgctgggctgcaccctgtctgccgacagcaccctgctggccatcagccgccacctccgagatgtgcgcaagatccggctgaccgtgaggggcctctctgcccctggcctggctgtgctggagggaatgccggccctggagagtctgtgcctgcagggtcccctcgtcaccccagaaatgccctcccccactgaaatcctctcctcctgcctcactatgcccaagctcagagtccttgagctgcaggggctggggtgggagggtcaggaggcggagaagatcctgtgtaaggggctgccccactgtatggtcatcgtcagggcttgccccaaagagtctatggactggtggatgtaactactccacctgcccttgggacccatcccagttttcatcattgagccccagaccctctgagcagcaccttgaagagggcagataatcagacttgaggaaactgaaagccccaggttgagagaacagaggcctagggacctccagaccattggaatcactgtttgccagctgtgtggccttggtcatatcatcagcctctgggaagcctagttcccacatctggaaataaggatgatcatagctacctcacggttacattgcaaagccttactctaaaagctcccagcctccagaggctctcaatgaagagtcaccttcatggtcgtcttcaggaacaggacggatgaagaaggggtggggttaagactcaggggcacctgagggtctgagcccccttatgagtacccaagaaggactgtctatgcatgcacacccacaagcctatacaccatttatatacctacacgcacgcaagagacgcggagagataggcgatgcagactcgcgattcaatgatcgatatgctcataaaagtgctcaattatattttctgtattttgtatgctgtattttccaagacgtatattattttactattaaagaaaaaaatcatttttttttcccgaaaaaaaaaaa

SEQ ID NO: 300935 - DNA, 1861 bp, Homo sapiens
acttggtcttagttcccagtcgcggccaaatcacgcctcagccacctcccgcaagcctctcactgcctcagccacgctttccaggctggtttctggtccccatccgcggctggtccggccctgggaccgaatcacttcccagcgagaggaaggtcaaatttctcgaccggctacgggaaggtcgcggccgccgccctgtcagccgcctcggcgcccccaggacccctcgggtctctttaaccggaagcggaagtgcgtgtcggcgggatcatggcgactttggtcgaactgccggactcggtcctgctcgagatcttctcttacctcccgggtctgtcaccgctggaagaggctggtggacgaccggtggctgtggcgacatgtcgacctgacgctctacacgatgcgacctaaagtcatgtggcacctccttcgaaggtacatggcatcccggctccattccctgcggatgggtggctacctgttctctggctcccaggccccccagttgtcccctgctctgttgagagccctgggccagaagtgccccaacctgaagcgcctctgcctgcacgtggccgacctgagcatggtgcccatcaccagcctgcccagcaccttgaggaccctggagctgcacagctgcgagatctccatggcctggctccacaagcagcaggaccccaccgtgctgcccctgcttgaatgcatcgtgctggaccgcgtccccgccttccgtgacgagcacctgcagggcctgacgcgcttccgggccttgcgctcgctggtgctgggtggtacctaccgtgtgaccgagacagggctggatgctggcctgcaggagctcagctatctgcagaggcttgaggtgctgggctgcaccctgtctgccgacagcaccctgctggccatcagccgccacctccgagatgtgcgcaagatccggctgaccgtgaggggcctctctgcccctggcctggctgtgctggagggaatgccggccctggagagtctgtgcctgcagggtcccctcgtcaccccagaaatgccctcccccactgaaatcctctcctcctgcctcactatgcccaagctcagagtccttgagctgcaggggctggggtgggagggtcaggaggcggagaagatcctgtgtaaggggctgccccactgtatggtcatcgtcagggcttgccccaaagagtctatggactggtggatgtaactactccacctgcccttgggacccatcccagttttcatcattgagccccagaccctctgagcagcaccttgaagagggcagataatcagacttgaggaaactgaaagccccaggttgagagaacagaggcctagggacctccagaccattggaatcactgtttgccagctgtgtggccttggtcatatcatcagcctctgggaagcctagttcccacatctggaaataaggatgatcatagctacctcacggttacattgcaaagccttactctaaaagctcccagcctccagaggctctcaatgaagagtcaccttcatggtcgtcttcaggaacaggacggatgaagaaggggtggggttaagactcaggggcacctgagggtctgagcccccttatgagtacccaagaaggactgtctatgcatgcacacccacaagcctatacaccatttatatacctacacgcacgcaagagacgcggagagataggcgatgcagactcgcgattcaatgatcgatatgctcataaaagtgctcaattatattttctgtattttgtatgctgtattttccaagacgtatattattttactattaaagaaaaaaatcatttttttttcccgaaaaaaaaaaa

SEQ ID NO: 300936 - DNA, 1814 bp, Homo sapiens
acttggtcttagttcccagtcgcggccaaatcacgcctcagccacctcccgcaagcctctcactgcctcagccacgctttccaggctggtttctggtccccatccgcggctggtccggccctgggaccgaatcacttcccagcgagaggaaggtcaaatttctcgaccggctacgggaaggtcgcggccgccgccctgtcagccgcctcggcgcccccaggacccctcgggtctctttaaccggaagcggaagtgcgtgtcggcgggatcatggcgactttggtcgaactgccggactcggtcctgctcgagatcttctcttacctcccggtacgggaccggatccgcatctccagatgcgacctaaagtcatgtggcacctccttcgaaggtacatggcatcccggctccattccctgcggatgggtggctacctgttctctggctcccaggccccccagttgtcccctgctctgttgagagccctgggccagaagtgccccaacctgaagcgcctctgcctgcacgtggccgacctgagcatggtgcccatcaccagcctgcccagcaccttgaggaccctggagctgcacagctgcgagatctccatggcctggctccacaagcagcaggaccccaccgtgctgcccctgcttgaatgcatcgtgctggaccgcgtccccgccttccgtgacgagcacctgcagggcctgacgcgcttccgggccttgcgctcgctggtgctgggtggtacctaccgtgtgaccgagacagggctggatgctggcctgcaggagctcagctatctgcagaggcttgaggtgctgggctgcaccctgtctgccgacagcaccctgctggccatcagccgccacctccgagatgtgcgcaagatccggctgaccgtgaggggcctctctgcccctggcctggctgtgctggagggaatgccggccctggagagtctgtgcctgcagggtcccctcgtcaccccagaaatgccctcccccactgaaatcctctcctcctgcctcactatgcccaagctcagagtccttgagctgcaggggctggggtgggagggtcaggaggcggagaagatcctgtgtaaggggctgccccactgtatggtcatcgtcagggcttgccccaaagagtctatggactggtggatgtaactactccacctgcccttgggacccatcccagttttcatcattgagccccagaccctctgagcagcaccttgaagagggcagataatcagacttgaggaaactgaaagccccaggttgagagaacagaggcctagggacctccagaccattggaatcactgtttgccagctgtgtggccttggtcatatcatcagcctctgggaagcctagttcccacatctggaaataaggatgatcatagctacctcacggttacattgcaaagccttactctaaaagctcccagcctccagaggctctcaatgaagagtcaccttcatggtcgtcttcaggaacaggacggatgaagaaggggtggggttaagactcaggggcacctgagggtctgagcccccttatgagtacccaagaaggactgtctatgcatgcacacccacaagcctatacaccatttatatacctacacgcacgcaagagacgcggagagataggcgatgcagactcgcgattcaatgatcgatatgctcataaaagtgctcaattatattttctgtattttgtatgctgtattttccaagacgtatattattttactattaaagaaaaaaatcatttttttttcccgaaaaaaaaaaa

SEQ ID NO: 300937 - DNA, 1959 bp, Homo sapiens
acttggtcttagttcccagtcgcggccaaatcacgcctcagccacctcccgcaagcctctcactgcctcagccacgctttccaggctggtttctggtccccatccgcggctggtccggccctgggaccgaatcacttcccagcgagaggaaggtcaaatttctcgaccggctacgggaaggtcgcggccgccgccctgtcagccgcctcggcgcccccaggacccctcgggtctctttaaccggaagcggaagtgcgtgtcggcgggatcatggcgactttggtcgaactgccggactcggtcctgctcgagatcttctcttacctcccgggtctgtcaccgctggaagaggctggtggacgaccggtggctgtggcgacatgtcgacctgacgctctacacggctggagtgcagtggtatgatctcagctcactgcaacctctgcctcctgggttcaagtgattcccctgcctcagcctcctgagaagctgggactacagatgcgacctaaagtcatgtggcacctccttcgaaggtacatggcatcccggctccattccctgcggatgggtggctacctgttctctggctcccaggccccccagttgtcccctgctctgttgagagccctgggccagaagtgccccaacctgaagcgcctctgcctgcacgtggccgacctgagcatggtgcccatcaccagcctgcccagcaccttgaggaccctggagctgcacagctgcgagatctccatggcctggctccacaagcagcaggaccccaccgtgctgcccctgcttgaatgcatcgtgctggaccgcgtccccgccttccgtgacgagcacctgcagggcctgacgcgcttccgggccttgcgctcgctggtgctgggtggtacctaccgtgtgaccgagacagggctggatgctggcctgcaggagctcagctatctgcagaggcttgaggtgctgggctgcaccctgtctgccgacagcaccctgctggccatcagccgccacctccgagatgtgcgcaagatccggctgaccgtgaggggcctctctgcccctggcctggctgtgctggagggaatgccggccctggagagtctgtgcctgcagggtcccctcgtcaccccagaaatgccctcccccactgaaatcctctcctcctgcctcactatgcccaagctcagagtccttgagctgcaggggctggggtgggagggtcaggaggcggagaagatcctgtgtaaggggctgccccactgtatggtcatcgtcagggcttgccccaaagagtctatggactggtggatgtaactactccacctgcccttgggacccatcccagttttcatcattgagccccagaccctctgagcagcaccttgaagagggcagataatcagacttgaggaaactgaaagccccaggttgagagaacagaggcctagggacctccagaccattggaatcactgtttgccagctgtgtggccttggtcatatcatcagcctctgggaagcctagttcccacatctggaaataaggatgatcatagctacctcacggttacattgcaaagccttactctaaaagctcccagcctccagaggctctcaatgaagagtcaccttcatggtcgtcttcaggaacaggacggatgaagaaggggtggggttaagactcaggggcacctgagggtctgagcccccttatgagtacccaagaaggactgtctatgcatgcacacccacaagcctatacaccatttatatacctacacgcacgcaagagacgcggagagataggcgatgcagactcgcgattcaatgatcgatatgctcataaaagtgctcaattatattttctgtattttgtatgctgtattttccaagacgtatattattttactattaaagaaaaaaatcatttttttttcccgaaaaaaaaaaa

SEQ ID NO: 300938 - DNA, 2092 bp, Homo sapiens
acttggtcttagttcccagtcgcggccaaatcacgcctcagccacctcccgcaagcctctcactgcctcagccacgctttccaggctggtttctggtccccatccgcggctggtccggccctgggaccgaatcacttcccagcgagaggaaggtcaaatttctcgaccggctacgggaaggtcgcggccgccgccctgtcagccgcctcggcgcccccaggacccctcgggtctctttaaccggaagcggaagtgcgtgtcggcgggatcatggcgactttggtcgaactgccggactcggtcctgctcgagatcttctcttacctcccggtacgggaccggatccgcatctccagggtctgtcaccgctggaagaggctggtggacgaccggtggctgtggcgacatgtcgacctgacgctctacacgtagaaacggggttttgtcatgttggccaggatggtctcaatctcctgacctcgtgatccgcccgcatcggccttccaaagtgctgggattatgggcatgagccactgcgcccgggcttctttctcattttctcttgctgccgccatgtaagaagtgcctttcacctcctgccatgattttgaggcctccccagccatgtggaactatgcgacctaaagtcatgtggcacctccttcgaaggtacatggcatcccggctccattccctgcggatgggtggctacctgttctctggctcccaggccccccagttgtcccctgctctgttgagagccctgggccagaagtgccccaacctgaagcgcctctgcctgcacgtggccgacctgagcatggtgcccatcaccagcctgcccagcaccttgaggaccctggagctgcacagctgcgagatctccatggcctggctccacaagcagcaggaccccaccgtgctgcccctgcttgaatgcatcgtgctggaccgcgtccccgccttccgtgacgagcacctgcagggcctgacgcgcttccgggccttgcgctcgctggtgctgggtggtacctaccgtgtgaccgagacagggctggatgctggcctgcaggagctcagctatctgcagaggcttgaggtgctgggctgcaccctgtctgccgacagcaccctgctggccatcagccgccacctccgagatgtgcgcaagatccggctgaccgtgaggggcctctctgcccctggcctggctgtgctggagggaatgccggccctggagagtctgtgcctgcagggtcccctcgtcaccccagaaatgccctcccccactgaaatcctctcctcctgcctcactatgcccaagctcagagtccttgagctgcaggggctggggtgggagggtcaggaggcggagaagatcctgtgtaaggggctgccccactgtatggtcatcgtcagggcttgccccaaagagtctatggactggtggatgtaactactccacctgcccttgggacccatcccagttttcatcattgagccccagaccctctgagcagcaccttgaagagggcagataatcagacttgaggaaactgaaagccccaggttgagagaacagaggcctagggacctccagaccattggaatcactgtttgccagctgtgtggccttggtcatatcatcagcctctgggaagcctagttcccacatctggaaataaggatgatcatagctacctcacggttacattgcaaagccttactctaaaagctcccagcctccagaggctctcaatgaagagtcaccttcatggtcgtcttcaggaacaggacggatgaagaaggggtggggttaagactcaggggcacctgagggtctgagcccccttatgagtacccaagaaggactgtctatgcatgcacacccacaagcctatacaccatttatatacctacacgcacgcaagagacgcggagagataggcgatgcagactcgcgattcaatgatcgatatgctcataaaagtgctcaattatattttctgtattttgtatgctgtattttccaagacgtatattattttactattaaagaaaaaaatcatttttttttcccgaaaaaaaaaaa

SEQ ID NO: 300939 - DNA, 1788 bp, Homo sapiens
acttggtcttagttcccagtcgcggccaaatcacgcctcagccacctcccgcaagcctctcactgcctcagccacgctttccaggctggtttctggtccccatccgcggctggtccggccctgggaccgaatcacttcccagcgagaggaaggtcaaatttctcgaccggctacgggaaggtcgcggccgccgccctgtcagccgcctcggcgcccccaggacccctcgggtctctttaaccggaagcggaagtgcgtgtcggcgggatcatggcgactttggtcgaactgccggactcggtcctgctcgagatcttctcttacctcccgatgcgacctaaagtcatgtggcacctccttcgaaggtacatggcatcccggctccattccctgcggatgggtggctacctgttctctggctcccaggccccccagttgtcccctgctctgttgagagccctgggccagaagtgccccaacctgaagcgcctctgcctgcacgtggccgacctgagcatggtgcccatcaccagcctgcccagcaccttgaggaccctggagctgcacagctgcgagatctccatggcctggctccacaagcagcaggaccccaccgtgctgcccctgcttgaatgcatcgtgctggaccgcgtccccgccttccgtgacgagcacctgcagggcctgacgcgcttccgggccttgcgctcgctggtgctgggtggtacctaccgtgtgaccgagacagggctggatgctggcctgcaggagctcagctatctgcagaggcttgaggtgctgggctgcaccctgtctgccgacagcaccctgctggccatcagccgccacctccgagatgtgcgcaagatccggctgaccgtgaggggcctctctgcccctggcctggctgtgctggagggaatgccggccctggagagtctgtgcctgcagggtcccctcgtcaccccagaaatgccctcccccactgaaatcctctcctcctgcctcactatgcccaagctcagagtccttgagctgcaggggctggggtgggagggtcaggaggcggagaagatcctgtgtaaggggctgccccactgtatggtcatcgtcagggcttgccccaaagagtctatggactggtggatgtaactactccacctgcccttgggacccatcccagttttcatcattgagccccagaccctctgagcagcaccttgaagagggcagataatcagacttgaggaaactgaaagccccaggttgagagaacagaggcctagggacctccagaccattggaatcactgtttgccagctgtgtggccttggtcatatcatcagcctctgggaagcctagttcccacatctggaaataaggatgatcatagctacctcacggttacattgcaaagccttactctaaaagctcccagcctccagaggctctcaatgaagagtcaccttcatggtcgtcttcaggaacaggacggatgaagaaggggtggggttaagactcaggggcacctgagggtctgagcccccttatgagtacccaagaaggactgtctatgcatgcacacccacaagcctatacaccatttatatacctacacgcacgcaagagacgcggagagataggcgatgcagactcgcgattcaatgatcgatatgctcataaaagtgctcaattatattttctgtattttgtatgctgtattttccaagacgtatattattttactattaaagaaaaaaatcatttttttttcccgaaaaaaaaaaa

SEQ ID NO: 300940 - DNA, 1648 bp, Homo sapiens
acttggtcttagttcccagtcgcggccaaatcacgcctcagccacctcccgcaagcctctcactgcctcagccacgctttccaggctggtttctggtccccatccgcggctggtccggccctgggaccgaatcacttcccagcgagaggaaggtcaaatttctcgaccggctacgggaaggtcgcggccgccgccctgtcagccgcctcggcgcccccaggacccctcgggtctctttaaccggaagcggaagtgcgtgtcggcgggatcatggcgactttggtcgaactgccggactcgccctgctctgttgagagccctgggccagaagtgccccaacctgaagcgcctctgcctgcacgtggccgacctgagcatggtgcccatcaccagcctgcccagcaccttgaggaccctggagctgcacagctgcgagatctccatggcctggctccacaagcagcaggaccccaccgtgctgcccctgcttgaatgcatcgtgctggaccgcgtccccgccttccgtgacgagcacctgcagggcctgacgcgcttccgggccttgcgctcgctggtgctgggtggtacctaccgtgtgaccgagacagggctggatgctggcctgcaggagctcagctatctgcagaggcttgaggtgctgggctgcaccctgtctgccgacagcaccctgctggccatcagccgccacctccgagatgtgcgcaagatccggctgaccgtgaggggcctctctgcccctggcctggctgtgctggagggaatgccggccctggagagtctgtgcctgcagggtcccctcgtcaccccagaaatgccctcccccactgaaatcctctcctcctgcctcactatgcccaagctcagagtccttgagctgcaggggctggggtgggagggtcaggaggcggagaagatcctgtgtaaggggctgccccactgtatggtcatcgtcagggcttgccccaaagagtctatggactggtggatgtaactactccacctgcccttgggacccatcccagttttcatcattgagccccagaccctctgagcagcaccttgaagagggcagataatcagacttgaggaaactgaaagccccaggttgagagaacagaggcctagggacctccagaccattggaatcactgtttgccagctgtgtggccttggtcatatcatcagcctctgggaagcctagttcccacatctggaaataaggatgatcatagctacctcacggttacattgcaaagccttactctaaaagctcccagcctccagaggctctcaatgaagagtcaccttcatggtcgtcttcaggaacaggacggatgaagaaggggtggggttaagactcaggggcacctgagggtctgagcccccttatgagtacccaagaaggactgtctatgcatgcacacccacaagcctatacaccatttatatacctacacgcacgcaagagacgcggagagataggcgatgcagactcgcgattcaatgatcgatatgctcataaaagtgctcaattatattttctgtattttgtatgctgtattttccaagacgtatattattttactattaaagaaaaaaatcatttttttttcccgaaaaaaaaaaa

SEQ ID NO: 300941 - DNA, 1782 bp, Homo sapiens
acttggtcttagttcccagtcgcggccaaatcacgcctcagccacctcccgcaagcctctcactgcctcagccacgctttccaggctggtttctggtccccatccgcggctggtccggccctgggaccgaatcacttcccagcgagaggaaggtcaaatttctcgaccggctacgggaaggtcgcggccgccgccctgtcagccgcctcggcgcccccaggacccctcgggtctctttaaccggaagcggaagtgcgtgtcggcgggatcatggcgactttggtcgaactgccggactcggtcctgctcgagatcttctcttacctcccggtacgggaccggatccgcatctccagggtctgtcaccgctggaagaggctggtggacgaccggtggctgtggcgacatgtcgacctgacgctctacacgatgcgacctaaagtcatgtggcacctccttcgaaggtacatggcatcccggctccattccctgcggatgggtggctacctgttctctggctcccaggccccccagttgtcccctgctctgttgagagccctgggccagaagtgccccaacctgaagcgcctctgcctgcacgtggccgacctgagcatggtgcccatcaccagcctgcccagcaccttgaggaccctggagctgcacagctgcgagatctccatggcctggctccacaagcagcaggaccccaccgtgctgcccctgcttgaatgcatcgtgctggaccgcgtccccgccttccgtgacgagcacctgcagggcctgacgcgcttccgggccttgcgctcgctggtgctgggtggtacctaccgtgtgaccgagacagggctggatgctggcctgcaggagctcagctatctgcagaggcttgaggtgctgggctgcaccctgtctgccgacagcaccctgctggccatcagccgccacctccgagatgtgcgcaagatccggctgaccgtgaggggcctctctgcccctggcctggctgtgctggagggaatgccggccctggagagtctgtgcctgcagggtcccctcgtcaccccagaaatgccctcccccactgaaatcctctcctcctgcctcactatgcccaagctcagagtccttgagctgcaggggctggggtgggagggtcaggaggcggagaagatcctgtgtaaggggctgccccactgtatggtcatcgtcagggcttgccccaaagagtctatggactggtggatgtaactactccacctgcccttgggacccatcccagttttcatcattgagccccagaccctctgagcagcaccttgaagagggcagataatcagactctgggaagcctagttcccacatctggaaataaggatgatcatagctacctcacggttacattgcaaagccttactctaaaagctcccagcctccagaggctctcaatgaagagtcaccttcatggtcgtcttcaggaacaggacggatgaagaaggggtggggttaagactcaggggcacctgagggtctgagcccccttatgagtacccaagaaggactgtctatgcatgcacacccacaagcctatacaccatttatatacctacacgcacgcaagagacgcggagagataggcgatgcagactcgcgattcaatgatcgatatgctcataaaagtgctcaattatattttctgtattttgtatgctgtattttccaagacgtatattattttactattaaagaaaaaaatcatttttttttcccgaaaaaaaaaaa

SEQ ID NO: 300942 - DNA, 1491 bp, Homo sapiens
acttggtcttagttcccagtcgcggccaaatcacgcctcagccacctcccgcaagcctctcactgcctcagccacgctttccaggctggtttctggtccccatccgcggctggtccggccctgggaccgaatcacttcccagcgagaggaaggtcaaatttctcgaccggctacgggaaggtcgcggccgccgccctgtcagccgcctcggcgcccccaggacccctcgggtctctttaaccggaagcggaagtgcgtgtcggcgggatcatggcgactttggtcgaactgccggactcggtcctgctcgagatcttctcttacctcccggtacgggaccggatccgcatctccagggtctgtcaccgctggaagaggctggtggacgaccggtggctgtggcgacatgtcgacctgacgctctacacggtacgcgcagctggccgggcgggcctgggccgcggtcgcggtgcccggaccccgaagaccacctctcccaccctgggactgtgtgtcggggcccgggctggggatttagagccaggcgatccggggcctatctcggcatcatcgcttaccagctcctcttcgacctcagggcctcaatttcctcatccctgcaatggggataaaggacagtacctgcctcacggggctattatgggacttcactgagatcacgcagggaaagggcttagaacagtctggcacatatttatcattcgataaatgctaatttatgactatgttatcaagtttttgttttgtttttgagacagagtctcgctctgctgctcaggctggagtgcagtggtgcgattgcagcctcgacctcccaagctcaagcgatcctctcgcatcagcctcctgagtagctggaaccacgggcgctcgccactacacctgctaattttttattttttgtagagacggagtctcactatgctgcccaggctggtctcgaactcctgggctcaagtgattctcccgacttagcctcccaaagtgttcagattacaggcatgagccacagcaactggctcaaaacatttatagatatatttgttgccctttttgaaactgtcttcatagataattgctattataaagtgaatttgcacccttccttttacgttacttcatatgtgtgtgtccaaaaacaattatagtgttagtaatgtatttctgaacttcgggtaatgctgttctactatttagatagtgttctacttttaaacaattttactgtatatatccatctgtaactccctttaatacagttgcttttgaagttctttttttaaggacagagtcttgctatgttgcccaggatggtctcgaactcctggactgaagctgtcccccaacctcagtctcccaaagtgctgggattacaggtgtgagccacagtgtctggcctgataatatgaaactttttctcagttgttgaaacttagttgttggttttgcgaggaaaagttgattcgtcca

SEQ ID NO: 300943 - DNA, 2474 bp, Homo sapiens
agcgtggagcagctaatcctcacagacctgtaggagctggagtgggagctcaagcaggattcttcccgagtccctggcatcctcagaagcttcaactctggaggcaatgggtcgaaaggaagaagatgactgcagttcctggaagaaacagaccaccaacatccggaaaaccttcatttttatggaagtgctgggatcaggagctttctcagaagttttcctggtgaagcaaagactgactgggaagctctttgctctgaagtgcatcaagaagtcacctgccttccgggacagcagcctggagaatgagattgctgtgttgaaaaagatcaagcatgaaaacattgtgaccctggaggacatctatgagagcaccacccactactacctggtcatgcagcttgtttctggtggggagctctttgaccggatcctggagcggggtgtctacacagagaaggatgccagtctggtgatccagcaggtcttgtcggcagtgaaatacctacatgagaatggcatcgtccacagagacttaaagcccgaaaacctgctttaccttacccctgaagagaactctaagatcatgatcactgactttggtctgtccaagatggaacagaatggcatcatgtccactgcctgtgggaccccaggctacgtggctccagaagtgctggcccagaaaccctacagcaaggctgtggattgctggtccatcggcgtcatcacctacatattgctctgtggataccccccattctatgaagaaacggagtctaagcttttcgagaagatcaaggagggctactatgagtttgagtctccattctgggatgacatttctgagtcagccaaggactttatttgccacttgcttgagaaggatccgaacgagcggtacacctgtgagaaggccttgagtcatccctggattgacggaaacacagccctccaccgggacatctacccatcagtcagcctccagatccagaagaactttgctaagagcaagtggaggcaagccttcaacgcagcagctgtggtgcaccacatgaggaagctacacatgaacctgcacagcccgggcgtccgcccagaggtggagaacaggccgcctgaaactcaagcctcagaaacctctagacccagctcccctgagatcaccatcaccgaggcacctgtcctggaccacagtgtagcactccctgccctgacccaattaccctgccagcatggccgccggcccactgcccctggtggcaggtccctcaactgcctggtcaatggctccctccacatcagcagcagcctggtgcccatgcatcaggggtccctggccgccgggccctgtggctgctgctccagctgcctgaacattgggagcaaaggaaagtcctcctactgctctgagcccacactcctcaaaaaggccaacaaaaaacagaacttcaagtcggaggtcatggtaccagttaaagccagtggcagctcccactgccgggcagggcagactggagtctgtctcattatgtgattcctggagcctgtgcctatgtcactgcaattttcaggagacatattcaactcctctgctcttccaaacctggtgtctatccggcagagggaggaaggcagagcaagtggagcagggcttagcaggagcagtttctggccagaagcaccagcctgctgccagcggggcagcccctcataggaggcccaggagggagccccaaggcgtagaagccttgttgaagctgtgagcaggagaagcggtgcccaccagcttccaggtctccctgacctgcctgctctatgccccacaccctacgtgccgtggctctgtgcagtgtacgtagatagctctcgcctgggtctgtgctgtttgtcgtgaaaagcttaatgggctggccaggctgtgtcaccttctccaagcaaagccatatggagcatctacccagactcccactctgcacacactcactcccacctctcaagcctccaacctcttggccagattgggctcattaatgtcgttgcctgcccatctgcatgaatgacaggcagctccccatggtggtctgcctgtgagctcttcaagttctaatccttaactccaggattagctcccaagtgcgctgagacccagccagcacacttctggcccttctccctgcctcaatctaaaagcagtgccacaccctccaaagtggaatagaaagaagttcatgagtaagggctgcaaggaattcttatcctggccacatgtcctccgtgcacacacccaatggagttaaccttggaagttgactattttaatgtctgccaggagttctaatcctgcctctgttcccttttctctccttgaaagtccagcacaccattcttgtccttccccagtttcctcgccctccacccctccagcttcatgctcagtgttgtgcttaataaaatggacatatttttctcta

SEQ ID NO: 300944 - DNA, 2398 bp, Homo sapiens
agcgtggagcagctaatcctcacagacctgtaggagctggagtgggagctcaagcaggattcttcccgagtccctggcatcctcagaagcttcaactctggaggcaatgggtcgaaaggaagaagatgactgcagttcctggaagaaacagaccaccaacatccggaaaaccttcatttttatggaagtgctgggatcaggagctttctcagaagttttcctggtgaagcaaagactgactgggaagctctttgctctgaagtgcatcaagaagtcacctgccttccgggacagcagcctggagaatgagattgctgtgttgaaaaagatcaagcatgaaaacattgtgaccctggaggacatctatgagagcaccacccactactacctggtcatgcagcttgtttctggtggggagctctttgaccggatcctggagcggggtgtctacacagagaaggatgccagtctggtgatccagcaggtcttgtcggcagtgaaatacctacatgagaatggcatcgtccacagagacttaaagcccgaaaacctgctttaccttacccctgaagagaactctaagatcatgatcactgactttggtctgtccaagatggaacagaatggcatcatgtccactgcctgtgggaccccaggctacgtgggctctgtggataccccccattctatgaagaaacggagtctaagcttttcgagaagatcaaggagggctactatgagtttgagtctccattctgggatgacatttctgagtcagccaaggactttatttgccacttgcttgagaaggatccgaacgagcggtacacctgtgagaaggccttgagtcatccctggattgacggaaacacagccctccaccgggacatctacccatcagtcagcctccagatccagaagaactttgctaagagcaagtggaggcaagccttcaacgcagcagctgtggtgcaccacatgaggaagctacacatgaacctgcacagcccgggcgtccgcccagaggtggagaacaggccgcctgaaactcaagcctcagaaacctctagacccagctcccctgagatcaccatcaccgaggcacctgtcctggaccacagtgtagcactccctgccctgacccaattaccctgccagcatggccgccggcccactgcccctggtggcaggtccctcaactgcctggtcaatggctccctccacatcagcagcagcctggtgcccatgcatcaggggtccctggccgccgggccctgtggctgctgctccagctgcctgaacattgggagcaaaggaaagtcctcctactgctctgagcccacactcctcaaaaaggccaacaaaaaacagaacttcaagtcggaggtcatggtaccagttaaagccagtggcagctcccactgccgggcagggcagactggagtctgtctcattatgtgattcctggagcctgtgcctatgtcactgcaattttcaggagacatattcaactcctctgctcttccaaacctggtgtctatccggcagagggaggaaggcagagcaagtggagcagggcttagcaggagcagtttctggccagaagcaccagcctgctgccagcggggcagcccctcataggaggcccaggagggagccccaaggcgtagaagccttgttgaagctgtgagcaggagaagcggtgcccaccagcttccaggtctccctgacctgcctgctctatgccccacaccctacgtgccgtggctctgtgcagtgtacgtagatagctctcgcctgggtctgtgctgtttgtcgtgaaaagcttaatgggctggccaggctgtgtcaccttctccaagcaaagccatatggagcatctacccagactcccactctgcacacactcactcccacctctcaagcctccaacctcttggccagattgggctcattaatgtcgttgcctgcccatctgcatgaatgacaggcagctccccatggtggtctgcctgtgagctcttcaagttctaatccttaactccaggattagctcccaagtgcgctgagacccagccagcacacttctggcccttctccctgcctcaatctaaaagcagtgccacaccctccaaagtggaatagaaagaagttcatgagtaagggctgcaaggaattcttatcctggccacatgtcctccgtgcacacacccaatggagttaaccttggaagttgactattttaatgtctgccaggagttctaatcctgcctctgttcccttttctctccttgaaagtccagcacaccattcttgtccttccccagtttcctcgccctccacccctccagcttcatgctcagtgttgtgcttaataaaatggacatatttttctcta

SEQ ID NO: 300945 - DNA, 272 bp, Homo sapiens
ctctgaaatgagaagtgggcacccaggtttcaagaggccacaaggcaaagggaaagtttaagctccaaggccctctgaggttgcagaaggccagaggctgctcttgtgtctccttagcaagccttcaacgcagcagctgtggtgcaccacatgaggaagctacacatgaacctgcacagcccgggcgtccgcccagaggtggagaacaggccgcctgaaactcaagcctcagaaacctctagacccagctcccctgagatcaccatcaccga

SEQ ID NO: 300946 - DNA, 426 bp, Homo sapiens
caactttcttaaacatattttatatagcattcataagtcagggaaagtataaggagaggtggcaagggttggagggcataatgtacacagggaccttctagggatgactgtgccaaggcttggcacttgcataaacactttacgggacctgtaccattctggaatttgaggcagatctgcgtcctggtcacaccactgttctgggaccttcagtgcccacctgtgtatacagtgggagcttgggggagcagagaggctggctcagggaggacaggtttgttcagtagtatgcctccttcctgtcctgctgcaggctctgtggataccccccattctatgaagaaacggagtctaagcttttcgagaagatcaaggagggctactatgagtttgagtctccattctgggatgacatttctgagtcag

SEQ ID NO: 300947 - DNA, 1276 bp, Homo sapiens
tggttgtaaagtttagttttaatatttatttattttttttttttgaggagtctcgctctgtcgcccaggctagatagagtgcagtggcacgatcttggctcactgtagcctctgcctccaaggttcaagtgattctcctgcctcagcctcccaaaatgctgggattacaggtgtgagccaccacctgtataagtttaatgtttaaaagttttaatggttgtaaaagtttacttcttaagtagaaaatggttatcttttacttagtttgtagagatgactgtttcaagataggactaactggagatacgtctggctacttaaaatatggtaactagttgtaacatctttaattagttattttttcaaggccaaggtatggtggtagtttgctaggctcataggcttctaggagaaattatagattcaaggtttcaactcaaggagttggattttattctcactactttcttaggcagaatgacatgatgcttattctgcaaacactccaattaaaggctttatgtgactgatgtgaaactaaaaagttagactggtttaatttttagctgtcctcctccattacataacattttgcattcttaagtcatagtcttaactactgctttaatttgcaggatgagtctgaatgtacttcagatgaggaaatctttatctcacaagatgaaatacagtcatttatggctaataaccagtctttctacagcaatagagaacaataccgacagcatctgaaggagaaatttaataaatactgccggttaaatgatcacaagaggcccatttgtagtggctggttgacaacggctggagcaaattaaataaataaaatagctctgtctttcaatgaaacactcacgatgactactgcgccttctctttcgaaaaactcttaatttagtgacttatggcaaaattttatcttaaatcaatgtgattctttcttgttttgggagacggtggaggtatcctcattagttctttcttcaggcttgtgtctttagttgcgtggctgcgcaggcctgccatatgatttaagccatctcttttcattaaatgtttctcttcctgtgagacttactaaagcaacttagtggcaaaaagtaatgttgtacttataattctgtacagaaatgacaatgagctgaatatatggttttacaaagtagacatccacttgcaaaatgtttggatgtaatgttaaagcgcaatgtgcaaaatttaaaataaagaatatttattaatacgcacagtaaaa

SEQ ID NO: 300948 - DNA, 2803 bp, Homo sapiens
gcgagcggctgactgcccgtagaggaaacgacattcggagctgcgctcccgcccaggccggccctgacgcgggcctcgtcagccagtaacagggagcagaggtgggagttagcgaggcgaccacgaaaacggtgaaggtcggaaccgacagcctcctccgagaagggcaggagctgggaggaggcggcagcggcggcggcagaaacagcagcggcggcggcggcggcagctgggaggaggtggtgacggtggcaacggcagcgtcggggacgatggcgcgactcgtggcagtgtgcagggacggggaggaggagttccccttcgagaggaggcagattcccctctacatagacgacaccctgacgatggtgatggaatttcctgataatgtgttaaatctcgatggacatcagaataatggtgcacagctaaagcagttcattcagcgacatggtatgcttaagcaacaggatctaagtattgccatggtggtgacatcacgcgaagtcctgagtgcactttctcagcttgtcccatgtgttggttgtcgtcgcagtgtggagcgtctcttttcccagcttgtagagtctggaaatcctgctcttgaacccctaacagtagggcccaagggagtcctgtctgtaactagaagctgcatgactgatgcaaagaagctttatacattattttatgtacatgggtccaaactaaatgacatgatagatgctattccaaaaagtaagaagaataagagatgtcagttgcactccttagatacgcacaagccaaaacctttgggaggttgttggatggatgtatgggaactaatgtcgcaggaatgcagggatgaagtagttttaattgactcgagttgtcttttagaaacactagaaacatatctgcgaaaacacaggttttgcactgattgcaaaaataaagtcctccgagcatacaatatccttattggtgaacttgactgcagcaaagaaaagggctactgtgctgcactttatgaaggcttgcggtgctgtccacatgaacgacacatacatgtttgctgtgaaacagacttcattgcacatcttttgggtcgtgctgagccagagttcgcaggagggcgaagagaaaggcatgcaaagacaatagatatagctcaagaagaagttctgacctgcttgggaattcatctttatgaaagactgcatcgaatctggcagaagctacgggcagaagagcagacatggcagatgcttttctatcttggtgttgatgctttacgcaagagttttgagatgaccgtggaaaaagtacagggtattagcagattggaacaactttgtgaggaattttcagaagaggaacgagtaagagaactcaagcaagaaaagaaacgccaaaaacggaagaatagacgaaaaaataagtgtgtgtgtgatattcctactcccttacaaacagcagatgaaaaggaagtaagccaagagaaggaaacagacttcatagaaaatagcagctgcaaagcctgtggcagcactgaagatggtaatacttgtgtagaagtaattgttaccaatgaaaatacatcatgtacctgtcctagcagtggcaatcttttggggtcccctaaaataaagaaaggcttatctccacactgtaatggtagtgattgtggatattcatctagcatggaagggagtgaaacaggttctcgggagggttcggatgttgcctgcactgaaggcatttgtaatcatgatgaacacggtgatgactcttgtgttcatcactgtgaagacaaagaggatgatggtgatagttgtgttgaatgttgggcaaattctgaagagaacgacacaaaaggaaaaaataaaaagaagaaaaagaaaagcaagatactgaaatgtgatgaacatatccagaagcttggaagctgtattacagatccaggtaatcgagagacctcaggaaataccatgcacacagtgtttcaccgtgacaagaccaaagatacacatcctgaaagctgttgcagctctgaaaagggtgggcagccattgccttggtttgagcataggaaaaatgtaccacagtttgcagaacctacagaaacgttgtttggtcccgattccggaaaaggtgccaagagcttagttgaactccttgatgagtctgaatgtacttcagatgaggaaatctttatctcacaagatgaaatacagtcatttatggctaataaccagtctttctacagcaatagagaacaataccgacagcatctgaaggagaaatttaataaatactgccggttaaatgatcacaagaggcccatttgtagtggctggttgacaacggctggagcaaattaaataaataaaatagctctgtctttcaatgaaacactcacgatgactactgcgccttctctttcgaaaaactcttaatttagtgacttatggcaaaattttatcttaaatcaatgtgattctttcttgttttgggagacggtggaggtatcctcattagttctttcttcaggcttgtgtctttagttgcgtggctgcgcaggcctgccatatgatttaagccatctcttttcattaaatgtttctcttcctgtgagacttactaaagcaacttagtggcaaaaagtaatgttgtacttataattctgtacagaaatgacaatgagctgaatatatggttttacaaagtagacatccacttgcaaaatgtttggatgtaatgttaaagcgcaatgtgcaaaatttaaaataaagaatatttattaatacgcacagtaaaa

SEQ ID NO: 300949 - DNA, 3484 bp, Homo sapiens
  misc_feature (1756)..(1756): n is a, c, g, or t
  misc_feature (1814)..(1814): n is a, c, g, or t
  misc_feature (3014)..(3014): n is a, c, g, or t
  misc_feature (3168)..(3168): n is a, c, g, or t
  misc_feature (3176)..(3176): n is a, c, g, or t
  misc_feature (3478)..(3478): n is a, c, g, or t
gcgagcggctgactgcccgtagaggaaacgacattcggagctgcgctcccgcccaggccggccctgacgcgggcctcgtcagccagtaacagggagcagaggtgggagttagcgaggcgaccacgaaaacggtgaaggtcggaaccgacagcctcctccgagaagggcaggagctgggaggaggcggcagcggcggcggcagaaacagcagcggcggcggcggcggcagctgggaggaggtggtgacggtggcaacggcagcgtcggggacgatggcgcgactcgtggcagtgtgcagggacggggaggaggagttccccttcgagaggaggcagattcccctctacatagacgacaccctgacgatggtgatggaatttcctgataatgtgttaaatctcgatggacatcagaataatggtgcacagctaaagcagttcattcagcgacatggtatgcttaagcaacaggatctaagtattgccatggtggtgacatcacgcgaagtcctgagtgcactttctcagcttgtcccatgtgttggttgtcgtcgcagtgtggagcgtctcttttcccagcttgtagagtctggaaatcctgctcttgaacccctaacagtagggcccaagggagtcctgtctgtaactagaagctgcatgactgatgcaaagaagctttatacattattttatgtacatgggtccaaactaaatgacatgatagatgctattccaaaaagtaagaagaataagagatgtcagttgcactccttagatacgcacaagccaaaacctttgggaggttgttggatggatgtatgggaactaatgtcgcaggaatgcagggatgaagtagttttaattgactcgagttgtcttttagaaacactagaaacatatctgcgaaaacacaggttttgcactgattgcaaaaataaagtcctccgagcatacaatatccttattggtgaacttgactgcagcaaagaaaagggctactgtgctgcactttatgaaggcttgcggtgctgtccacatgaacgacacatacatgtttgctgtgaaacagacttcattgcacatcttttgggtcgtgctgagccagagttcgcaggagggtatgagtatgtaatttgctagaatgggctatctagcgctttgcttcattttattactgaaagtttattttcatcaccttctgcctcagtacatatgatatatgtataaattaaagtatgcctgtaaagattttgcttctctttaaagtatgcatttcttaattgactgaaaatagggaaaaactgttctctggtgtttggttcagtcctctgctagttcttgcttgaagggaggcaggcttttttggctttcattgttacagactatcattttcatttgaaaatgattagaagggatttttctccctctatccatgcattatcatgtgtaaattttattcacaataatggtttttgcataagtcagatctttgcagtaggggattaagaaatgccttattgaatgtaattcacgaactgtgtatattatattattattactacacagaaacctaaagtagtatctctggctttgttgtaaaaataaaatcagatgatgatgttaatagaataaatcaaatgcatttccttttgtatttagggtatcaaccctcatttgagtgcctactttctgctagaatacaaagggcttttttatcgccaaagttctgtgaacacttgtaaagactggcctggtgnaggactcttgcccatgatgaatcactttggcattgcctttctcaattcctcctcaaancaaaaaacctaaagaaggaaaaaatgttttgctataattggaaagtaaaaggaactgttgtgtctactatgagctggacacttctatgtgattgctttgtgccctaaaacccatctttttagagccagttcctgaattactttatttttagcaatacgaggactaaattctacttgcatgtgtatttctcattggttgtggacatgcatgcttgtatagcaacatatacgttgagtgtaaatgtataactgtcttgttactaggtaagcacattgtgtttaaaacctgaacttgcagctgtgttatccatcttttactgtttcagttaaaggtattagtgtgtgattattcccttttataggcgaagagaaaggcatgcaaagacaatagatatagctcaagaagaagttctgacctgcttgggaattcatctttatgaaagactgcatcgaatctggcagaagctacgggcagaagagcagacatggcagatgcttttctatcttggtgttgatgctttacgcaagagttttgagatgaccgtggaaaaagtacagggtattagcagattggaacaactttgtgaggaattttcagaagaggaacgagtaagagaactcaagcaagaaaagaaacgccaaaaacggaagaatagacgaaaaaataagtgtgtgtgtgatattcctactcccttacaaacagcagatgaaaaggaagtaagccaagagaaggtaatatttcttaatatcaactcttaagtgtgtatgtattgcttgtagatagaagtacaggccaggtgtggtggctcacgcctgtgatcccagcactttgggaggcccagggtggaggtatcacttgagcctaggagtttgggaccagcctgggcaagatagtgagatctctatctctatttattttattttatttttttaataaaaataaaaagtacagtcgtcccttggtatctgtggggtttgattccaggacttcctgtagataccaaaatctgcagatgtgcaagtccctgatgtaaaatggtgtaatatttgcatatagtctatgcacatcctccttatacttttatttctgagacagggtctcactctgtcacccggactggagtgcagtggcacaatcatggctcactgcagcgttcatctcccaggctcatgtcatcttcccacctcagcttcccaagtngctggaactacaggcttaccccaccaggcccagctaattttttgtatttattgtagagatggcgttttaccatgttgttcaggctggtctccagcttgtgggctcaagcaattctcccacctcagcctcccaaaatgctacaattacaggcatnaaccaccntgcctggcctcttgtattcttaaattatctctaaattataatacctaatgcaatgtaaaagctatgtaaggctgggcatggtggctcacgcctgtaatcccagctacttgggaggctgaggcatgagaatttcttgaacccaggaggcaaaggttgcagtgagccaagatcgctccactgcagtccagcctgggcgacagagtgaaactctctcaaaataaataaaaactgtttaaatagttgttatactgtattgtttagaaaataaggacaagaaaaaagtctgtacatgttcagtacanatgcag

SEQ ID NO: 300950 - DNA, 660 bp, Homo sapiens
aaagaataattgctattatatcatgcctttttacctgtgaaatcctttgctgtggtatcagatccagaagcttggaagctgtattacagatccaggtaatcgagagacctcaggaaataccatgcacacagtgtttcaccgtgacaagaccaaagatacacatcctgaaagctgttgcagctctgaaaagggtgggcagccattgccttggtttgagcataggaaaaatgtaccacagtttgcagaacctacagaaacgttgtttggtcccgattccggaaaaggtgccaagagcttagttgaactccttgtaagtattccatgtggtcttactgtacataactgtttgggaacggggtggatgtgggaggggatagtatttgagggcttaaggtaggtagttgaaggaagcttatgagaaattaagggtagtatttcattattgtttggggacttcatttctgtccttccactcgtggtttatgcaactactctggaacacgtttccatggccgcctctgtctcagtagaagacattataggtattccttgagttacagtggggttacattccaataaacccattataactcaaaaatactgcgagttgaaaatacattcaacatcccaataaaccctttgtaaagttaaaaaaaaaaa

SEQ ID NO: 300951 - DNA, 448 bp, Homo sapiens
tctaccattttcgcagagtattctatctggtgtagatgcttacgcaagagttttgagatgaccgtggaaaaagtacagggtattagcagattggaacaactttgtgaggaattttcagaagaggaacgagtaagagaactcaagcaagaaaagaaacgccaaaaacggaagaatagacgaaaaaataagtgtgtgtgtgatattcctactcccttacaaacagcagatgaaaaggaagtaagccaagagaaggaaacagacttcatagaaaatagcagctgcaaagcctgtggcagcactgaagatggtaatacttgtgtagaagtaattgttaccaatgaaaatacatcatgtacctgtcctagcagtggcaatcttttggggtcccctaaaataaagaaaggcttatctccacactgtaatggtagaaccgacggggtaccgagca

SEQ ID NO: 300952 - DNA, 454 bp, Homo sapiens
tgccggtcactagaggacccccagtttcatcagtactgaaggcatttgtaatcatgatgaacacggtgatgactcttgtgttcatcactgtgaagacaaagaggatgatggtgatagttgtgttgaatgttgggcaaattctgaagagaacgacacaaaaggaaaaaataaaaagaagaaaaagaaaagcaagatactgaaatgtgatgaacatgtaagtgtcataacttgtaattcttaaacctttgctgttgaggacagaacacgtgttttccttggagtggcatatgtgcagcttagctgctaggatttactttttttagaatgagttctttttgcagttccattgggtgctcatcgtgtgagagtgtgggttgggggcagagagagatgtgatcatttgtgcaacagtccttgtgagtcagaaattcaattgttctttttatacttttaa

SEQ ID NO: 300953 - DNA, 3861 bp, Homo sapiens
  misc_feature (1756)..(1756): n is a, c, g, or t
  misc_feature (1814)..(1814): n is a, c, g, or t
gcgagcggctgactgcccgtagaggaaacgacattcggagctgcgctcccgcccaggccggccctgacgcgggcctcgtcagccagtaacagggagcagaggtgggagttagcgaggcgaccacgaaaacggtgaaggtcggaaccgacagcctcctccgagaagggcaggagctgggaggaggcggcagcggcggcggcagaaacagcagcggcggcggcggcggcagctgggaggaggtggtgacggtggcaacggcagcgtcggggacgatggcgcgactcgtggcagtgtgcagggacggggaggaggagttccccttcgagaggaggcagattcccctctacatagacgacaccctgacgatggtgatggaatttcctgataatgtgttaaatctcgatggacatcagaataatggtgcacagctaaagcagttcattcagcgacatggtatgcttaagcaacaggatctaagtattgccatggtggtgacatcacgcgaagtcctgagtgcactttctcagcttgtcccatgtgttggttgtcgtcgcagtgtggagcgtctcttttcccagcttgtagagtctggaaatcctgctcttgaacccctaacagtagggcccaagggagtcctgtctgtaactagaagctgcatgactgatgcaaagaagctttatacattattttatgtacatgggtccaaactaaatgacatgatagatgctattccaaaaagtaagaagaataagagatgtcagttgcactccttagatacgcacaagccaaaacctttgggaggttgttggatggatgtatgggaactaatgtcgcaggaatgcagggatgaagtagttttaattgactcgagttgtcttttagaaacactagaaacatatctgcgaaaacacaggttttgcactgattgcaaaaataaagtcctccgagcatacaatatccttattggtgaacttgactgcagcaaagaaaagggctactgtgctgcactttatgaaggcttgcggtgctgtccacatgaacgacacatacatgtttgctgtgaaacagacttcattgcacatcttttgggtcgtgctgagccagagttcgcaggagggtatgagtatgtaatttgctagaatgggctatctagcgctttgcttcattttattactgaaagtttattttcatcaccttctgcctcagtacatatgatatatgtataaattaaagtatgcctgtaaagattttgcttctctttaaagtatgcatttcttaattgactgaaaatagggaaaaactgttctctggtgtttggttcagtcctctgctagttcttgcttgaagggaggcaggcttttttggctttcattgttacagactatcattttcatttgaaaatgattagaagggatttttctccctctatccatgcattatcatgtgtaaattttattcacaataatggtttttgcataagtcagatctttgcagtaggggattaagaaatgccttattgaatgtaattcacgaactgtgtatattatattattattactacacagaaacctaaagtagtatctctggctttgttgtaaaaataaaatcagatgatgatgttaatagaataaatcaaatgcatttccttttgtatttagggtatcaaccctcatttgagtgcctactttctgctagaatacaaagggcttttttatcgccaaagttctgtgaacacttgtaaagactggcctggtgnaggactcttgcccatgatgaatcactttggcattgcctttctcaattcctcctcaaancaaaaaacctaaagaaggaaaaaatgttttgctataattggaaagtaaaaggaactgttgtgtctactatgagctggacacttctatgtgattgctttgtgccctaaaacccatctttttagagccagttcctgaattactttatttttagcaatacgaggactaaattctacttgcatgtgtatttctcattggttgtggacatgcatgcttgtatagcaacatatacgttgagtgtaaatgtataactgtcttgttactaggtaagcacattgtgtttaaaacctgaacttgcagctgtgttatccatcttttactgtttcagttaaaggtattagtgtgtgattattcccttttataggcgaagagaaaggcatgcaaagacaatagatatagctcaagaagaagttctgacctgcttgggaattcatctttatgaaagactgcatcgaatctggcagaagctacgggcagaagagcagacatggcagatgcttttctatcttggtgttgatgctttacgcaagagttttgagatgaccgtggaaaaagtacagggtattagcagattggaacaactttgtgaggaattttcagaagaggaacgagtaagagaactcaagcaagaaaagaaacgccaaaaacggaagaatagacgaaaaaataagtgtgtgtgtgatattcctactcccttacaaacagcagatgaaaaggaagtaagccaagagaaggaaacagacttcatagaaaatagcagctgcaaagcctgtggcagcactgaagatggtaatacttgtgtagaagtaattgttaccaatgaaaatacatcatgtacctgtcctagcagtggcaatcttttggggtcccctaaaataaagaaaggcttatctccacactgtaatggtagtgattgtggatattcatctagcatggaagggagtgaaacaggttctcgggagggttcggatgttgcctgcactgaaggcatttgtaatcatgatgaacacggtgatgactcttgtgttcatcactgtgaagacaaagaggatgatggtgatagttgtgttgaatgttgggcaaattctgaagagaacgacacaaaaggaaaaaataaaaagaagaaaaagaaaagcaagatactgaaatgtgatgaacatatccagaagcttggaagctgtattacagatccaggtaatcgagagacctcaggaaataccatgcacacagtgtttcaccgtgacaagaccaaagatacacatcctgaaagctgttgcagctctgaaaagggtgggcagccattgccttggtttgagcataggaaaaatgtaccacagtttgcagaacctacagaaacgttgtttggtcccgattccggaaaaggtgccaagagcttagttgaactccttgatgagtctgaatgtacttcagatgaggaaatctttatctcacaagatgaaatacagtcatttatggctaataaccagtctttctacagcaatagagaacaataccgacagcatctgaaggagaaatttaataaatactgccggttaaatgatcacaagaggcccatttgtagtggctggttgacaacggctggagcaaattaaataaataaaatagctctgtctttcaatgaaacactcacgatgactactgcgccttctctttcgaaaaactcttaatttagtgacttatggcaaaattttatcttaaatcaatgtgattctttcttgttttgggagacggtggaggtatcctcattagttctttcttcaggcttgtgtctttagttgcgtggctgcgcaggcctgccatatgatttaagccatctcttttcattaaatgtttctcttcctgtgagacttactaaagcaacttagtggcaaaaagtaatgttgtacttataattctgtacagaaatgacaatgagctgaatatatggttttacaaagtagacatccacttgcaaaatgtttggatgtaatgttaaagcgcaatgtgcaaaatttaaaataaagaatatttattaatacgcacagtaaaa

SEQ ID NO: 300954 - DNA, 2002 bp, Homo sapiens
ttattttggatgctgtagatgggagagagtgccatcatctagtacactgttatatgccacaagaaataattgcacagccatttcttaattttaaggtttttcttttcaacaggttttgcactgattgcaaaaataaagtcctccgagcatacaatatccttattggtgaacttgactgcagcaaagaaaagggctactgtgctgcactttatgaaggcttgcggtgctgtccacatgaacgacacatacatgtttgctgtgaaacagacttcattgcacatcttttgggtcgtgctgagccagagttcgcaggagggcgaagagaaaggcatgcaaagacaatagatatagctcaagaagaagttctgacctgcttgggaattcatctttatgaaagactgcatcgaatctggcagaagctacgggcagaagagcagacatggcagatgcttttctatcttggtgttgatgctttacgcaagagttttgagatgaccgtggaaaaagtacagggtattagcagattggaacaactttgtgaggaattttcagaagaggaacgagtaagagaactcaagcaagaaaagaaacgccaaaaacggaagaatagacgaaaaaataagtgtgtgtgtgatattcctactcccttacaaacagcagatgaaaaggaagtaagccaagagaaggaaacagacttcatagaaaatagcagctgcaaagcctgtggcagcactgaagatggtaatacttgtgtagaagtaattgttaccaatgaaaatacatcatgtacctgtcctagcagtggcaatcttttggggtcccctaaaataaagaaaggcttatctccacactgtaatggtagtgattgtggatattcatctagcatggaagggagtgaaacaggttctcgggagggttcggatgttgcctgcactgaaggcatttgtaatcatgatgaacacggtgatgactcttgtgttcatcactgtgaagacaaagaggatgatggtgatagttgtgttgaatgttgggcaaattctgaagagaacgacacaaaaggaaaaaataaaaagaagaaaaagaaaagcaagatactgaaatgtgatgaacatatccagaagcttggaagctgtattacagatccaggtaatcgagagacctcaggaaataccatgcacacagtgtttcaccgtgacaagaccaaagatacacatcctgaaagctgttgcagctctgaaaagggtgggcagccattgccttggtttgagcataggaaaaatgtaccacagtttgcagaacctacagaaacgttgtttggtcccgattccggaaaaggtgccaagagcttagttgaactccttgatgagtctgaatgtacttcagatgaggaaatctttatctcacaagatgaaatacagtcatttatggctaataaccagtctttctacagcaatagagaacaataccgacagcatctgaaggagaaatttaataaatactgccggttaaatgatcacaagaggcccatttgtagtggctggttgacaacggctggagcaaattaaataaataaaatagctctgtctttcaatgaaacactcacgatgactactgcgccttctctttcgaaaaactcttaatttagtgacttatggcaaaattttatcttaaatcaatgtgattctttcttgttttgggagacggtggaggtatcctcattagttctttcttcaggcttgtgtctttagttgcgtggctgcgcaggcctgccatatgatttaagccatctcttttcattaaatgtttctcttcctgtgagacttactaaagcaacttagtggcaaaaagtaatgttgtacttataattctgtacagaaatgacaatgagctgaatatatggttttacaaagtagacatccacttgcaaaatgtttggatgtaatgttaaagcgcaatgtgcaaaatttaaaataaagaatatttattaatacgcacagtaaaa

SEQ ID NO: 300955 - DNA, 2815 bp, Homo sapiens
  misc_feature (710)..(710): n is a, c, g, or t
  misc_feature (768)..(768): n is a, c, g, or t
aagtatagtgtgtgattataccctttataggcaagagaaggcatgcaaagacaatagatcatcagctcagaagaagttgtgacctgcttgggaattcatctttatgaaagactgcttcattttattactgaaagtttattttcatcaccttctgcctcagtacatatgatatatgtataaattaaagtatgcctgtaaagattttgcttctctttaaagtatgcatttcttaattgactgaaaatagggaaaaactgttctctggtgtttggttcagtcctctgctagttcttgcttgaagggaggcaggcttttttggctttcattgttacagactatcattttcatttgaaaatgattagaagggatttttctccctctatccatgcattatcatgtgtaaattttattcacaataatggtttttgcataagtcagatctttgcagtaggggattaagaaatgccttattgaatgtaattcacgaactgtgtatattatattattattactacacagaaacctaaagtagtatctctggctttgttgtaaaaataaaatcagatgatgatgttaatagaataaatcaaatgcatttccttttgtatttagggtatcaaccctcatttgagtgcctactttctgctagaatacaaagggcttttttatcgccaaagttctgtgaacacttgtaaagactggcctggtgnaggactcttgcccatgatgaatcactttggcattgcctttctcaattcctcctcaaancaaaaaacctaaagaaggaaaaaatgttttgctataattggaaagtaaaaggaactgttgtgtctactatgagctggacacttctatgtgattgctttgtgccctaaaacccatctttttagagccagttcctgaattactttatttttagcaatacgaggactaaattctacttgcatgtgtatttctcattggttgtggacatgcatgcttgtatagcaacatatacgttgagtgtaaatgtataactgtcttgttactaggtaagcacattgtgtttaaaacctgaacttgcagctgtgttatccatcttttactgtttcagttaaaggtattagtgtgtgattattcccttttataggcgaagagaaaggcatgcaaagacaatagatatagctcaagaagaagttctgacctgcttgggaattcatctttatgaaagactgcatcgaatctggcagaagctacgggcagaagagcagacatggcagatgcttttctatcttggtgttgatgctttacgcaagagttttgagatgaccgtggaaaaagtacagggtattagcagattggaacaactttgtgaggaattttcagaagaggaacgagtaagagaactcaagcaagaaaagaaacgccaaaaacggaagaatagacgaaaaaataagtgtgtgtgtgatattcctactcccttacaaacagcagatgaaaaggaagtaagccaagagaaggaaacagacttcatagaaaatagcagctgcaaagcctgtggcagcactgaagatggtaatacttgtgtagaagtaattgttaccaatgaaaatacatcatgtacctgtcctagcagtggcaatcttttggggtcccctaaaataaagaaaggcttatctccacactgtaatggtagtgattgtggatattcatctagcatggaagggagtgaaacaggttctcgggagggttcggatgttgcctgcactgaaggcatttgtaatcatgatgaacacggtgatgactcttgtgttcatcactgtgaagacaaagaggatgatggtgatagttgtgttgaatgttgggcaaattctgaagagaacgacacaaaaggaaaaaataaaaagaagaaaaagaaaagcaagatactgaaatgtgatgaacatatccagaagcttggaagctgtattacagatccaggtaatcgagagacctcaggaaataccatgcacacagtgtttcaccgtgacaagaccaaagatacacatcctgaaagctgttgcagctctgaaaagggtgggcagccattgccttggtttgagcataggaaaaatgtaccacagtttgcagaacctacagaaacgttgtttggtcccgattccggaaaaggtgccaagagcttagttgaactccttgatgagtctgaatgtacttcagatgaggaaatctttatctcacaagatgaaatacagtcatttatggctaataaccagtctttctacagcaatagagaacaataccgacagcatctgaaggagaaatttaataaatactgccggttaaatgatcacaagaggcccatttgtagtggctggttgacaacggctggagcaaattaaataaataaaatagctctgtctttcaatgaaacactcacgatgactactgcgccttctctttcgaaaaactcttaatttagtgacttatggcaaaattttatcttaaatcaatgtgattctttcttgttttgggagacggtggaggtatcctcattagttctttcttcaggcttgtgtctttagttgcgtggctgcgcaggcctgccatatgatttaagccatctcttttcattaaatgtttctcttcctgtgagacttactaaagcaacttagtggcaaaaagtaatgttgtacttataattctgtacagaaatgacaatgagctgaatatatggttttacaaagtagacatccacttgcaaaatgtttggatgtaatgttaaagcgcaatgtgcaaaatttaaaataaagaatatttattaatacgcacagtaaaa

SEQ ID NO: 300956 - DNA, 3276 bp, Homo sapiens
gcgagcggctgactgcccgtagaggaaacgacattcggagctgcgctcccgcccaggccggccctgacgcgggcctcgtcagccagtaacagggagcagaggtgggagttagcgaggcgaccacgaaaacggtgaaggtcggaaccgacagcctcctccgagaagggcaggagctgggaggaggcggcagcggcggcggcagaaacagcagcggcggcggcggcggcagctgggaggaggtggtgacggtggcaacggcagcgtcggggacgatggcgcgactcgtggcagtgtgcagggacggggaggaggagttccccttcgagaggaggcagattcccctctacatagacgacaccctgacgatggtgatggaatttcctgataatgtgttaaatctcgatggacatcagaataatggtgcacagctaaagcagttcattcagcgacatggtatgcttaagcaacaggatctaagtattgccatggtggtgacatcacgcgaagtcctgagtgcactttctcagcttgtcccatgtgttggttgtcgtcgcagtgtggagcgtctcttttcccagcttgtagagtctggaaatcctgctcttgaacccctaacagtagggcccaagggagtcctgtctgtaactagaagctgcatgactgatgcaaagaagctttatacattattttatgtacatgggtccaaactaaatgacatgatagatgctattccaaaaagtaagaagaataagagatgtcagttgcactccttagatacgcacaagccaaaacctttgggaggttgttggatggatgtatgggaactaatgtcgcaggaatgcagggatgaagtagttttaattgactcgagttgtcttttagaaacactagaaacatatctgcgaaaacacaggttttgcactgattgcaaaaataaagtcctccgagcatacaatatccttattggtgaacttgactgcagcaaagaaaagggctactgtgctgcactttatgaaggcttgcggtgctgtccacatgaacgacacatacatgtttgctgtgaaacagacttcattgcacatcttttgggtcgtgctgagccagagttcgcaggagggcgaagagaaaggcatgcaaagacaatagatatagctcaagaagaagttctgacctgcttgggaattcatctttatgaaagactgcatcgaatctggcagaagctacgggcagaagagcagacatggcagatgcttttctatcttggtgttgatgctttacgcaagagttttgagatgaccgtggaaaaagtacagggtattagcagattggaacaactttgtgaggaattttcagaagaggaacgagtaagagaactcaagcaagaaaagaaacgccaaaaacggaagaatagacgaaaaaataagtgtgtgtgtgatattcctactcccttacaaacagcagatgaaaaggaagtaagccaagagaaggaaacagacttcatagaaaatagcagctgcaaagcctgtggcagcactgaagatggtaatacttgtgtagaagtaattgttaccaatgaaaatacatcatgtacctgtcctagcagtggcaatcttttggggtcccctaaaataaagaaaggtaagtaaataatttctttttaaaatgaactcttaactctattctttcttactgttaaatgtaagagcttttagagattctgtgagctagaattttaaaactgctttatagttccaagaatatcatataatttagtcagatacttaatatttcctttttctttatgttctttgacttatttttgacaaaaacgaaaaatggtaaattcctaatcatattttcattatttaatttactttctacttaaaaaaaaaatccttcattggaaatgttctacttttaataagccattaattatgagatttttctgtggtccccaaagagttcactctttgtcctaatatacttattggtatgttaatagtaactctcacttgatttattctcaggcttatctccacactgtaatggtagtgattgtggatattcatctagcatggaagggagtgaaacaggttctcgggagggttcggatgttgcctgcactgaaggcatttgtaatcatgatgaacacggtaggctcacattaagtttcccagttatttctactacatggctgacttaagaacataaataagaaggattattgatttctgcaggtgatgactcttgtgttcatcactgtgaagacaaagaggatgatggtgatagttgtgttgaatgttgggcaaattctgaagagaacgacacaaaaggaaaaaataaaaagaagaaaaagaaaagcaagatactgaaatgtgatgaacatatccagaagcttggaagctgtattacagatccaggtaatcgagagacctcaggaaataccatgcacacagtgtttcaccgtgacaagaccaaagatacacatcctgaaagctgttgcagctctgaaaagggtgggcagccattgccttggtttgagcataggaaaaatgtaccacagtttgcagaacctacagaaacgttgtttggtcccgattccggaaaaggtgccaagagcttagttgaactccttgatgagtctgaatgtacttcagatgaggaaatctttatctcacaagatgaaatacagtcatttatggctaataaccagtctttctacagcaatagagaacaataccgacagcatctgaaggagaaatttaataaatactgccggttaaatgatcacaagaggcccatttgtagtggctggttgacaacggctggagcaaattaaataaataaaatagctctgtctttcaatgaaacactcacgatgactactgcgccttctctttcgaaaaactcttaatttagtgacttatggcaaaattttatcttaaatcaatgtgattctttcttgttttgggagacggtggaggtatcctcattagttctttcttcaggcttgtgtctttagttgcgtggctgcgcaggcctgccatatgatttaagccatctcttttcattaaatgtttctcttcctgtgagacttactaaagcaacttagtggcaaaaagtaatgttgtacttataattctgtacagaaatgacaatgagctgaatatatggttttacaaagtagacatccacttgcaaaatgtttggatgtaatgttaaagcgcaatgtgcaaaatttaaaataaagaatatttattaatacgcacagtaaaa

SEQ ID NO: 300957 - DNA, 3351 bp, Homo sapiens
gcgagcggctgactgcccgtagaggaaacgacattcggagctgcgctcccgcccaggccggccctgacgcgggcctcgtcagccagtaacagggagcagaggtgggagttagcgaggcgaccacgaaaacggtgaaggtcggaaccgacagcctcctccgagaagggcaggagctgggaggaggcggcagcggcggcggcagaaacagcagcggcggcggcggcggcagctgggaggaggtggtgacggtggcaacggcagcgtcggggacgatggcgcgactcgtggcagtgtgcagggacggggaggaggagttccccttcgagaggaggcagattcccctctacatagacgacaccctgacgatggtgatggaatttcctgataatgtgttaaatctcgatggacatcagaataatggtgcacagctaaagcagttcattcagcgacatggtatgcttaagcaacaggatctaagtattgccatggtggtgacatcacgcgaagtcctgagtgcactttctcagcttgtcccatgtgttggttgtcgtcgcagtgtggagcgtctcttttcccagcttgtagagtctggaaatcctgctcttgaacccctaacagtagggcccaagggagtcctgtctgtaactagaagctgcatgactgatgcaaagaagctttatacattattttatgtacatgggtccaaactaaatgacatgatagatgctattccaaaaagtaagaagaataagagatgtcagttgcactccttagatacgcacaagccaaaacctttgggaggttgttggatggatgtatgggaactaatgtcgcaggaatgcagggatgaagtagttttaattgactcgagttgtcttttagaaacactagaaacatatctgcgaaaacacaggttttgcactgattgcaaaaataaagtcctccgagcatacaatatccttattggtgaacttgactgcagcaaagaaaagggctactgtgctgcactttatgaaggcttgcggtgctgtccacatgaacgacacatacatgtttgctgtgaaacagacttcattgcacatcttttgggtcgtgctgagccagagttcgcaggagggcgaagagaaaggcatgcaaagacaatagatatagctcaagaagaagttctgacctgcttgggaattcatctttatgaaagactgcatcgaatctggcagaagctacgggcagaagagcagacatggcagatgcttttctatcttggtgttgatgctttacgcaagagttttgagatgaccgtggaaaaagtacagggtattagcagattggaacaactttgtgaggaattttcagaagaggaacgagtaagagaactcaagcaagaaaagaaacgccaaaaacggaagaatagacgaaaaaataagtgtgtgtgtgatattcctactcccttacaaacagcagatgaaaaggaagtaagccaagagaaggaaacagacttcatagaaaatagcagctgcaaagcctgtggcagcactgaagatggtaatacttgtgtagaagtaattgttaccaatgaaaatacatcatgtacctgtcctagcagtggcaatcttttggggtcccctaaaataaagaaaggcttatctccacactgtaatggtagtgattgtggatattcatctagcatggaagggagtgaaacaggttctcgggagggttcggatgttgcctgcactgaaggcatttgtaatcatgatgaacacggtgatgactcttgtgttcatcactgtgaagacaaagaggatgatggtgatagttgtgttgaatgttgggcaaattctgaagagaacgacacaaaaggaaaaaataaaaagaagaaaaagaaaagcaagatactgaaatgtgatgaacatatccagaagcttggaagctgtattacagatccaggtaatcgagagacctcaggaaataccatgcacacagtgtttcaccgtgacaagaccaaagatacacatcctgaaagctgttgcagctctgaaaagggtgggcagccattgccttggtttgagcataggaaaaatgtaccacagtttgcagaacctacagaaacgttgtttggtcccgattccggaaaaggtgccaagagcttagttgaactccttgatgagtctgaatgtacttcagatgaggaaatctttatctcacaagatgaaatacagtcatttatggctaataaccagtctttctacagcaatagagaacaataccgacagcatctgaaggagaaatttaataaatactgccggttaaatgatcacaagaggcccatttgtagtggctggttgacaacggctggagcaaattaaataaataaaatagctctgtctttcaatgaaacactcacgatgactactgcgccttctctttcgaaaaactcttaatttagtgacttatggcaaaattttatcttaaatcaatgtgattctttcttgttttgggagacggtggaggtatcctcattagttctttcttcaggcttgtgtctttagttgcgtggctgcgcaggcctgccatatgatttaagccatctcttttcattaaatgtttctcttcctgtgagacttactaaagcaacttagtggcaaaaagtaatgttgtacttataattctgtacagaaatgacaatgagctgaatatatggttttacaaagtagacatccacttgcaaaatgtttggatgtaatgttaaagcgcaatgtgcaaaatttaaaataaagaatatttattaatacgcacagtaaaaaaaaaaaaaaaaaaaaaaaaaaaaaaaaaaaaaaaaaaaaaaaaaaaaaaaaaaaaaaaaaaaaaaaaaaaaaaaaaaaaaaaaagaaaagaaaagaaaaagtaaaaagaaaacaaagaacaaaaaaaaaagaaggggggggagcctgactataattacttcacctccgcgcggtgagccagtcattctgtgctccctccttttttgtttagaccgtgacggctccttcatcttagtttgtacgttaataaatagagtcgacgcccgctgccgcacgacccttactaataaaaacagtcacgagcctcactctcaaacatctagttgcgttctcgttcctctatcagaccacccccccctactctgttgtggctagtgagatgtatgcacccccaccccaccacagtatatttatgcttctgtgtgaacaatacatcatcctgctcttattgctctaccaaacccctcactttttctgctcactcaaagcatactccctcagccttttatatgatccattcacacgccccgctttctaaccaatggag

SEQ ID NO: 300958 - DNA, 2888 bp, Homo sapiens
gcgagcggctgactgcccgtagaggaaacgacattcggagctgcgctcccgcccaggccggccctgacgcgggcctcgtcagccagtaacagggagcagaggtgggagttagcgaggcgaccacgaaaacggtgaaggtcggaaccgacagcctcctccgagaagggcaggagctgggaggaggcggcagcggcggcggcagaaacagcagcggcggcggcggcggcagctgggaggaggtggtgacggtggcaacggcagcgtcggggacgatggcgcgactcgtggcagtgtgcagggacggggaggaggagttccccttcgagaggaggcagattcccctctacatagacgacaccctgacgatggtgatggaatttcctgataatgtgttaaatctcgatggacatcagaataatggtgcacagctaaagcagttcattcagcgacatggtatgcttaagcaacaggatctaagtattgccatggtggtgacatcacgcgaagtcctgagtgcactttctcagcttgtcccatgtgttggttgtcgtcgcagtgtggagcgtctcttttcccagcttgtagagtctggaaatcctgctcttgaacccctaacagtagggcccaagggagtcctgtctgtaactagaagctgcatgactgatgcaaagaagctttatacattattttatgtacatgggtccaaactaaatgacatgatagatgctattccaaaaagtaagaagaataagagatgtcagttgcactccttagatacgcacaagccaaaacctttgggaggttgttggatggatgtatgggaactaatgtcgcaggaatgcagggatgaagtagttttaattgactcgagttgtcttttagaaacactagaaacatatctgcgaaaacacaggttttgcactgattgcaaaaataaagtcctccgagcatacaatatccttattggtgaacttgactgcagcaaagaaaagggctactgtgctgcactttatgaaggcttgcggtgctgtccacatgaacgacacatacatgtttgctgtgaaacagacttcattgcacatcttttgggtcgtgctgagccagagttcgcaggagggcgaagagaaaggcatgcaaagacaatagatatagctcaagaagaagttctgacctgcttgggaattcatctttatgaaagactgcatcgaatctggcagaagctacgggcagaagagcagacatggcagatgcttttctatcttggtgttgatgctttacgcaagagttttgagatgaccgtggaaaaagtacagggtattagcagattggaacaactttgtgaggaattttcagaagaggaacgagtaagagaactcaagcaagaaaagaaacgccaaaaacggaagaatagacgaaaaaataagtgtgtgtgtgatattcctactcccttacaaacagcagatgaaaaggaagtaagccaagagaagcttcctcagagacattcataagtgaaatatctttttgtgagagcgcttgacagttgaagaatacagtgattcttagcacactttggaaacagacttcatagaaaatagcagctgcaaagcctgtggcagcactgaagatggtaatacttgtgtagaagtaattgttaccaatgaaaatacatcatgtacctgtcctagcagtggcaatcttttggggtcccctaaaataaagaaaggcttatctccacactgtaatggtagtgattgtggatattcatctagcatggaagggagtgaaacaggttctcgggagggttcggatgttgcctgcactgaaggcatttgtaatcatgatgaacacggtgatgactcttgtgttcatcactgtgaagacaaagaggatgatggtgatagttgtgttgaatgttgggcaaattctgaagagaacgacacaaaaggaaaaaataaaaagaagaaaaagaaaagcaagatactgaaatgtgatgaacatatccagaagcttggaagctgtattacagatccaggtaatcgagagacctcaggaaataccatgcacacagtgtttcaccgtgacaagaccaaagatacacatcctgaaagctgttgcagctctgaaaagggtgggcagccattgccttggtttgagcataggaaaaatgtaccacagtttgcagaacctacagaaacgttgtttggtcccgattccggaaaaggtgccaagagcttagttgaactccttgatgagtctgaatgtacttcagatgaggaaatctttatctcacaagatgaaatacagtcatttatggctaataaccagtctttctacagcaatagagaacaataccgacagcatctgaaggagaaatttaataaatactgccggttaaatgatcacaagaggcccatttgtagtggctggttgacaacggctggagcaaattaaataaataaaatagctctgtctttcaatgaaacactcacgatgactactgcgccttctctttcgaaaaactcttaatttagtgacttatggcaaaattttatcttaaatcaatgtgattctttcttgttttgggagacggtggaggtatcctcattagttctttcttcaggcttgtgtctttagttgcgtggctgcgcaggcctgccatatgatttaagccatctcttttcattaaatgtttctcttcctgtgagacttactaaagcaacttagtggcaaaaagtaatgttgtacttataattctgtacagaaatgacaatgagctgaatatatggttttacaaagtagacatccacttgcaaaatgtttggatgtaatgttaaagcgcaatgtgcaaaatttaaaataaagaatatttattaatacgcacagtaaaa

SEQ ID NO: 300959 - DNA, 1429 bp, Homo sapiens
tactcgatatcctcttctgaaaattcctcacaaagttgttccaatctgctaataccctgtactttttccacggtcatctcaaaactcttgcgtaaacatcaataccaagataggaaacagacttcatagaaaatagcagctgcaaagcctgtggcagcactgaagatggtaatacttgtgtagaagtaattgttaccaatgaaaatacatcatgtacctgtcctagcagtggcaatcttttggggtcccctaaaataaagaaaggcttatctccacactgtaatggtagtgattgtggatattcatctagcatggaagggagtgaaacaggttctcgggagggttcggatgttgcctgcactgaaggcatttgtaatcatgatgaacacggtgatgactcttgtgttcatcactgtgaagacaaagaggatgatggtgatagttgtgttgaatgttgggcaaattctgaagagaacgacacaaaaggaaaaaataaaaagaagaaaaagaaaagcaagatactgaaatgtgatgaacatatccagaagcttggaagctgtattacagatccaggtaatcgagagacctcaggaaataccatgcacacagtgtttcaccgtgacaagaccaaagatacacatcctgaaagctgttgcagctctgaaaagggtgggcagccattgccttggtttgagcataggaaaaatgtaccacagtttgcagaacctacagaaacgttgtttggtcccgattccggaaaaggtgccaagagcttagttgaactccttgatgagtctgaatgtacttcagatgaggaaatctttatctcacaagatgaaatacagtcatttatggctaataaccagtctttctacagcaatagagaacaataccgacagcatctgaaggagaaatttaataaatactgccggttaaatgatcacaagaggcccatttgtagtggctggttgacaacggctggagcaaattaaataaataaaatagctctgtctttcaatgaaacactcacgatgactactgcgccttctctttcgaaaaactcttaatttagtgacttatggcaaaattttatcttaaatcaatgtgattctttcttgttttgggagacggtggaggtatcctcattagttctttcttcaggcttgtgtctttagttgcgtggctgcgcaggcctgccatatgatttaagccatctcttttcattaaatgtttctcttcctgtgagacttactaaagcaacttagtggcaaaaagtaatgttgtacttataattctgtacagaaatgacaatgagctgaatatatggttttacaaagtagacatccacttgcaaaatgtttggatgtaatgttaaagcgcaatgtgcaaaatttaaaataaagaatatttattaatacgcacagtaaaa

SEQ ID NO: 300960 - DNA, 2868 bp, Homo sapiens
gcgagcggctgactgcccgtagaggaaacgacattcggagctgcgctcccgcccaggccggccctgacgcgggcctcgtcagccagtaacagggagcagaggtgggagttagcgaggcgaccacgaaaacggtgaaggtcggaaccgacagcctcctccgagaagggcaggagctgggaggaggcggcagcggcggcggcagaaacagcagcggcggcggcggcggcagctgggaggaggtggtgacggtggcaacggcagcgtcggggacgatggcgcgactcgtggcagtgtgcagggacggggaggaggagttccccttcgagaggaggcagattcccctctacatagacgacaccctgacgatggtgatggaatttcctgataatgtgttaaatctcgatggacatcagaataatggtgcacagctaaagcagttcattcagcgacatggtatgcttaagcaacaggatctaagtattgccatggtggtgacatcacgcgaagtcctgagtgcactttctcagcttgtcccatgtgttggttgtcgtcgcagtgtggagcgtctcttttcccagcttgtagagtctggaaatcctgctcttgaacccctaacagtagggcccaagggagtcctgtctgtaactagaagctgcatgactgatgcaaagaagctttatacattattttatgtacatgggtccaaactaaatgacatgatagatgctattccaaaaagtaagaagaataagagatgtcagttgcactccttagatacgcacaagccaaaacctttgggaggttgttggatggatgtatgggaactaatgtcgcaggaatgcagggatgaagtagttttaattgactcgagttgtcttttagaaacactagaaacatatctgcgaaaacacaggttttgcactgattgcaaaaataaagtcctccgagcatacaatatccttattggtgaacttgactgcagcaaagaaaagggctactgtgctgcactttatgaaggcttgcggtgctgtccacatgaacgacacatacatgtttgctgtgaaacagacttcattgcacatcttttgggtcgtgctgagccagagttcgcaggagggcgaagagaaaggcatgcaaagacaatagatatagctcaagaagaagttctgacctgcttgggaattcatctttatgaaagactgcatcgaatctggcagaagctacgggcagaagagcagacatggcagatgcttttctatcttggtgttgatgctttacgcaagagttttgagatgaccgtggaaaaagtacagggtattagcagattggaacaactttgtgaggaattttcagaagaggaacgagtaagagaactcaagcaagaaaagaaacgccaaaaacggaagaatagacgaaaaaataagtgtgtgtgtgatattcctactcccttacaaacagcagatgaaaaggaagtaagccaagagaaggaaacagacttcatagaaaatagcagctgcaaagcctgtggcagcactgaagatggtaatacttgtgtagaagtaattgttaccaatgaaaatacatcatgtacctgtcctagcagtggcaatcttttggggtcccctaaaataaagaaaggtaagtaaataatttctttttaaaatgaactcttaactctattctttcttactgttaaatgtaagagcttttagagattctgtgagctagaattttaaaactgctttatagttccaagaatatcatataatttagtcagatacttaatatttcctttttctttatgttctttgacttatttttgacaaaaacgaaaaatggtaaattcctaatcatattttcattatttaatttactttctacttaaaaaaaaaatccttcattggaaatgttctacttttaataagccattaattatgagatttttctgtggtccccaaagagttcactctttgtcctaatatacttattggtatgttaatagtaactctcacttgatttattctcaggcttatctccacactgtaatggtagtgattgtggatattcatctagcatggaagggagtgaaacaggttctcgggagggttcggatgttgcctgcactgaaggcatttgtaatcatgatgaacacggtaggctcacattaagtttcccagttatttctactacatggctgacttaagaacataaataagaaggattattgatttctgcaggtgatgactcttgtgttcatcactgtgaagacaaagaggatgatggtgatagttgtgttgaatgttgggcaaattctgaagagaacgacacaaaaggaaaaaataaaaagaagaaaaagaaaagcaagatactgaaatgtgatgaacatatccagaagcttggaagctgtattacagatccaggtaatcgagagacctcaggaaataccatgcacacagtgtttcaccgtgacaagaccaaagatacacatcctgaaagctgttgcagctctgaaaagggtgggcagccattgccttggtttgagcataggaaaaatgtaccacagtttgcagaacctacagaaacgttgtttggtcccgattccggaaaaggtgccaagagcttagttgaactccttgatgagtctgaatgtacttcagatgaggaaatctttatctcacaagatgaaatacagtcatttatggctaataaccagtctttctacagcaatagagaacaataccgacagcatctgaaggagaaatttaataaatactgccggttaaatgatcacaagaggcccatttgtagtggctggttgacaacggctggagcaaattaaataaataaaatagctctgtctttcaatga

SEQ ID NO: 300961 - DNA, 2850 bp, Homo sapiens
gcgagcggctgactgcccgtagaggaaacgacattcggagctgcgctcccgcccaggccggccctgacgcgggcctcgtcagccagtaacagggagcagaggtgggagttagcgaggcgaccacgaaaacggtgaaggtcggaaccgacagcctcctccgagaagggcaggagctgggaggaggcggcagcggcggcggcagaaacagcagcggcggcggcggcggcagctgggaggaggtggtgacggtggcaacggcagcgtcggggacgatggcgcgactcgtggcagtgtgcagggacggggaggaggagttccccttcgagaggaggcagattcccctctacatagacgacaccctgacgatggtgatggaatttcctgataatgtgttaaatctcgatggacatcagaataatggtgcacagctaaagcagttcattcagcgacatggtatgcttaagcaacaggatctaagtattgccatggtggtgacatcacgcgaagtcctgagtgcactttctcagcttgtcccatgtgttggttgtcgtcgcagtgtggagcgtctcttttcccagcttgtagagtctggaaatcctgctcttgaacccctaacagtagggcccaagggagtcctgtctgtaactagaagctgcatgactgatgcaaagaagctttatacattattttatgtacatgggtccaaactaaatgacatgatagatgctattccaaaaagtaagaagaataagagatgtcagttgcactccttagatacgcacaagccaaaacctttgggaggttgttggatggatgtatgggaactaatgtcgcaggaatgcagggatgaagtagttttaattgactcgagttgtcttttagaaacactagaaacatatctgcgaaaacacaggttttgcactgattgcaaaaataaagtcctccgagcatacaatatccttattggtgaacttgactgcagcaaagaaaagggctactgtgctgcactttatgaaggcttgcggtgctgtccacatgaacgacacatacatgtttgctgtgaaacagacttcattgcacatcttttgggtcgtgctgagccagagttcgcaggagggcgaagagaaaggcatgcaaagacaatagatatagctcaagaagaagttctgacctgcttgggaattcatctttatgaaagactgcatcgaatctggcagaagctacgggcagaagagcagacatggcagatgcttttctatcttggtgttgatgctttacgcaagagttttgagatgaccgtggaaaaagtacagggtattagcagattggaacaactttgtgaggaattttcagaagaggaacgagtaagagaactcaagcaagaaaagaaacgccaaaaacggaagaatagacgaaaaaataagtgtgtgtgtgatattcctactcccttacaaacagcagatgaaaaggaagtaagccaagagaaggaaacagacttcatagaaaatagcagctgcaaagcctgtggcagcactgaagatggtaatacttgtgtagaagtaattgttaccaatgaaaatacatcatgtacctgtcctagcagtggcaatcttttggggtcccctaaaataaagaaaggtaagtaaataatttctttttaaaatgaactcttaactctattctttcttactgttaaatgtaagagcttttagagattctgtgagctagaattttaaaactgctttatagttccaagaatatcatataatttagtcagatacttaatatttcctttttctttatgttctttgacttatttttgacaaaaacgaaaaatggtaaattcctaatcatattttcattatttaatttactttctacttaaaaaaaaaatccttcattggaaatgttctacttttaataagccattaattatgagatttttctgtggtccccaaagagttcactctttgtcctaatatacttattggtatgttaatagtaactctcacttgatttattctcaggcttatctccacactgtaatggtagtgattgtggatattcatctagcatggaagggagtgaaacaggttctcgggagggttcggatgttgcctgcactgaaggcatttgtaatcatgatgaacacggtaggctcacattaagtttcccagttatttctactacatggctgacttaagaacataaataagaaggattattgatttctgcaggtgatgactcttgtgttcatcactgtgaagacaaagaggatgatggtgatagttgtgttgaatgttgggcaaattctgaagagaacgacacaaaaggaaaaaataaaaagaagaaaaagaaaagcaagatactgaaatgtgatgaacatatccagaagcttggaagctgtattacagatccaggtaatcgagagacctcaggaaataccatgcacacagtgtttcaccgtgacaagaccaaagatacacatcctgaaagctgttgcagctctgaaaagggtgggcagccattgccttggtttgagcataggaaaaatgtaccacagtttgcagaacctacagaaacgttgtttggtcccgattccggaaaaggtgccaagagcttagttgaactccttgatgagtctgaatgtacttcagatgaggaaatctttatctcacaagatgaaatacagtcatttatggctaataaccagtctttctacagcaatagagaacaataccgacagcatctgaaggagaaatttaataaatactgccggttaaatgatcacaaaagttcatatgtgtggaacctggttgggtgcatcgataacaccggtaccgagctcca

SEQ ID NO: 300962 - DNA, 2327 bp, Homo sapiens
gcgagcggctgactgcccgtagaggaaacgacattcggagctgcgctcccgcccaggccggccctgacgcgggcctcgtcagccagtaacagggagcagaggtgggagttagcgaggcgaccacgaaaacggtgaaggtcggaaccgacagcctcctccgagaagggcaggagctgggaggaggcggcagcggcggcggcagaaacagcagcggcggcggcggcggcagctgggaggaggtggtgacggtggcaacggcagcgtcggggacgatggcgcgactcgtggcagtgtgcagggacggggaggaggagttccccttcgagaggaggcagattcccctctacatagacgacaccctgacgatggtgatggaatttcctgataatgtgttaaatctcgatggacatcagaataatggtgcacagctaaagcagttcattcagcgacatggtatgcttaagcaacaggatctaagtattgccatggtggtgacatcacgcgaagtcctgagtgcactttctcagcttgtcccatgtgttggttgtcgtcgcagtgtggagcgtctcttttcccagcttgtagagtctggaaatcctgctcttgaacccctaacagtagggcccaagggagtcctgtctgtaactagaagctgcatgactgatgcaaagaagctttatacattattttatgtacatgggtccaaactaaatgacatgatagatgctattccaaaaagtaagaagaataagagatgtcagttgcactccttagatacgcacaagccaaaacctttgggaggttgttggatggatgtatgggaactaatgtcgcaggaatgcagggatgaagtagttttaattgactcgagttgtcttttagaaacactagaaacatatctgcgaaaacacaggttttgcactgattgcaaaaataaagtcctccgagcatacaatatccttattggtgaacttgactgcagcaaagaaaagggctactgtgctgcactttatgaaggcttgcggtgctgtccacatgaacgacacatacatgtttgctgtgaaacagacttcattgcacatcttttgggtcgtgctgagccagagttcgcaggagggcgaagagaaaggcatgcaaagacaatagatatagctcaagaagaagttctgacctgcttgggaattcatctttatgaaagactgcatcgaatctggcagaagctacgggcagaagagcagacatggcagatgcttttctatcttggtgttgatgctttacgcaagagttttgagatgaccgtggaaaaagtacagggtattagcagattggaacaactttgtgaggaattttcagaagaggaacgagtaagagaactcaagcaagaaaagaaacgccaaaaacggaagaatagacgaaaaaataagtgtgtgtgtgatattcctactcccttacaaacagcagatgaaaaggaagtaagccaagagaaggaaacagacttcatagaaaatagcagctgcaaagcctgtggcagcactgaagatggtaatacttgtgtagaagtaattgttaccaatgaaaatacatcatgtacctgtcctagcagtggcaatcttttggggtcccctaaaataaagaaaggcttatctccacactgtaatggtagtgattgtggatattcatctagcatggaagggagtgaaacaggttctcgggagggttcggatgttgcctgcactgaaggcatttgtaatcatgatgaacacggtgatgactcttgtgttcatcactgtgaagacaaagaggatgatggtgatagttgtgttgaatgttgggcaaattctgaagagaacgacacaaaaggaaaaaataaaaagaagaaaaagaaaagcaagatactgaaatgtgatgaacatatccagaagcttggaagctgtattacagatccaggtaatcgagagacctcaggaaataccatgcacacagtgtttcaccgtgacaagaccaaagatacacatcctgaaagctgttgcagctctgaaaagggtgggcagccattgccttggtttgagcataggaaaaatgtaccacagtttgcagaacctacagaaacgttgtttggtcccgattccggaaaaggtgccaagagcttagttgaactccttgatgagtctgaatgtacttcagatgaggaaatctttatctcacaagatgaaatacagtcatttatggctaataaccagtctttctacagcaatagagaacaataccgacagcatctgaaggagaaatttaacgcgtcaaatcgggatccctaagtcgactgcagc

SEQ ID NO: 300963 - DNA, 951 bp, Homo sapiens
aaagaataattgctattatatcatgcctttttacctgtgaaatcctttgctgtggtatcagatccagaagcttggaagctgtattacagatccaggtaatcgagagacctcaggaaataccatgcacacagtgtttcaccgtgacaagaccaaagatacacatcctgaaagctgttgcagctctgaaaagggtgggcagccattgccttggtttgagcataggaaaaatgtaccacagtttgcagaacctacagaaacgttgtttggtcccgattccggaaaaggtgccaagagcttagttgaactccttgatgagtctgaatgtacttcagatgaggaaatctttatctcacaagatgaaatacagtcatttatggctaataaccagtctttctacagcaatagagaacaataccgacagcatctgaaggagaaatttaataaatactgccggttaaatgatcacaagaggcccatttgtagtggctggttgacaacggctggagcaaattaaataaataaaatagctctgtctttcaatgaaacactcacgatgactactgcgccttctctttcgaaaaactcttaatttagtgacttatggcaaaattttatcttaaatcaatgtgattctttcttgttttgggagacggtggaggtatcctcattagttctttcttcaggcttgtgtctttagttgcgtggctgcgcaggcctgccatatgatttaagccatctcttttcattaaatgtttctcttcctgtgagacttactaaagcaacttagtggcaaaaagtaatgttgtacttataattctgtacagaaatgacaatgagctgaatatatggttttacaaagtagacatccacttgcaaaatgtttggatgtaatgttaaagcgcaatgtgcaaaatttaaaataaagaatatttattaatacgcacagtaaaa

SEQ ID NO: 300964 - DNA, 2985 bp, Homo sapiens
gcgagcggctgactgcccgtagaggaaacgacattcggagctgcgctcccgcccaggccggccctgacgcgggcctcgtcagccagtaacagggagcagaggtgggagttagcgaggcgaccacgaaaacggtgaaggtcggaaccgacagcctcctccgagaagggcaggagctgggaggaggcggcagcggcggcggcagaaacagcagcggcggcggcggcggcagctgggaggaggtggtgacggtggcaacggcagcgtcggggacgatggcgcgactcgtggcagtgtgcagggacggggaggaggagttccccttcgagaggaggcagattcccctctacatagacgacaccctgacgatggtgatggaatttcctgataatgtgttaaatctcgatggacatcagaataatggtgcacagctaaagcagttcattcagcgacatggtatgcttaagcaacaggatctaagtattgccatggtggtgacatcacgcgaagtcctgagtgcactttctcagcttgtcccatgtgttggttgtcgtcgcagtgtggagcgtctcttttcccagcttgtagagtctggaaatcctgctcttgaacccctaacagtagggcccaagggagtcctgtctgtaactagaagctgcatgactgatgcaaagaagctttatacattattttatgtacatgggtccaaactaaatgacatgatagatgctattccaaaaagtaagaagaataagagatgtcagttgcactccttagatacgcacaagccaaaacctttgggaggttgttggatggatgtatgggaactaatgtcgcaggaatgcagggatgaagtagttttaattgactcgagttgtcttttagaaacactagaaacatatctgcgaaaacacaggttttgcactgattgcaaaaataaagtcctccgagcatacaatatccttattggtgaacttgactgcagcaaagaaaagggctactgtgctgcactttatgaaggcttgcggtgctgtccacatgaacgacacatacatgtttgctgtgaaacagacttcattgcacatcttttgggtcgtgctgagccagagttcgcaggagggcgaagagaaaggcatgcaaagacaatagatatagctcaagaagaagttctgacctgcttgggaattcatctttatgaaagactgcatcgaatctggcagaagctacgggcagaagagcagacatggcagatgcttttctatcttggtgttgatgctttacgcaagagttttgagatgaccgtggaaaaagtacagggtattagcagattggaacaactttgtgaggaattttcagaagaggaacgagtaagagaactcaagcaagaaaagaaacgccaaaaacggaagaatagacgaaaaaataagtgtgtgtgtgatattcctactcccttacaaacagcagatgaaaaggaagtaagccaagagaaggaaacagacttcatagaaaatagcagctgcaaagcctgtggcagcactgaagatggtaatacttgtgtagaagtaattgttaccaatgaaaatacatcatgtacctgtcctagcagtggcaatcttttggggtcccctaaaataaagaaaggtaagtaaataatttctttttaaaatgaactcttaactctattctttcttactgttaaatgtaagagcttttagagattctgtgagctagaattttaaaactgctttatagttccaagaatatcatataatttagtcagatacttaatatttcctttttctttatgttctttgacttatttttgacaaaaacgaaaaatggtaaattcctaatcatattttcattatttaatttactttctacttaaaaaaaaaatccttcattggaaatgttctacttttaataagccattaattatgagatttttctgtggtccccaaagagttcactctttgtcctaatatacttattggtatgttaatagtaactctcacttgatttattctcaggcttatctccacactgtaatggtagtgattgtggatattcatctagcatggaagggagtgaaacaggttctcgggagggttcggatgttgcctgcactgaaggcatttgtaatcatgatgaacacggtaggctcacattaagtttcccagttatttctactacatggctgacttaagaacataaataagaaggattattgatttctgcaggtgatgactcttgtgttcatcactgtgaagacaaagaggatgatggtgatagttgtgttgaatgttgggcaaattctgaagagaacgacacaaaaggaaaaaataaaaagaagaaaaagaaaagcaagatactgaaatgtgatgaacatatccagaagcttggaagctgtattacagatccaggtaatcgagagacctcaggaaataccatgcacacagtgtttcaccgtgacaagaccaaagatacacatcctgaaagctgttgcagctctgaaaagggtgggcagccattgccttggtttgagcataggaaaaatgtaccacagtttgcagaacctacagaaacgttgtttggtcccgattccggaaaaggtgccaagagcttagttgaactccttgtaagtattccatgtggtcttactgtacataactgtttgggaacggggtggatgtgggaggggatagtatttgagggcttaaggtaggtagttgaaggaagcttatgagaaattaagggtagtatttcattattgtttggggacttcatttctgtccttccactcgtggtttatgcaactactctggaacacgtttccatggccgcctctgtctcagtagaagacattataggtattccttgagttacagtggggttacattccaataaacccattataactcaaaaatactgcgagttgaaaatacattcaacatcccaataaaccctttgtaaagttaaaaaaaaaaa

SEQ ID NO: 300965 - DNA, 1369 bp, Homo sapiens
gcgagcggctgactgcccgtagaggaaacgacattcggagctgcgctcccgcccaggccggccctgacgcgggcctcgtcagccagtaacagggagcagaggtgggagttagcgaggcgaccacgaaaacggtgaaggtcggaaccgacagcctcctccgagaagggcaggagctgggaggaggcggcagcggcggcggcagaaacagcagcggcggcggcggcggcagctgggaggaggtggtgacggtggcaacggcagcgtcggggacgatggcgcgactcgtggcagtgtgcagggacggggaggaggagttccccttcgagaggaggcagattcccctctacatagacgacaccctgacgatggtgatggaatttcctgataatgtgttaaatctcgatggacatcagaataatggtgcacagctaaagcagttcattcagcgacatggtatgcttaagcaacaggatctaagtattgccatggtggtgacatcacgcgaagtcctgagtgcactttctcagcttgtcccatgtgttggttgtcgtcgcagtgtggagcgtctcttttcccagcttgtagagtctggaaatcctgctcttgaacccctaacagtagggcccaagggagtcctgtctgtaactagaagctgcatgactgatgcaaagaagctttatacattattttatgtacatgggtaagtataatcaattaggagaaaatgggtttgttaaaatttaaaacagcttggtgacagtggcagcttattttcttgatggaaagattgagtctgatttaataattttattgagtaagttgtatgtaccagtggatgtaaagtttcaactctccacgtggggagaggcagacagaaagcaaatattcaatttgtcagggatgataagttagaaaaatcagtaagggaggtagagaatggagtgggggtagaattattgtggaggatggtcagggaaggcctccctgataaaatgacattgaatatagatttgaatgaagtgagcaagcaaatcttgtagaaaactggggggaaggcagagaagggacagctagtgtaaaggttctgaggttggggttttattggcatgtttgaggaatagtaaggaagcccttgtggctggagccagatgaatgaagggaacagtaataaaagatggggtcagcagagtaataaggccgggcgcggtggctcacgcctgtaatcccagcactttgggaggccaaggcaggcagatcatgaggtctggaggtcgagaccatcctgaccaacgtggtgaaaccccatctctactaaaaatacaaaaattagctgagcatggtggcgcatggctgtcatcacagctattca

SEQ ID NO: 300966 - DNA, 112 bp, Homo sapiens
cttggtgttgatgctttacgcaagagttttgaggtaagaacagtgggctgttccagtatctcagattgcttagtcacgttattggactgaatcttaatgtaagccaccagtg

SEQ ID NO: 300967 - DNA, 433 bp, Homo sapiens
gaggctgttagagaatgtcatagcatcaagctccagagaaaatggtacagagtagacatgcaataaatgtttgtggaaggaaaattgatggttgagagtggtgtcaattcggaggcctgcaaagcatggatgtgttttgtgttaatctggacttttggaagcatttagtcagattcatttgcatatgagttataattcattttttggttcttttctggcattgtggtgttcattgttaagattttcccccctacacgtcacccactgactatgtgattaatttttcttctttcttttttttttttcctctgaacttgggaaacctcagctcttggcttttccttatttttccaacaccccctgtacacacatacacacacacacacaccccttttgtatatttttttgagacggagtctcgcactgtcacctg

SEQ ID NO: 300968 - DNA, 1574 bp, Homo sapiens
gatgactgtgtactttttgataggcacttgataagtagaatgaggcctgaaaatgaatacattatatttttagttaatttccaatggaaagggctaacctcagcctgtctccatatcaggtacctatcaactggattgttttcatttttgttttttgacctctttgtaattgcatgtacttctctatgtaattttcctcttgatctctactatcgtttgcttgtgtttctagtccttaaagttcataaatttaaaaaggagatttcaggatggcctttatggacgttgtctggacatacatcctcactttcttccgcagtttaccctggttttcctcagacagaggctagcgcagccccccggagtccttgttctccttaagagggtctcgctctgcaaagcatggcgccatggcttttcctttgcatgggtgtgcataccgagagacaggcagcttaggaaaaacaacataaggaagacttaaaaggatgcactgatttacgacgttttttgatgttagccatttttttggaaattgttttttaaagcaaaagttttttaaaaacatggtttatagtttttcacttacatatactattgtaaatacttagcagagtcttaagttactgtataaaacatttcattgtgtttgaagacatacttatgggtcttgaggtctgggtcctaatacttttaaatagtgtatttattatgtaaactgaggagtgccatttaaagtgtgaggattgcctgaaaaggttttgtttctttcttttttttttttttttgagatggagtcttactctgtcgcccaggctggagtgcagtggcgcaatctcggctcactgcaaccaccgcctcccgagttcaagtgattctcctgcctcagcctcctgagtaactgggactacaggcgcacgccaccatgcccagctaatttttgtattttcagtagagatggggtttcaccgtgttgaccaggatggtctccacctcctgacctcgtgatccgcctgcctcggcctcccaaagtgctgggattacaggcatgagccactgcacccggccaggttttgtttctttaaggattagcacaaatggcaccgttgggtttttcttcatacaatttccaaaataaattctgtactcaggttgttatatgattttctgagctgaataagttcaggagcagattattaagatctgccattctgaaacgctggtctttttctccttcctatagtgcaccataaaattctgtttgatcagattatattacatacattttgggggagtggagggacatgagttaagtagcccttcatgtatttataatctcttttctactgaatcaaatgacttagccatgaccctgaatggaccttgttttacttcaagttgagatgtctgccttttatgaatttgtatatgtgaatagagtttgggggttgccaaaaattgcatacattgtatgtaagtaaaattttttatgaagtagtctgtcaaattgtatcataaagtttatttttcttttatacgtaaatcattaaaaataatcacatattttttccata

SEQ ID NO: 300969 - DNA, 1441 bp, Homo sapiens
gatgactgtgtactttttgataggcacttgataagtagaatgaggcctgaaaatgaatacattatatttttagttaatttccaatggaaagggctaacctcagcctgtctccatatcaggtacctatcaactggattgttttcatttttgttttttgacctctttgtaattgcatgtacttctctatgtaattttcctcttgatctctactatcgtttgcttgtgtttctagtccttaaagttcataaatttaaaaaggagatttcaggatggcctttatggacgttgtctggacatacatcctcactttcttccgcagtttaccctggttttcctcagacagaggctagcgcagccccccggagtccttgttctccttaagagggtctcgctctgcaaagcatggcgccatggcttttcctttgcatgggtgtgcataccgagagacaggcagcttaggaaaaacaacataaggaagacttaaaaggatgcactgatttacgacgttttttgatgttagccatttttttggaaattgttttttaaagcaaaagttttttaaaaacatggtttatagtttttcacttacatatactattgtaaatacttagcagagtcttaagttactgtataaaacatttcattgtgtttgaagacatacttatgggtcttgaggtctgggtcctaatacttttaaatagtgtatttattatgtaaactgaggagtgccatttaaagtgtgaggattgcctgaaaaggttttgtttctttcttttttttttttttttgagatggagtcttactctgtcgcccaggctggagtgcagtggcgcaatctcggctcactgcaaccaccgcctcccgagttcaagtgattctcctgcctcagcctcccaaagtgctgggattacaggcatgagccactgcacccggccaggttttgtttctttaaggattagcacaaatggcaccgttgggtttttcttcatacaatttccaaaataaattctgtactcaggttgttatatgattttctgagctgaataagttcaggagcagattattaagatctgccattctgaaacgctggtctttttctccttcctatagtgcaccataaaattctgtttgatcagattatattacatacattttgggggagtggagggacatgagttaagtagcccttcatgtatttataatctcttttctactgaatcaaatgacttagccatgaccctgaatggaccttgttttacttcaagttgagatgtctgccttttatgaatttgtatatgtgaatagagtttgggggttgccaaaaattgcatacattgtatgtaagtaaaattttttatgaagtagtctgtcaaattgtatcataaagtttatttttcttttatacgtaaatcattaaaaataatcacatattttttccata

SEQ ID NO: 300970 - DNA, 1699 bp, Homo sapiens
gatgactgtgtactttttgataggcacttgataagtagaatgaggcctgaaaatgaatacattatatttttagttaatttccaatggaaagggctaacctcagcctgtctccatatcaggtacctatcaactggattgttttcatttttgttttttgacctctttgtaattgcatgtacttctctatgtaattttcctcttgatctctactatcgtttgcttgtgtttctagtccttaaagttcataaatttaaaaaggagatttcaggatggcctttatggacgttgtctggacatacatcctcactttcttccgcagtttaccctggttttcctcagacagaggctagcgcagccccccggagtccttgttctccttaagagggtctcgctctgcaaagcatggcgccatggcttttcctttgcatgggtgtgcataccgagagacaggcagcttaggaaaaacaacataaggaagacttaaaaggatgcactgatttacgacgttttttgatgttagccatttttttggaaattgttttttaaagcaaaagttttttaaaaacatggtttatagtttttcacttacatatactattgtaaatacttagcagagtcttaagttactgtataaaacatttcattgtgtttgaagacatacttatgggtcttgaggtctgggtcctaatacttttaaatagtgtatttattatgtaaactgaggagtgccatttaaagtgtgaggattgcctgaaaaggttttgtttctttcttttttttttttttttgagatggagtcttactctgtcgcccaggctggagtgcagtggcgcaatctcggctcactgcaaccaccgcctcccgagttcaagtgattctcctgcctcagcctcctgagtaactgggactacaggcgcacgccaccatgcccagctaatttttgtattttcagtagagatggggtttcaccgtgttgaccaggatggtctccacctcctgacctcgtgatccgcctgcctcggcctcccaaagtgctgggattacaggcatgagccactgcacccggccaggttttgtttctttaaggattagcacaaatggcaccgttgggtttttcttcatacaatttccaaaataaattctgtactcaggttgttatatgattttctgagctgaataagttcaggagcagattattaagatctgccattctgaaacgctggtctttttctccttcctatagtgcaccataaaattctgtttgatcagattatattacatacattttgggggagtggagggacatgagttaagtagcccttcatgtatttataatctcttttctactgaatcaaatgacttagccatgaccctgaatggaccttgttttacttcaagttgagatgtctgccttttatgaatttgtatatgtgaatagagtttgggggttgccaaaaattgcatacattgtatgtaagtaaaattttttatgaagtagtctgtcaaattgtatcataaagtttatttttcttttatacgtaaatcattaaaaataatcacatattttttccataagtgtatggattgtgcagttcgattcacacatggaaaaatcataagcatttggattttttattttcaaatgtgtgtgttttgtttttctcgtgaggaaagttcagggaaatacatcttttcattc

SEQ ID NO: 300971 - DNA, 1213 bp, Homo sapiens
  misc_feature (1182)..(1182): n is a, c, g, or t
  misc_feature (1202)..(1202): n is a, c, g, or t
gatgactgtgtactttttgataggcacttgataagtagaatgaggcctgaaaatgaatacattatatttttagttaatttccaatggaaagggctaacctcagcctgtctccatatcaggtacctatcaactggattgttttcatttttgttttttgacctctttgtaattgcatgtacttctctatgtaattttcctcttgatctctactatcgtttgcttgtgtttctagtccttaaagttcataaatttaaaaaggagatttcaggatggcctttatggacgttgtctggacatacatcctcactttcttccgcagtttaccctggttttcctcagacagaggctagcgcagccccccggagtccttgttctccttaagagggtctcgctctgcaaagcatggcgccatggcttttcctttgcatgggtgtgcataccgagagacaggcagcttaggaaaaacaacataaggaagacttaaaaggatgcactgatttacgacgttttttgatgttagccatttttttggaaattgttttttaaagcaaaagttttttaaaaacatggtttatagtttttcacttacatatactattgtaaatacttagcagagtcttaagttactgtataaaacatttcattgtgtttgaagacatacttatgggtcttgaggtctgggtcctaatacttttaaatagtgtatttattatgtaaactgaggagtgccatttaaagtgtgaggattgcctgaaaaggttttgtttctttcttttttttttttttttgagatggagtcttactctgtcgcccaggctggagtgcagtggcgcaatctcggctcactgcaaccaccgcctcccgagttcaagtgattctcctgcctcagcctcccaaagtgctgggattacaggcatgagccactgcacccggccaggttttgtttctttaaggattagcacaaatggcaccgttgggtttttcttcatacaatttccaaaataaattctgtactcaggttgttatatgattttctgagctgaataagttcaggagcagattattaagatctgccattctgaaacgctggtctccaactgctgatgagctcaggtgatccgcccacctcggcctcccaaagtgctgagattacaggcgtgacaccggcgcccggtcccttanttttttctagatggagcacnacctccattgg

SEQ ID NO: 300972 - DNA, 623 bp, Homo sapiens
atgaagcacccagaggaccacaatcctcggattttatgagaagaccttctgccctgcctgcccttttgagacctttatctgaaaaggaacctgcaatcctagaaaagaggtggaggcaggcttgattcagttaaggaagttctttcttctcagcaattaccacgccaattctgtggaaaagcaacatttggaagacgagagaaatccactgtaggaagtattagaaatacctgcaattaggcttcaaacaagcaaatgagggcaggaaaagtaaatgacgacagcctgtgtcctctccatgacaccactctgcctccatggaaccactctgcccccatggatctctccagttttaagtctggggaaatctatcaatcacacaatttcagttagcattccaagaactaggggaaggcccgagtaatctattcaaagacatgcttcagaaagaacacaccgaccccatggagagttaaacctgattaccaagaagcaggatagttaggtgtttccgctatttacataatcattgtaaatataagttacagactaattacaatgataattatgacaatgagcctggcatggaggaagagtttaataaataatatttgatgaatgaa

SEQ ID NO: 300973 - DNA, 633 bp, Homo sapiens
atgaagcacccagaggaccacaatcctcggattttatgagaagaccttctgccctgcctgcccttttgagacctttatctgaaaaggaacctgcaatcctagaaaagaggtggaggcaggcttgattcagttaaggaagttctttcttctcagcaattaccacgccaattctgtggaaaagcaacatttggaagacgagagaaatccactgtaggaagtattagaaatacctgcaattaggcttcaaacaagcaaatgagatgtatacattcatgaaaatcaacccatctacactcaactgaaaaacagatgcttcaactggagaaaaagggattttatctctccatacccaaagctatcttaaattaggacttttaacctgttgccttcgtgcgcatgtgcagtagctggattaacaggagagaaagcaacagcccaagaaccgaccctcctgcatcaaatgagtaaaccaaaaaggaaaggggatttacgcaaacaccacaatgcctccccgggagccgttccagtccatcagaaccaaatccaccctttcagcggcgtggaaatgtacggataccgaacagaccttgcatttacaataaataaacattacgtacattttccaaaatgagc

SEQ ID NO: 300974 - DNA, 938 bp, Homo sapiens
gctccccaccatctgtagccctgaaaggtctcgatccacctgctctctggacggaactgtggcttgaagagccattcctgaggactttggggcctttctctttctagacacccattttcttaattagaaagggaaaagactgtggccttgggagagttaagaatagtaagacaaggagctgggcaatccagtagtcaactagctacatgtagctatttaaattagttacaatgaaataaaattagaaaactgtagagctgcagtcgcaccagcctcattcatagccatgtgtgactggtggctgccgtcttgggtggtgccttcattgtcccagaaagttctgttggagcaagcccagctggaggaacccagcttccctggcacgcctgagggtgacatggtgccctcactgccttctgtctgtcctcactttctcctgccctgtccctccgccctcaggtgagaagccctttgagtgtaagctctgccaccagcgctcccgggactactcggccatgatcaagcacctgagaacgcacaacggcgcctcgccctaccagtgcaccatctgcacagagtactgccccagcctctcctccatgcagaagcacatgaagggccacaagcccgaggagatcccgcccgactggaggatagagaagacgtacctctacctgtgctatgtgtgaagggaggcccgcggcggtggagccgagcggggagccaggaaagaagagttggagtgagatgaaggaaggactatgacaaataaaaaaggaaaaggaattcaaaaacagaaggaaaaggaaacctggtagctttttggccttggattctctctgggctccagatgacctggatgccaagccactgcccctcctctgggggcctccaccctcctctcccggctggaggtttgcctgattttctgggatggg

SEQ ID NO: 300975 - DNA, 2538 bp, Homo sapiens
ctcgcagcagagaggagttgagggcgatgagagcgggtactgcgaactgccgggcgatgctgtcgctgccgccgtgatacggagagcaacagttccccagcaacacccctccccgacacaggcacacaccccccgacaggcacgcacacccaccccacagtgcccggctcggctgcgcctcctctattggcccaggaagcccacccagccccgccacgcagagcccagaaggaaagaaagcctcatgcctgagccgaggggagcaccatggatctgacaaaaatgggcatgatccagctgcagaaccctagccaccccacggggctactgtgcaaggccaaccagatgcggctggccgggactttgtgcgatgtggtcatcatggtggacagccaggagttccacgcccaccggacggtgctggcctgcaccagcaagatgtttgagatcctcttccaccgcaatagtcaacactatactttggacttcctctcgccaaagaccttccagcagattctggagtatgcatatacagccacgctgcaagccaaggcggaggacctggatgacctgctgtatgcggccgagatcctggagatcgagtacctggaggaacagtgcctgaagatgctggagaccatccaggcctcagacgacaatgacacggaggccaccatggccgatggcggggccgaggaagaagaggaccgcaaggctcggtacctcaagaacatcttcatctcgaagcattccagcgaggagagtgggtatgccagtgtggctggacagagcctccctgggcccatggtggaccagagcccttcagtctccacttcatttggtctttcagccatgagtcccaccaaggctgcagtggacagtttgatgaccataggacagtctctcctgcagggaactcttcagccacctgcagggcccgaggagccaactctggctgggggtgggcggcaccctggggtggctgaggtgaagacggagatgatgcaggtggatgaggtgcccagccaggacagccctggggcagccgagtccagcatctcaggagggatgggggacaaggttgaggaaagaggcaaagaggggcctgggaccccgactcgaagcagcgtcatcaccagtgctagggagctacactatgggcgagaggagagtgccgagcaggtgccacccccagctgaggctggccaggcccccactggccgacctgagcacccagcacccccgcctgagaagcatctgggcatctactccgtgttgcccaaccacaaggctgacgctgtattgagcatgccgtcttccgtgacctctggcctccacgtgcagcctgccctggctgtctccatggacttcagcacctatggggggctgctgccccagggcttcatccagagggagctgttcagcaagctgggggagctggctgtgggcatgaagtcagagagccggaccatcggagagcagtgcagcgtgtgtggggtcgagcttcctgataacgaggctgtggagcagcacaggaagctgcacagtgggatgaagacgtacgggtgcgagctctgcgggaagcggttcctggatagtttgcggctgagaatgcacttactggctcattcagcgggtgccaaagcctttgtctgtgatcagtgcggtgcacagttttcgaaggaggatgccctggagacacacaggcagacccatactggcactgacatggccgtcttctgtctgctgtgtgggaagcgcttccaggcgcagagcgcactgcagcagcacatggaggtccacgcgggcgtgcgcagctacatctgcagtgagtgcaaccgcaccttccccagccacacggctctcaaacgccacctgcgctcacatacaggcgaccacccctacgagtgtgagttctgtggcagctgcttccgggatgagagcacactcaagagccacaaacgcatccacacgggtgagaaaccctacgagtgcaatggctgtggcaagaagttcagcctcaagcatcagctggagacgcactatagggtgcacacaggtgagaagccctttgagtgtaagctctgccaccagcgctcccgggactactcggccatgatcaagcacctgagaacgcacaacggcgcctcgccctaccagtgcaccatctgcacagagtactgccccagcctctcctccatgcagaagcacatgaagggccacaagcccgaggagatcccgcccgactggaggatagagaagacgtacctctacctgtgctatgtgtgaagggaggcccgcggcggtggagccgagcggggagccaggaaagaagagttggagtgagatgaaggaaggactatgacaaataaaaaaggaaaaggaattcaaaaacagaaggaaaaggaaacctggtagctttttggccttggattctctctgggctccagatgacctggatgccaagccactgcccctcctctgggggcctccaccctcctctcccggctggaggtttgcctgattttctgggatggg

SEQ ID NO: 300976 - DNA, 2446 bp, Homo sapiens
ggtctgcagcgctgcgggccctcctcggctctcggcgggaccggcggtgacaccggagctcgccgtgcgctcccggccgctctcgcctcctctattggcccaggaagcccacccagccccgccacgcagagcccagaaggaaagaaagcctcatgcctgagccgaggggagcaccatggatctgacaaaaatgggcatgatccagctgcagaaccctagccaccccacggggctactgtgcaaggccaaccagatgcggctggccgggactttgtgcgatgtggtcatcatggtggacagccaggagttccacgcccaccggacggtgctggcctgcaccagcaagatgtttgagatcctcttccaccgcaatagtcaacactatactttggacttcctctcgccaaagaccttccagcagattctggagtatgcatatacagccacgctgcaagccaaggcggaggacctggatgacctgctgtatgcggccgagatcctggagatcgagtacctggaggaacagtgcctgaagatgctggagaccatccaggcctcagacgacaatgacacggaggccaccatggccgatggcggggccgaggaagaagaggaccgcaaggctcggtacctcaagaacatcttcatctcgaagcattccagcgaggagagtgggtatgccagtgtggctggacagagcctccctgggcccatggtggaccagagcccttcagtctccacttcatttggtctttcagccatgagtcccaccaaggctgcagtggacagtttgatgaccataggacagtctctcctgcagggaactcttcagccacctgcagggcccgaggagccaactctggctgggggtgggcggcaccctggggtggctgaggtgaagacggagatgatgcaggtggatgaggtgcccagccaggacagccctggggcagccgagtccagcatctcaggagggatgggggacaaggttgaggaaagaggcaaagaggggcctgggaccccgactcgaagcagcgtcatcaccagtgctagggagctacactatgggcgagaggagagtgccgagcaggtgccacccccagctgaggctggccaggcccccactggccgacctgagcacccagcacccccgcctgagaagcatctgggcatctactccgtgttgcccaaccacaaggctgacgctgtattgagcatgccgtcttccgtgacctctggcctccacgtgcagcctgccctggctgtctccatggacttcagcacctatggggggctgctgccccagggcttcatccagagggagctgttcagcaagctgggggagctggctgtgggcatgaagtcagagagccggaccatcggagagcagtgcagcgtgtgtggggtcgagcttcctgataacgaggctgtggagcagcacaggaagctgcacagtgggatgaagacgtacgggtgcgagctctgcgggaagcggttcctggatagtttgcggctgagaatgcacttactggctcattcagcgggtgccaaagcctttgtctgtgatcagtgcggtgcacagttttcgaaggaggatgccctggagacacacaggcagacccatactggcactgacatggccgtcttctgtctgctgtgtgggaagcgcttccaggcgcagagcgcactgcagcagcacatggaggtccacgcgggcgtgcgcagctacatctgcagtgagtgcaaccgcaccttccccagccacacggctctcaaacgccacctgcgctcacatacaggcgaccacccctacgagtgtgagttctgtggcagctgcttccgggatgagagcacactcaagagccacaaacgcatccacacgggtgagaaaccctacgagtgcaatggctgtggcaagaagttcagcctcaagcatcagctggagacgcactatagggtgcacacaggtgagaagccctttgagtgtaagctctgccaccagcgctcccgggactactcggccatgatcaagcacctgagaacgcacaacggcgcctcgccctaccagtgcaccatctgcacagagtactgccccagcctctcctccatgcagaagcacatgaagggccacaagcccgaggagatcccgcccgactggaggatagagaagacgtacctctacctgtgctatgtgtgaagggaggcccgcggcggtggagccgagcggggagccaggaaagaagagttggagtgagatgaaggaaggactatgacaaataaaaaaggaaaaggaattcaaaaacagaaggaaaaggaaacctggtagctttttggccttggattctctctgggctccagatgacctggatgccaagccactgcccctcctctgggggcctccaccctcctctcccggctggaggtttgcctgattttctgggatggg

SEQ ID NO: 300977 - DNA, 2635 bp, Homo sapiens
ctcgcagcagagaggagttgagggcgatgagagcgggtactgcgaactgccgggcgatgctgtcgctgccgccgtgatacggagagcaacagttccccagcaacacccctccccgacacaggcacacaccccccgacaggcacgcacacccaccccacagtgcccggctcggctgcgcctcctctattggcccaggaagcccacccagccccgccacgcagagcccagaaggaaagaaagcctcatgcctgagccgaggggagcaccatggatctgacaaaaatgggcatgatccagctgcagaaccctagccaccccacggggctactgtgcaaggccaaccagatgcggctggccgggactttgtgcgatgtggtcatcatggtggacagccaggagttccacgcccaccggacggtgctggcctgcaccagcaagatgtttgagatcctcttccaccgcaatagtcaacactatactttggacttcctctcgccaaagaccttccagcagattctggagtatgcatatacagccacgctgcaagccaaggcggaggacctggatgacctgctgtatgcggccgagatcctggagatcgagtacctggaggaacagtgcctgaagatgctggagaccatccaggcctcagacgacaatgacacggaggccaccatggccgatggcggggccgaggaagaagaggaccgcaaggctcggtacctcaagaacatcttcatctcgaagcattccagcgaggagagtgggtatgccagtgtggctggacagagcctccctgggcccatggtggaccagagcccttcagtctccacttcatttggtctttcagccatgagtcccaccaaggctgcagtggacagtttgatgaccataggacagtctctcctgcagggaactcttcagccacctgcagggcccgaggagccaactctggctgggggtgggcggcaccctggggtggctgaggtgaagacggagatgatgcaggtggatgaggtgcccagccaggacagccctggggcagccgagtccagcatctcaggagggatgggggacaaggttgaggaaagaggcaaagaggggcctgggaccccgactcgaagcagcgtcatcaccagtgctagggagctacactatgggcgagaggagagtgccgagcaggtgccacccccagctgaggctggccaggcccccactggccgacctgagcacccagcacccccgcctgagaagcatctgggcatctactccgtgttgcccaaccacaaggctgacgctgtattgagcatgccgtcttccgtgacctctggcctccacgtgcagcctgccctggctgtctccatggacttcagcacctatggggggctgctgccccagggcttcatccagagggagctgttcagcaagctgggggagctggctgtgggcatgaagtcagagagccggaccatcggagagcagtgcagcgtgtgtggggtcgagcttcctgataacgaggctgtggagcagcacagggtcttctagcataacctttgttcctgttggcaacacttcattttggactgtcaagatgcatttcctgagatgtgagatgtcatgaccctgtgtttggaagctgcacagtgggatgaagacgtacgggtgcgagctctgcgggaagcggttcctggatagtttgcggctgagaatgcacttactggctcattcagcgggtgccaaagcctttgtctgtgatcagtgcggtgcacagttttcgaaggaggatgccctggagacacacaggcagacccatactggcactgacatggccgtcttctgtctgctgtgtgggaagcgcttccaggcgcagagcgcactgcagcagcacatggaggtccacgcgggcgtgcgcagctacatctgcagtgagtgcaaccgcaccttccccagccacacggctctcaaacgccacctgcgctcacatacaggcgaccacccctacgagtgtgagttctgtggcagctgcttccgggatgagagcacactcaagagccacaaacgcatccacacgggtgagaaaccctacgagtgcaatggctgtggcaagaagttcagcctcaagcatcagctggagacgcactatagggtgcacacaggtgagaagccctttgagtgtaagctctgccaccagcgctcccgggactactcggccatgatcaagcacctgagaacgcacaacggcgcctcgccctaccagtgcaccatctgcacagagtactgccccagcctctcctccatgcagaagcacatgaagggccacaagcccgaggagatcccgcccgactggaggatagagaagacgtacctctacctgtgctatgtgtgaagggaggcccgcggcggtggagccgagcggggagccaggaaagaagagttggagtgagatgaaggaaggactatgacaaataaaaaaggaaaaggaattcaaaaacagaaggaaaaggaaacctggtagctttttggccttggattctctctgggctccagatgacctggatgccaagccactgcccctcctctgggggcctccaccctcctctcccggctggaggtttgcctgattttctgggatggg

SEQ ID NO: 300978 - DNA, 1231 bp, Homo sapiens
ctcgcagcagagaggagttgagggcgatgagagcgggtactgcgaactgccgggcgatgctgtcgctgccgccgtgatacggagagcaacagttccccagcaacacccctccccgacacaggcacacaccccccgacaggcacgcacacccaccccacagtgcccggctcggctgcgcctcctctattggcccaggaagcccacccagccccgccacgcagagcccagaaggaaagaaagcctcatgcctgagccgaggggagcaccatggatctgacaaaaatgggcatgatccagctgcagaaccctagccaccccacggggctactgtgcaaggccaaccagatgcggctggccgggactttgtgcgatgtggtcatcatggtggacagccaggagttccacgcccaccggacggtgctggcctgcaccagcaagatgtttgagatcctcttccaccgcaatagtcaacactatactttggacttcctctcgccaaagaccttccagcagattctggagtatgcatatacagccacgctgcaagccaaggcggaggacctggatgacctgctgtatgcggccgagatcctggagatcgagtacctggaggaacagtgcctgaagatgctggagaccatccaggcctcagacgacaatgacacggaggccaccatggccgatggcggggccgaggaagaagaggaccgcaaggctcggtacctcaagaacatcttcatctcgaagcattccagcgaggagagtgggtatgccagtgtggctggacagagcctccctgggcccatggtggaccagagcccttcagtctccacttcatttggtctttcagccatgagtcccaccaaggctgcagtggacagtttgatgaccataggacagtctctcctgcagggaactcttcagccacctgcagggcccgaggagccaactctggctgggggtgggcggcaccctggggtggctgaggtgaagacggagatgatgcaggtggatgaggtgcccagccaggacagccctggggcagccgagtccagcatctcaggagggatgggggacaaggttgaggcattgaggcagccagcgcaggggctttctgctgagggggcaggcggagtttgaggaaaccgcagatcagtttttttctcttggaacagatagagattaatacaactactcaaaaaataccactccaaccaaaataaaacaccct

SEQ ID NO: 300979 - DNA, 2889 bp, Homo sapiens
gcgggcgccgcaggagcgagtgagctgggagcgaggggcgaaggcgcggagaagcccggccgcccggtgggcggcagaaggctcagccgaggcggcggcgccgactccgttccactctcggcccggatccaggcctccgggttcccaggcgctcacctccctctgacgcactttaaagagtctccccccttccacctcagggcgagtaatagcgaccaatcatcaagccatttaccaggcttcggaggaagctgtttatgtgatccccgcactaattaggctcatgaactaacaaatcgtttgcacaacttgtgaagaagcgaacacttccatggattgtccttggacttagggcgccctgcccgccttttgcagaggagaaaaaactttttttttttttttgcctcccccgagaactttccccccttctcctccctgcctctaactccgatccccccacgccatctcgccaaaaaaaaaaaaaaaaaaaaaaaagaaaaaaaaagaaaaaaaaagaaaaaaaattaccccaatccacgcctgcaaattcttctggaaggattttcccccctctcttcaggttgggcgcgtttggtgcaagattctcgggatcctcggctttgcctctccctctccctcccccctcctttcctttttcctttcctttcctttctttcttcctttccttccccccacccccacccccaccccaaacaaacgagtccccaattctcgtccgtcctcgccgcgggcagcgggcggcggaggcagcgtgcggcggtcgccaggagctgggagcccagggcgcccgctcctcggcgcagcatgttccagccggcgcccaagcgctgcttcaccatcgagtcgctggtggccaaggacagtcccctgcccgcctcgcgctccgaggaccccatccgtcccgcggcactcagctacgctaactccagccccataaatccgttcctcaacggcttccactcggccgccgccgccgccgccggtaggggcgtctactccaacccggacttggtgttcgccgaggcggtctcgcacccgcccaaccccgccgtgccagtgcacccggtgccgccgccgcacgccctggccgcccaccccctaccctcctcgcactcgccacaccccctattcgcctcgcagcagcgggatccgtccaccttctacccctggctcatccaccgctaccgatatctgggtcatcgcttccaagggaacgacactagccccgagagtttccttttgcacaacgcgctggcccgaaagcccaagcggatccgaaccgccttctccccgtcccagcttctaaggctggaacacgcctttgagaagaatcactacgtggtgggcgccgaaaggaagcagctggcacacagcctcagcctcacggaaactcaggtaaaagtatggtttcagaaccgaagaacaaagttcaaaaggcagaagctggaggaagaaggctcagattcgcaacaaaagaaaaaagggacgcaccatattaaccggtggagaatcgccaccaagcaggcgagtccggaggaaatagacgtgacctcagatgattaaaaacataaacctaaccccacagaaacggacaacatggagcaaaagagacagggagaggtggagaaggaaaaaaccctacaaaacaaaaacaaaccgcatacacgttcaccgagaaagggagagggaatcggagggagcagcggaatgcggcgaagactctggacagcgagggcacagggtcccaaaccgaggccgcgccaagatggcagaggatggaggctccttcatcaacaagcgaccctcgtctaaagaggcagctgagtgagagacacagagagaaggagaaagagggagggagagagagaaagagagagaaagagagagagagagagagagaaagctgaacgtgcactctgacaaggggagctgtcaatcaaacaccaaaccggggagacaagatgattggcaggtattccgtttatcacagtccacttaaaaaatgatgatgatgataaaaaccacgacccaaccaggcacaggacttttttgttttttgcacttcgctgtgtttcccccccatctttaaaaataattagtaataaaaaacaaaaattccatatctagccccatcccacacctgtttcaaatccttgaaatgcatgtagcagttgttgggcgaatggtgtttaaagaccgaaaatgaattgtaattttcttttccttttaaagacaggttctgtgtgctttttattttgattttttttcccaagaaatgtgcagtctgtaaacactttttgataccttctgatgtcaaagtgattgtgcaagctaaatgaagtaggctcagcgatagtggtcctcttacagagaaacggggagcaggacgacgggggggctgggggtggcgggggagggtgcccacaaaaagaatcaggacttgtactgggaaaaaaacccctaaattaattatatttcttggacattccctttcctaacatcctgaggcttaaaaccctgatgcaaacttctcctttcagtggttggagaaattggccgagttcaaccattcactgcaatgcctattccaaactttaaatctatctattgcaaaacctgaaggactgtagttagcggggatgatgttaagtgtggccaagcgcacggcggcaagttttcaagcactgagtttctattccaagatcatagacttactaaagagagtgacaaatgcttccttaatgtcttctataccagaatgtaaatatttttgtgttttgtgttaatttgttagaattctaacacactatatacttccaagaagtatgtcaatgtcaatattttgtcaataaagatttatcaatatgc

SEQ ID NO: 300980 - DNA, 2462 bp, Homo sapiens
gcgggcgccgcaggagcgagtgagctgggagcgaggggcgaaggcgcggagaagcccggccgcccggtgggcggcagaaggctcagccgaggcggcggcgccgactccgttccactctcggcccggatccaggcctccgggttcccaggcgctcacctccctctgacgcactttaaagagtctccccccttccacctcagggcgagtaatagcgaccaatcatcaagccatttaccaggcttcggaggaagctgtttatgtgatccccgcactaattaggctcatgaactaacaaatcgtttgcacaacttgtgaagaagcgaacacttccatggattgtccttggacttagggcgccctgcccgccttttgcagaggagaaaaaactttttttttttttttgcctcccccgagaactttccccccttctcctccctgcctctaactccgatccccccacgccatctcgccaaaaaaaaaaaaaaaaaaaaaaaagaaaaaaaaagaaaaaaaaagaaaaaaaattaccccaatccacgcctgcaaattcttctggaaggattttcccccctctcttcaggttgggcgcgtttggtgcaagattctcgggatcctcggctttgcctctccctctccctcccccctcctttcctttttcctttcctttcctttctttcttcctttccttccccccaccctcctcgcactcgccacaccccctattcgcctcgcagcagcgggatccgtccaccttctacccctggctcatccaccgctaccgatatctgggtcatcgcttccaagggaacgacactagccccgagagtttccttttgcacaacgcgctggcccgaaagcccaagcggatccgaaccgccttctccccgtcccagcttctaaggctggaacacgcctttgagaagaatcactacgtggtgggcgccgaaaggaagcagctggcacacagcctcagcctcacggaaactcaggtaaaagtatggtttcagaaccgaagaacaaagttcaaaaggcagaagctggaggaagaaggctcagattcgcaacaaaagaaaaaagggacgcaccatattaaccggtggagaatcgccaccaagcaggcgagtccggaggaaatagacgtgacctcagatgattaaaaacataaacctaaccccacagaaacggacaacatggagcaaaagagacagggagaggtggagaaggaaaaaaccctacaaaacaaaaacaaaccgcatacacgttcaccgagaaagggagagggaatcggagggagcagcggaatgcggcgaagactctggacagcgagggcacagggtcccaaaccgaggccgcgccaagatggcagaggatggaggctccttcatcaacaagcgaccctcgtctaaagaggcagctgagtgagagacacagagagaaggagaaagagggagggagagagagaaagagagagaaagagagagagagagagagagaaagctgaacgtgcactctgacaaggggagctgtcaatcaaacaccaaaccggggagacaagatgattggcaggtattccgtttatcacagtccacttaaaaaatgatgatgatgataaaaaccacgacccaaccaggcacaggacttttttgttttttgcacttcgctgtgtttcccccccatctttaaaaataattagtaataaaaaacaaaaattccatatctagccccatcccacacctgtttcaaatccttgaaatgcatgtagcagttgttgggcgaatggtgtttaaagaccgaaaatgaattgtaattttcttttccttttaaagacaggttctgtgtgctttttattttgattttttttcccaagaaatgtgcagtctgtaaacactttttgataccttctgatgtcaaagtgattgtgcaagctaaatgaagtaggctcagcgatagtggtcctcttacagagaaacggggagcaggacgacgggggggctgggggtggcgggggagggtgcccacaaaaagaatcaggacttgtactgggaaaaaaacccctaaattaattatatttcttggacattccctttcctaacatcctgaggcttaaaaccctgatgcaaacttctcctttcagtggttggagaaattggccgagttcaaccattcactgcaatgcctattccaaactttaaatctatctattgcaaaacctgaaggactgtagttagcggggatgatgttaagtgtggccaagcgcacggcggcaagttttcaagcactgagtttctattccaagatcatagacttactaaagagagtgacaaatgcttccttaatgtcttctataccagaatgtaaatatttttgtgttttgtgttaatttgttagaattctaacacactatatacttccaagaagtatgtcaatgtcaatattttgtcaataaagatttatcaatatgc

SEQ ID NO: 300981 - DNA, 2863 bp, Homo sapiens
gcgggcgccgcaggagcgagtgagctgggagcgaggggcgaaggcgcggagaagcccggccgcccggtgggcggcagaaggctcagccgaggcggcggcgccgactccgttccactctcggcccggatccaggcctccgggttcccaggcgctcacctccctctgacgcactttaaagagtctccccccttccacctcagggcgagtaatagcgaccaatcatcaagccatttaccaggcttcggaggaagctgtttatgtgatccccgcactaattaggctcatgaactaacaaatcgtttgcacaacttgtgaagaagcgaacacttccatggattgtccttggacttagggcgccctgcccgccttttgcagaggagaaaaaactttttttttttttttgcctcccccgagaactttccccccttctcctccctgcctctaactccgatccccccacgccatctcgccaaaaaaaaaaaaaaaaaaaaaaaagaaaaaaaaagaaaaaaaaagaaaaaaaattaccccaatccacgcctgcaaattcttctggaaggattttcccccctctcttcaggttgggcgcgtttggtgcaagattctcgggatcctcggctttgcctctccctctccctcccccctcctttcctttttcctttcctttcctttctttcttcctttccttccccccacccccacccccaccccaaacaaacgagtccccaattctcgtccgtcctcgccgcgggcagcgggcggcggaggcagcgtgcggcggtcgccaggagctgggagcccagggcgcccgctcctcggcgcagcatgttccagccggcgcccaagcgctgcttcaccatcgagtcgctggtggccaaggacagtcccctgcccgcctcgcgctccgaggaccccatccgtcccgcggcactcagctacgctaactccagccccataaatccgttcctcaacggcttccactcggccgccgccgccgccgccggtaggggcgtctactccaacccggacttggtgttcgccgaggcggtctcgcacccgcccaaccccgccgtgccagtgcacccggtgccgccgccgcacgccctggccgcccaccccctaccctcctcgcactcgccacaccccctattcgcctcgcagcagcgggatccgtccaccttctacccctggctcatccaccgctaccgatatctgggtcatcgcttccaagggaacgacactagccccgagagtttccttttgcacaacgcgctggcccgaaagcccaagcggatccgaaccgccttctccccgtcccagcttctaaggctggaacacgcctttgagaagaatcactacgtggtgggcgccgaaaggaagcagctggcacacagcctcagcctcacggaaactcaggtaaaagtatggtttcagaaccgaagaacaaagttcaaaaggcagaagctggaggaagaaggctcagattcgcaacaaaagaaaaaagggacgcaccatattaaccggtggagaatcgccaccaagcaggcgagtccggaggaaatagacgtgacctcagatgattaaaaacataaacctaaccccacagaaacggacaacatggagcaaaagagacagggagaggtggagaaggaaaaaaccctacaaaacaaaaacaaaccgcatacacgttcaccgagaaagggagagggaatcggagggagcagcggaatgcggcgaagactctggacagcgagggcacagggtcccaaaccgaggccgcgccaagatggcagaggatggaggctccttcatcaacaagcgaccctcgtctaaagaggcagctgagtgagagacacagagagaaggagaaagagggagggagagagagaaagagagagaaagagagagagagagagaaggggagctgtcaatcaaacaccaaaccggggagacaagatgattggcaggtattccgtttatcacagtccacttaaaaaatgatgatgatgataaaaaccacgacccaaccaggcacaggacttttttgttttttgcacttcgctgtgtttcccccccatctttaaaaataattagtaataaaaaacaaaaattccatatctagccccatcccacacctgtttcaaatccttgaaatgcatgtagcagttgttgggcgaatggtgtttaaagaccgaaaatgaattgtaattttcttttccttttaaagacaggttctgtgtgctttttattttgattttttttcccaagaaatgtgcagtctgtaaacactttttgataccttctgatgtcaaagtgattgtgcaagctaaatgaagtaggctcagcgatagtggtcctcttacagagaaacggggagcaggacgacgggggggctgggggtggcgggggagggtgcccacaaaaagaatcaggacttgtactgggaaaaaaacccctaaattaattatatttcttggacattccctttcctaacatcctgaggcttaaaaccctgatgcaaacttctcctttcagtggttggagaaattggccgagttcaaccattcactgcaatgcctattccaaactttaaatctatctattgcaaaacctgaaggactgtagttagcggggatgatgttaagtgtggccaagcgcacggcggcaagttttcaagcactgagtttctattccaagatcatagacttactaaagagagtgacaaatgcttccttaatgtcttctataccagaatgtaaatatttttgtgttttgtgttaatttgttagaattctaacacactatatacttccaagaagtatgtcaatgtcaatattttgtcaataaagatttatcaatatgc

SEQ ID NO: 300982 - DNA, 3277 bp, Homo sapiens
gcgggcgccgcaggagcgagtgagctgggagcgaggggcgaaggcgcggagaagcccggccgcccggtgggcggcagaaggctcagccgaggcggcggcgccgactccgttccactctcggcccggatccaggcctccgggttcccaggcgctcacctccctctgacgcactttaaagagtctccccccttccacctcagggcgagtaatagcgaccaatcatcaagccatttaccaggcttcggaggaagctgtttatgtgatccccgcactaattaggctcatgaactaacaaatcgtttgcacaacttgtgaagaagcgaacacttccatggattgtccttggacttagggcgccctgcccgccttttgcagaggagaaaaaactttttttttttttttgcctcccccgagaactttccccccttctcctccctgcctctaactccgatccccccacgccatctcgccaaaaaaaaaaaaaaaaaaaaaaaagaaaaaaaaagaaaaaaaaagaaaaaaaattaccccaatccacgcctgcaaattcttctggaaggattttcccccctctcttcaggttgggcgcgtttggtgcaagattctcgggatcctcggctttgcctctccctctccctcccccctcctttcctttttcctttcctttcctttctttcttcctttccttccccccacccccacccccaccccaaacaaacgagtccccaattctcgtccgtcctcgccgcgggcagcgggcggcggaggcagcgtgcggcggtcgccaggagctgggagcccagggcgcccgctcctcggcgcagcatgttccagccggcgcccaagcgctgcttcaccatcgagtcgctggtggccaaggacagtcccctgcccgcctcgcgctccgaggaccccatccgtcccgcggcactcagctacgctaactccagccccataaatccgttcctcaacggcttccactcggccgccgccgccgccgccggtaggggcgtctactccaacccggacttggtgttcgccgaggcggtctcgcacccgcccaaccccgccgtgccagtgcacccggtgccgccgccgcacgccctggccgcccaccccctaccctcctcgcactcgccacaccccctattcgcctcgcagcagcgggatccgtccaccttctacccctggctcatccaccgctaccgatatctgggtcatcgcttccaagggaacgacactagccccgagagtttccttttgcacaacgcgctggcccgaaagcccaagcggatccgaaccgccttctccccgtcccagcttctaaggctggaacacgcctttgagaagaatcactacgtggtgggcgccgaaaggaagcagctggcacacagcctcagcctcacggaaactcaggtaaaagtatggtttcagaaccgaagaacaaagttcaaaaggcagaagctggaggaagaaggctcagattcgcaacaaaagaaaaaagggacgcaccatattaaccggtggagaatcgccaccaagcaggcgagtccggaggaaatagacgtgacctcagatgattaaaaacataaacctaaccccacagaaacggacaacatggagcaaaagagacagggagaggtggagaaggaaaaaaccctacaaaacaaaaacaaaccgcatacacgttcaccgagaaagggagagggaatcggagggagcagcggaatgcggcgaagactctggacagcgagggcacagggtcccaaaccgaggccgcgccaagatggcagaggatggaggctccttcatcaacaagcgaccctcgtctaaagaggcagctgagtgagagacacagagagaaggagaaagagggagggagagagagaaagagagagaaagagagagagagagagagagaaagctgaacgtgcactctgacaaggggagctgtcaatcaaacaccaaaccggggagacaagatgattggcaggtattccgtttatcacagtccacttaaaaaatgatgatgatgataaaaaccacgacccaaccaggcacaggacttttttgttttttgcacttcgctgtgtttcccccccatctttaaaaataattagtaataaaaaacaaaaattccatatctagccccatcccacacctgtttcaaatccttgaaatgcatgtagcagttgttgggcgaatggtgtttaaagaccgaaaatgaattgtaattttcttttccttttaaagacaggttctgtgtgctttttattttgattttttttcccaagaaatgtgcagtctgtaaacactttttgataccttctgatgtcaaagtgattgtgcaagctaaatgaagtaggctcagcgatagtggtcctcttacagagaaacggggagcaggacgacgggggggctgggggtggcgggggagggtgcccacaaaaagaatcaggacttgtactgggaaaaaaacccctaaattaattatatttcttggacattccctttcctaacatcctgaggcttaaaaccctgatgcaaacttctcctttcagtggttggagaaattggccgagttcaaccattcactgcaatgcctattccaaactttaaatctatctattgcaaaacctgaaggactgtagttagcggggatgatgttaagtgtggccaagcgcacggcggcaagttttcaagcactgagtttctattccaagatcatagacttactaaagagagtgacaaatgcttccttaatgtcttctataccagaatgtaaatatttttgtgttttgtgttaatttgttagaattctaacacactatatacttccaagaagtatgtcaatgtcaatattttgtcaataaagatttatcaatatgccctcagagtagtcgtcttgggaaattgaagtggatctttaaaaatgtatctcagtaatttgagtgtggtccttccccaactaggctcaagaaacccaggctcctcacccacaaaagggccagattgatggattctcaggcattttaaagaaagatgagggtggagaagggagaagattaggaaaacttaagtccttcagaaaagagatgggagaaaagtttttcaaccagactttgcccattgtatgccctcctgagggagtttagtttgaacttcaggttaaaatgcttacttctcttaacctctggttattaaaaaaaactggacatatagttacacattgaggactactctccccaaatattggggaaaacatgtagcagaatct

SEQ ID NO: 300983 - DNA, 1246 bp, Homo sapiens
cccagggcacagaggccaggatctcacgcgcgaccgcacgaggccgggaccctccctccccttccgtccactcccttccccaccgcctccggtcccctcccggtctccgccaccccgcttcggggcccccgccccccagccgggcagccaatcggagctgggatcccgccccggtccgcaaagccggtggcgcccggaggctgcacggagagcggtgcccgcgtcagtgaccgaaggaagagaccaagatgaatacagagcccgagaggaagtttggcgtggtggtggttggtgttggccgagccggctccgtgcggatgagggacttgcggaatccacacccttcctcagcgttcctgaacctgattggcttcgtgtcgagaagggagctcgggagcattgatggagtccagcagatttctttggaggatgctctttccagccaagaggtggaggtcgcctatatctgcagtgagagctccagccatgaggactacatcaggcagttccttaatgctggcaagcacgtccttgtggaataccccatgacactgtcattggcggccgctcaggaactgtgggagctggctgagcagaaaggaaaagtcttgcacgaggagcatgttgaactcttgatggaggaattcgctttcctgaaaaaagaagtggtggggaaagacctgctgaaagggtcgctcctcttcacagctggcccgttggaagaagagcggtttggcttccctgcattcagcggcatctctcgcctgacctggctggtctccctctttggggagctttctcttgtgtctgccactttggaagagcgaaaggaagatcagtatatgaaaatgacagtgtgtctggagacagagaagaaaagtccactgtcatggattgaagaaaaaggacctggtctaaaacgaaacagatatttaagcttccatttcaagtctgggtccttggagaatgtgccaaatgtaggagtgaataagaacatatttctgaaagatcaaaatatatttgtccagaaactcttgggccagttctctgagaaggaactggctgctgaaaagaaacgcatcctgcactgcctggggcttgcagaagaaatccagaaatattgctgttcaaggaagtaagaggaggaggtgatgtagcacttccaagatggcaccagcatttggttcttctcaagagttgaccattatctctattcttaaaattaaacatgttggggaaacaagaa

SEQ ID NO: 300984 - DNA, 707 bp, Homo sapiens
gccttacacagcagtgcagtactgcaaggactgcctgtgtggaaaacccacctgatggttttccacacaggcagtccttgccttacacagcagtgcagtactgcaaaaatgagcaagcaagctaaaacaccctgcaaaggagtcagaagagccagtgagaaaattacaattgctctgtgaccaatcacagaagtgtcaaaacattaagaaattcttattgctggttataaatatataaggaagtgaaaaatagtaaaattaatatttagtatgtgtaatttgaaacattagaaacattcagaattaaagtgttttatttctctgtaaaaacccatcgagagtagttttcaacagtagtggcctccttcttctcaccagacagtttaggatgtggagccggcatccttggcaaattatcatactcccttctcagtttggatcagcttccaacgttttctcctttgtgctttcaatgtcataaaataacggttgagttcctttaaccctcaggacctggcagctaacagggaagtgccagctgccttcctcagtctagcttccttctaggttcttacagctgctcccaccatgctgtttcccacgggtaagatgcttcctctttatcagtctagctctagagtagacaaaaacacctctccttggctttccttaaccttttctggcaccagagtgtatttccttaagaa

SEQ ID NO: 300985 - DNA, 1340 bp, Homo sapiens
cccagggcacagaggccaggatctcacgcgcgaccgcacgaggccgggaccctccctccccttccgtccactcccttccccaccgcctccggtcccctcccggtctccgccaccccgcttcggggcccccgccccccagccgggcagccaatcggagctgggatcccgccccggtccgcaaagccggtggcgcccggaggctgcacggagagcggtgcccgcgtcagagcctcgccctgtcaccaggctggagtacagtggcgcgatctcggctcactgcaacttccacctgctgggttcaagcaattcttctgacctcagtgaccgaaggaagagaccaagatgaatacagagcccgagaggaagtttggcgtggtggtggttggtgttggccgagccggctccgtgcggatgagggacttgcggaatccacacccttcctcagcgttcctgaacctgattggcttcgtgtcgagaagggagctcgggagcattgatggagtccagcagatttctttggaggatgctctttccagccaagaggtggaggtcgcctatatctgcagtgagagctccagccatgaggactacatcaggcagttccttaatgctggcaagcacgtccttgtggaataccccatgacactgtcattggcggccgctcaggaactgtgggagctggctgagcagaaaggaaaagtcttgcacgaggagcatgttgaactcttgatggaggaattcgctttcctgaaaaaagaagtggtggggaaagacctgctgaaagggtcgctcctcttcacagctggcccgttggaagaagagcggtttggcttccctgcattcagcggcatctctcgcctgacctggctggtctccctctttggggagctttctcttgtgtctgccactttggaagagcgaaaggaagatcagtatatgaaaatgacagtgtgtctggagacagagaagaaaagtccactgtcatggattgaagaaaaaggacctggtctaaaacgaaacagatatttaagcttccatttcaagtctgggtccttggagaatgtgccaaatgtaggagtgaataagaacatatttctgaaagatcaaaatatatttgtccagaaactcttgggccagttctctgagaaggaactggctgctgaaaagaaacgcatcctgcactgcctggggcttgcagaagaaatccagaaatattgctgttcaaggaagtaagaggaggaggtgatgtagcacttccaagatggcaccagcatttggttcttctcaagagttgaccattatctctattcttaaaattaaacatgttggggaaacaagaa

SEQ ID NO: 300986 - DNA, 1418 bp, Homo sapiens
tcccatgcttataaatatttgtactctggtatccacagaatgaaatctgaactgctgagcacagaattgtaggtccttcacagtcaggcccccagctacttttccaacgttattatcctccacggcctgtagtccactcccctgccacactgaagtttgccgattgaacaaagccccacaaatgcccaagcccctgcatacgctgctcacagtgaaatatactcacatgttgcacctggaaaatgtctgctcatactttgagacccagttcataggtccttagtgaaatcttttcagactgcctcaggcaaagctagccgctgtgggttttgtagcctttatagctaccatgtggtgataggaaatttatttgttaatgtgtctttatttctcctccacagtaattggtaaatagtacttagttgaataaatgaatggttgaatgttcaaattaacacataaccagaaagttgatctgtcacaggatagtagaaaacaatgtgggatacagttcttcctccatatcccgtggcactgactcctacccccagtcatgacacattcacacacagaaactctcatgcctttataacattctgttctctattatgcagagcatttcagtgaagcttattcgaagtgttctttctctgtatttgtctcgtttaccaaaggcagttccttaatgctggcaagcacgtccttgtggaataccccatgacactgtcattggcggccgctcaggaactgtgggagctggctgagcagaaaggaaaagtcttgcacgaggagcatgttgaactcttgatggaggaattcgctttcctgaaaaaagaagtggtggggaaagacctgctgaaagggtcgctcctcttcacagctggcccgttggaagaagagcggtttggcttccctgcattcagcggcatctctcgcctgacctggctggtctccctctttggggagctttctcttgtgtctgccactttggaagagcgaaaggaagatcagtatatgaaaatgacagtgtgtctggagacagagaagaaaagtccactgtcatggattgaagaaaaaggacctggtctaaaacgaaacagatatttaagcttccatttcaagtctgggtccttggagaatgtgccaaatgtaggagtgaataagaacatatttctgaaagatcaaaatatatttgtccagaaactcttgggccagttctctgagaaggaactggctgctgaaaagaaacgcatcctgcactgcctggggcttgcagaagaaatccagaaatattgctgttcaaggaagtaagaggaggaggtgatgtagcacttccaagatggcaccagcatttggttcttctcaagagttgaccattatctctattcttaaaattaaacatgttggggaaacaagaa

SEQ ID NO: 300987 - DNA, 1153 bp, Homo sapiens
cccagggcacagaggccaggatctcacgcgcgaccgcacgaggccgggaccctccctccccttccgtccactcccttccccaccgcctccggtcccctcccggtctccgccaccccgcttcggggcccccgccccccagccgggcagccaatcggagctgggatcccgccccggtccgcaaagccggtggcgcccggaggctgcacggagagcggtgcccgcgtcagtgaccgaaggaagagaccaagatgaatacagagcccgagaggaagtttggcgtggtggtggttggtgttggccgagccggctccgtgcggatgagggacttgcggaatccacacccttcctcagcgttcctgaacctgattggcttcgtgtcgagaagggagctcgggagcattgatggagtccagcagatttctttggaggatgctctttccagccaagaggtggaggtcgcctatatctgcagtgagagctccagccatgaggactacatcagggttttccacacaggcagtccttgccttacacagcagtgcagtactgcaaaaatgagcaagcaagctaaaacaccctgcaaaggagtcagaagagccagtgagaaaattacaattgctctgtgaccaatcacagaagtgtcaaaacattaagaaattcttattgctggttataaatatataaggaagtgaaaaatagtaaaattaatatttagtatgtgtaatttgaaacattagaaacattcagaattaaagtgttttatttctctgtaaaaacccatcgagagtagttttcaacagtagtggcctccttcttctcaccagacagtttaggatgtggagccggcatccttggcaaattatcatactcccttctcagtttggatcagcttccaacgttttctcctttgtgctttcaatgtcataaaataacggttgagttcctttaaccctcaggacctggcagctaacagggaagtgccagctgccttcctcagtctagcttccttctaggttcttacagctgctcccaccatgctgtttcccacgggtaagatgcttcctctttatcagtctagctctagagtagacaaaaacacctctccttggctttccttaaccttttctggcaccagagtgtatttccttaagaa

SEQ ID NO: 300988 - DNA, 330 bp, Homo sapiens
caagcacccacttgtgctcttgtgtaatctctaacatgattcttttgtcttttgtctttgcagtccactgtcatggattgaagaaaaaggacctggtctaaaacgaaacagatatttaagcttccatttcaagtctgggtccttggagaatgtgccaaatgtaggagtgaataagaacatatttctgaaagatcaaaatatatttgtccagaaactcttgggccagttctctgagaaggaactggctgctgaaaagaaacgcatcctgcactgcctggggcttgcagaagaaatccagaaatattgctgttcaaggaagtaagaggagga

SEQ ID NO: 300989 - DNA, 608 bp, Homo sapiens
ccagaatgttgacagtcgctctcctagcccttctctgtgcctcagcctctggcaatgccattcaggccaggtcttcctcctatagtggagagtatggaagtggtggtggaaagcgattctctcattctggcaaccagttggacggccccatcaccgccctccgggtccgagtcaacacatactacatcgtaggtcttcaggtgcgctatggcaaggtgtggagcgactatgtgggtggtcgcaacggagacctggaggagatctttctgcaccctggggaatcagtgatccaggtttctgggaagtacaagtggtacctgaagaagctggtatttgtgacagacaagggccgctatctgtcttttgggaaagacagtggcacaagtttcaatgccgtccccttgcaccccaacaccgtgctccgcttcatcagtggccggtctggttctctcatcgatgccattggcctgcactgggatgtttaccccactagctgcagcagatgctgagcctcctctccttggcaggggcactgtgatgaggagtaagaactcccttatcactaacccccatccaaatggctcaataaaaaaatatggttaaggcta

SEQ ID NO: 300990 - DNA, 668 bp, Homo sapiens
tccaactcctgcttgcccctccagttcaggccaggtcttcctcctatagtggagagtatggaagtggtggtggaaagcgattctctcattctggcaaccagttggacggccccatcaccgccctccgggtccgagtcaacacatactacatcgtagggtaagattctttgaattcctggctgggcgcggtggctcacatctgtcattacaatgctttgggaggcagaggcagatcgcttgaggccaggagttctagctcagcctgggcaagatgccagggatgccagggatttaaaccatgctccaggtaccaagaccccatctctaccgaagaaaaacaaaaaaattagccaggcatggtggtgagtacctgtagcctcaactactcaggagggagaggcgggaggattgcctgagcccaggatgttgaggctgcagtgagccaagatcatgccactgcactccagcctgggtgacagagtctctttgttggcaaaatgagttgaagttccctgtaggatcttccagggttcacccaggcttcacagtctgtaggactagccagagacctctcatccctatcatcacctttctttctccttccttcctcccctcttcctcagtcttcaggtgcgctatggcaaggtgtggagcgactatgtgggtgg

SEQ ID NO: 300991 - DNA, 2989 bp, Homo sapiens
cgtagtgatgcgacggggaaattcaaacgtgtttgcggaaaggagtttgggttccatcttttcatttccccagcgcagctttctgtagaaatggaatccgaggatttaagtggcagagaattgacaattgattccataatgaacaaagtgagagacattaaaaataagtttaaaaatgaagaccttactgatgaactaagcttgaataaaatttctgctgatactacagataactcgggaactgttaaccaaattatgatgatggcaaacaacccagaggactggttgagtttgttgctcaaactagagaaaaacagtgttccgctaagtgatgctcttttaaataaattgattggtcgttacagtcaagcaattgaagcgcttcccccagataaatatggccaaaatgagagttttgctagaattcaagtgagatttgctgaattaaaagctattcaagagccagatgatgcacgtgactactttcaaatggccagagcaaactgcaagaaatttgcttttgttcatatatcttttgcacaatttgaactgtcacaaggtaatgtcaaaaaaagtaaacaacttcttcaaaaagctgtagaacgtggagcagtaccactagaaatgctggaaattgccctgcggaatttaaacctccaaaaaaagcagctgctttcagaggaggaaaagaagaatttatcagcatctacggtattaactgcccaagaatcattttccggttcacttgggcatttacagaataggaacaacagttgtgattccagaggacagactactaaagccaggtttttatatggagagaacatgccaccacaagatgcagaaataggttaccggaattcattgagacaaactaacaaaactaaacagtcatgcccatttggaagagtcccagttaaccttctaaatagcccagattgtgatgtgaagacagatgattcagttgtaccttgttttatgaaaagacaaacctctagatcagaatgccgagatttggttgtgcctggatctaaaccaagtggaaatgattcctgtgaattaagaaatttaaagtctgttcaaaatagtcatttcaaggaacctctggtgtcagatgaaaagagttctgaacttattattactgattcaataaccctgaagaataaaacggaatcaagtcttctagctaaattagaagaaactaaagagtatcaagaaccagaggttccagagagtaaccagaaacagtggcaatctaagagaaagtcagagtgtattaaccagaatcctgctgcatcttcaaatcactggcagattccggagttagcccgaaaagttaatacagagcagaaacataccacttttgagcaacctgtcttttcagtttcaaaacagtcaccaccaatatcaacatctaaatggtttgacccaaaatctatttgtaagacaccaagcagcaataccttggatgattacatgagctgttttagaactccagttgtaaagaatgactttccacctgcttgtcagttgtcaacaccttatggccaacctgcctgtttccagcagcaacagcatcaaatacttgccactccacttcaaaatttacaggttttagcatcttcttcagcaaatgaatgcatttcggttaaaggaagaatttattccatattaaagcagataggaagtggaggttcaagcaaggtatttcaggtgttaaatgaaaagaaacagatatatgctataaaatatgtgaacttagaagaagcagataaccaaactcttgatagttaccggaacgaaatagcttatttgaataaactacaacaacacagtgataagatcatccgactttatgattatgaaatcacggaccagtacatctacatggtaatggagtgtggaaatattgatcttaatagttggcttaaaaagaaaaaatccattgatccatgggaacgcaagagttactggaaaaatatgttagaggcagttcacacaatccatcaacatggcattgttcacagtgatcttaaaccagctaactttctgatagttgatggaatgctaaagctaattgattttgggattgcaaaccaaatgcaaccagatacaacaagtgttgttaaagattctcaggttggcacagttaattatatgccaccagaagcaatcaaagatatgtcttcctccagagagaatgggaaatctaagtcaaagataagccccaaaagtgatgtttggtccttaggatgtattttgtactatatgacttacgggaaaacaccatttcagcagataattaatcagatttctaaattacatgccataattgatcctaatcatgaaattgaatttcccgatattccagagaaagatcttcaagatgtgttaaagtgttgtttaaaaagggacccaaaacagaggatatccattcctgagctcctggctcatccatatgttcaaattcaaactcatccagttaaccaaatggccaagggaaccactgaagaaatgaaatatgttctgggccaacttgttggtctgaattctcctaactccattttgaaagctgctaaaactttatatgaacactatagtggtggtgaaagtcataattcttcatcctccaagacttttgaaaaaaaaaggggaaaaaaatgatttgcagttattcgtaatgtcagataccacctataaaatatattggactgttatactcttgaatccctgtggaaatctacatttgaagacaacatcactctgaagtgttatcagcaaaaaaaattcagtagattatctttaaaagaaaactgtaaaaatagcaaccacttatggcactgtatatattgtagacttgttttctctgttttatgctcttgtgtaatctacttgacatcattttactcttggaatagtgggtggatagcaagtatattctaaaaaactttgtaaataaagttttgtggctaaaatgacactaacattt

SEQ ID NO: 300992 - DNA, 984 bp, Homo sapiens
gaattccgcacgtaaaaaggatgcagagacatgtgcatgcgccaaaatttacaggttttagcatcttcttcagcaaatgaatgcatttcggttaaaggaagaatttattccatattaaagcagataggaagtggaggttcaagcaaggtatttcaggtgttaaatgaaaagaaacagatatatgctataaaatatgtgaacttagaagaagcagataaccaaactcttgatagttaccggaacgaaatagcttatttgaataaactacaacaacacagtgataagatcatccgactttatgattatgaaatcacggaccagtacatctacatggtaatggagtgtggaaatattgatcttaatagttggcttaaaaagaaaaaatccattgatccatgggaacgcaagagttactggaaaaatatgttagaggcagttcacacaatccatcaacatggcattgttcacagtgatcttaaaccagctaactttctgatagttgatggaatgctaaagctaattgattttgggattgcaaaccaaatgcaaccagatacaacaagtgttgttaaagattctcaggttggcacagttaattatatgccaccagaagcaatcaaagatatgtcttcctccagagagaatgggaaatctaagtcaaagataagccccaaaagtgatgtttggtccttaggatgtattttgtactatatgacttacgggaaaacaccatttcagcagataattaatcagatttctaaattacatgccataattgatcctaatcatgaaattgaatttcccgatattccagagaaagatcttcaagatgtgttaaagtgttgtttaaaaagggacccaaaacagaggatatccattcctgagctcctggctcatccatatgttcaaattcaaactcatccagttaacaatggcagggaacactgagaatgaattgttggcactgtgttgattctactcatt

SEQ ID NO: 300993 - DNA, 846 bp, Homo sapiens
cgtagtgatgcgacggggaaattcaaacgtgtttgcggaaaggagtttgggttccatcttttcatttccccagcgcagctttctgtagaaatggaatccgaggatttaagtggcagagaattgacaattgattccataatgaacaaagtgagagacattaaaaataagtttaaaaatgaagaccttactgatgaactaagcttgaataaaatttctgctgatactacagataactcgggaactgttaaccaaattatgatgatggcaaacaacccagaggactggttgagtttgttgctcaaactagagaaaaacagtgttccgctaagtgatgctcttttaaataaattgattggtcgttacagtcaagcaattgaagcgcttcccccagataaatatggccaaaatgagagttttgctagaattcaagtgagatttgctgaattaaaagctattcaagagccagatgatgcacgtgactactttcaaatggccagagcaaactgcaagaaatttgcttttgttcatatatcttttgcacaatttgaactgtcacaaggtaatgtcaaaaaaagtaaacaacttcttcaaaaagctgtagaacgtggagcagtaccactagaaatgctggaaattgccctgcggaatttaaacctccaaaaaaagcagctgctttcagaggaggaaaagaagaatttatcagcatcctacgggtattaactggcccaagaactcattttcccggtttcacttgggccttttacagaaatcggcaccaacaggttgttggattcccagaaggaccggactacttaaaagccaggttctatcattgcggcggaacct

SEQ ID NO: 300994 - DNA, 650 bp, Homo sapiens
cgtagtgatgcgacggggaaattcaaacgtgtttgcggaaaggagtttgggttccatcttttcatttccccagcgcagctttctgtagaaatggaatccgaggatttaagtggcagagaattgacaattgattccataatgaacaaagtgagagacattaaaaataagtttaaaaatgaagaccttactgatgaactaagcttgaataaaatttctgctgatactacagataactcgggaactgttaaccaaattatgatgatggcaaacaacccagaggactggttgagtttgttgctcaaactagagaaaaacagtgttccgctaagtgatgctcttttaaataaattgattggtcgttacagtcaagcaattgaagcgcttcccccagataaatatggccaaaatgagagttttgctagaattcaagtgagatttgctgaattaaaagctattcaagagccagatgatgcacgtgactactttcaaatggccagagcaaactgcaagaaatttgcttttgttcatatatcttttgcacaatttgaactgtcacaaggtaatctgaaaatgtcaaattcaaattttaagtaaaggataacttattacaacttacttcctaatattaaatcatatatatgaagtggaaa

SEQ ID NO: 300995 - DNA, 2901 bp, Homo sapiens
cgtagtgatgcgacggggaaattcaaacgtgtttgcggaaaggagtttgggttccatcttttcatttccccagcgcagctttctgtagaaatggaatccgaggatttaagtggcagagaattgacaattgattccataatgaacaaagtgagagacattaaaaataagtttaaaaatgaagaccttactgatgaactaagcttgaataaaatttctgctgatactacagataactcgggaactgttaaccaaattatgatgatggcaaacaacccagaggactggttgagtttgttgctcaaactagagaaaaacagtgttccgctaagtgatgctcttttaaataaattgattggtcgttacagtcaagcaattgaagcgcttcccccagataaatatggccaaaatgagagttttgctagaattcaagtgagatttgctgaattaaaagctattcaagagccagatgatgcacgtgactactttcaaatggccagagcaaactgcaagaaatttgcttttgttcatatatcttttgcacaatttgaactgtcacaaggtaatgtcaaaaaaagtaaacaacttcttcaaaaagctgtagaacgtggagcagtaccactagaaatgctggaaattgccctgcggaatttaaacctccaaaaaaagcagctgctttcagaggaggaaaagaagaatttatcagcatctacggtattaactgcccaagaatcattttccggttcacttgggcatttacagaataggaacaacagttgtgattccagaggacagactactaaagccaggtttttatatggagagaacatgccaccacaagatgcagaaataggttaccggaattcattgagacaaactaacaaaactaaacagtcatgcccatttggaagagtcccagttaaccttctaaatagcccagattgtgatgtgaagacagatgattcagttgtaccttgttttatgaaaagacaaacctctagatcagaatgccgagatttggttgtgcctggatctaaaccaagtggaaatgattcctgtgaattaagaaatttaaagtctgttcaaaatagtcatttcaaggaacctctggtgtcagatgaaaagagttctgaacttattattactgattcaataaccctgaagaataaaacggaatcaagtcttctagctaaattagaagaaactaaagagtatcaagaaccagaggttccagagagtaaccagaaacagtggcaatctaagagaaagtcagagtgtattaaccagaatcctgctgcatcttcaaatcactggcagattccggagttagcccgaaaagttaatacagagcagaaacataccacttttgagcaacctgtcttttcagtttcaaaacagtcaccaccaatatcaacatctaaatggtttgacccaaaatctatttgtaagacaccaagcagcaataccttggatgattacatgagctgttttagaactccagttgtaaagaatgactttccacctgcttgtcagttgtcaacaccttatggccaacctgcctgtttccagcagcaacagcatcaaatacttgccactccacttcaaaatttacaggttttagcatcttcttcagcaaatgaatgcatttcggttaaaggaagaatttattccatattaaagcagataggaagtggaggttcaagcaaggtatttcaggtgttaaatgaaaagaaacagatatatgctataaaatatgtgaacttagaagaagcagataaccaaactcttgatagttaccggaacgaaatagcttatttgaataaactacaacaacacagtgataagatcatccgactttatgattatgaaatcacggaccagtacatctacatggtaatggagtgtggaaatattgatcttaatagttgggcattgttcacagtgatcttaaaccagctaactttctgatagttgatggaatgctaaagctaattgattttgggattgcaaaccaaatgcaaccagatacaacaagtgttgttaaagattctcaggttggcacagttaattatatgccaccagaagcaatcaaagatatgtcttcctccagagagaatgggaaatctaagtcaaagataagccccaaaagtgatgtttggtccttaggatgtattttgtactatatgacttacgggaaaacaccatttcagcagataattaatcagatttctaaattacatgccataattgatcctaatcatgaaattgaatttcccgatattccagagaaagatcttcaagatgtgttaaagtgttgtttaaaaagggacccaaaacagaggatatccattcctgagctcctggctcatccatatgttcaaattcaaactcatccagttaaccaaatggccaagggaaccactgaagaaatgaaatatgttctgggccaacttgttggtctgaattctcctaactccattttgaaagctgctaaaactttatatgaacactatagtggtggtgaaagtcataattcttcatcctccaagacttttgaaaaaaaaaggggaaaaaaatgatttgcagttattcgtaatgtcagataccacctataaaatatattggactgttatactcttgaatccctgtggaaatctacatttgaagacaacatcactctgaagtgttatcagcaaaaaaaattcagtagattatctttaaaagaaaactgtaaaaatagcaaccacttatggcactgtatatattgtagacttgttttctctgttttatgctcttgtgtaatctacttgacatcattttactcttggaatagtgggtggatagcaagtatattctaaaaaactttgtaaataaagttttgtggctaaaatgacactaacattt

SEQ ID NO: 300996 - DNA, 2541 bp, Homo sapiens
cgtagtgatgcgacggggaaattcaaacgtgtttgcggaaaggagtttgggttccatcttttcatttccccagcgcagctttctgtagaaatggaatccgaggatttaagtggcagagaattgacaattgattccataatgaacaaagtgagagacattaaaaataagtttaaaaatgaagaccttactgatgaactaagcttgaataaaatttctgctgatactacagataactcgggaactgttaaccaaattatgatgatggcaaacaacccagaggactggttgagtttgttgctcaaactagagaaaaacagtgttccgctaagtgatgctcttttaaataaattgattggtcgttacagtcaagcaattgaagcgcttcccccagataaatatggccaaaatgagagttttgctagaattcaagtgagatttgctgaattaaaagctattcaagagccagatgatgcacgtgactactttcaaatggccagagcaaactgcaagaaatttgcttttgttcatatatcttttgcacaatttgaactgtcacaaggtaatgtcaaaaaaagtaaacaacttcttcaaaaagctgtagaacgtggagcagtaccactagaaatgctggaaattgccctgcggaatttaaacctccaaaaaaagcagctgctttcagaggaggaaaagaagaatttatcagcatctacggtattaactgcccaagaatcattttccggttcacttgggcatttacagaataggaacaacagttgtgattccagaggacagactactaaagccaggtttttatatggagagaacatgccaccacaagatgcagaaataggttaccggaattcattgagacaaactaacaaaactaaacagtcatgcccatttggaagagtcccagttaaccttctaaatagcccagattgtgatgtgaagacagatgattcagttgtaccttgttttatgaaaagacaaacctctagatcagaatgccgagatttggttgtgcctggatctaaaccaagtggaaatgattcctgtgaattaagaaatttaaagtctgttcaaaatagtcatttcaaggaacctctggtgtcagatgaaaagagttctgaacttattattactgattcaataaccctgaagaataaaacggaatcaagtcttctagctaaattagaagaaactaaagagtatcaagaaccagaggttccagagagtaaccagaaacagtggcaatctaagagaaagtcagagtgtattaaccagaatcctgctgcatcttcaaatcactggcagattccggagttagcccgaaaagttaatacagagcagaaacataccacttttgagcaacctgtcttttcagtttcaaaacagtcaccaccaatatcaacatctaaatggtttgacccaaaatctatttgtaagacaccaagcagcaataccttggatgattacatgagctgttttagaactccagttgtaaagaatgactttccacctgcttgtcagttgtcaacaccttatggccaacctgcctgtttccagcagcaacagcatcaaatacttgccactccacttcaaaatttacaggttttagcatcttcttcagcaaatgaatgcatttcggttaaaggaagaatttattccatattaaagcagataggaagtggaggttcaagcaaggtatttcaggtgttaaatgaaaagaaacagatatatgctataaaatatgtgaacttagaagaagcagataaccaaactcttgatagttaccggaacgaaatagcttatttgaataaactacaacaacacagtgataagatcatccgactttatgattatgaaatcacggaccagtacatctacatggtaatggagtgtggaaatattgatcttaatagttggcttaaaaagaaaaaatccattgatccatgggaacgcaagagttactggaaaaatatgttagaggcagttcacacaatccatcaacatggcattgttcacagtgatcttaaaccagctaactttctgatagttgatggaatgctaaagctaattgattttgggattgcaaaccaaatgcaaccagatacaacaagtgttgttaaagattctcaggttggcacagttaattatatgccaccagaagcaatcaaagatatgtcttcctccagagagaatgggaaatctaagtcaaagataagccccaaaagtgatgtttggtccttaggatgtattttgtactatatgacttacgggaaaacaccatttcagcagataattaatcagatttctaaattacatgccataattgatcctaatcatgaaattgaatttcccgatattccagagaaagatcttcaagatgtgttaaagtgttgtttaaaaagggacccaaaacagaggatatccattcctgagctcctggctcatccatatgttcaaattcaaactcatccagttaacaatggcagggaacactgagaatgaattgttggcactgtgttgattctactcatt

SEQ ID NO: 300997 - DNA, 2379 bp, Homo sapiens
  misc_feature (2325)..(2325): n is a, c, g, or t
  misc_feature (2344)..(2344): n is a, c, g, or t
  misc_feature (2350)..(2350): n is a, c, g, or t
cgtagtgatgcgacggggaaattcaaacgtgtttgcggaaaggagtttgggttccatcttttcatttccccagcgcagctttctgtagaaatggaatccgaggatttaagtggcagagaattgacaattgattccataatgaacaaagtgagagacattaaaaataagtttaaaaatgaagaccttactgatgaactaagcttgaataaaatttctgctgatactacagataactcgggaactgttaaccaaattatgatgatggcaaacaacccagaggactggttgagtttgttgctcaaactagagaaaaacagtgttccgctaagtgatgctcttttaaataaattgattggtcgttacagtcaagcaattgaagcgcttcccccagataaatatggccaaaatgagagttttgctagaattcaagtgagatttgctgaattaaaagctattcaagagccagatgatgcacgtgactactttcaaatggccagagcaaactgcaagaaatttgcttttgttcatatatcttttgcacaatttgaactgtcacaaggtaatgtcaaaaaaagtaaacaacttcttcaaaaagctgtagaacgtggagcagtaccactagaaatgctggaaattgccctgcggaatttaaacctccaaaaaaagcagctgctttcagaggaggaaaagaagaatttatcagcatctacggtattaactgcccaagaatcattttccggttcacttgggcatttacagaataggaacaacagttgtgattccagaggacagactactaaagccaggtttttatatggagagaacatgccaccacaagatgcagaaataggttaccggaattcattgagacaaactaacaaaactaaacagtcatgcccatttggaagagtcccagttaaccttctaaatagcccagattgtgatgtgaagacagatgattcagttgtaccttgttttatgaaaagacaaacctctagatcagaatgccgagatttggttgtgcctggatctaaaccaagtggaaatgattcctgtgaattaagaaatttaaagtctgttcaaaatagtcatttcaaggaacctctggtgtcagatgaaaagagttctgaacttattattactgattcaataaccctgaagaataaaacggaatcaagtcttctagctaaattagaagaaactaaagagtatcaagaaccagaggttccagagagtaaccagaaacagtggcaatctaagagaaagtcagagtgtattaaccagaatcctgctgcatcttcaaatcactggcagattccggagttagcccgaaaagttaatacagagcagaaacataccacttttgagcaacctgtcttttcagtttcaaaacagtcaccaccaatatcaacatctaaatggtttgacccaaaatctatttgtaagacaccaagcagcaataccttggatgattacatgagctgttttagaactccagttgtaaagaatgactttccacctgcttgtcagttgtcaacaccttatggccaacctgcctgtttccagcagcaacagcatcaaatacttgccactccacttcaaaatttacaggttttagcatcttcttcagcaaatgaatgcatttcggttaaaggaagaatttattccatattaaagcagataggaagtggaggttcaagcaaggtatttcaggtgttaaatgaaaagaaacagatatatgctataaaatatgtgaacttagaagaagcagataaccaaactcttgatagttaccggaacgaaatagcttatttgaataaactacaacaacacagtgataagatcatccgactttatgattatgaaatcacggaccagtacatctacatggtaatggagtgtggaaatattgatcttaatagttgggcattgttcacagtgatcttaaaccagctaactttctgatagttgatggaatgctaaagctaattgattttgggattgcaaaccaaatgcaaccagatacaacaagtgttgttaaagattctcaggttggcacagttaattatatgccaccagaagcaatcaaagatatgtcttcctccagagagaatgggaaatctaagtcaaagataagccccaaaagtgatgtttggtccttaggatgtattttgtactatatgacttacgggaaaacaccatttcagcagataattaatcagatttctaaattacatgccataattgatcctaatcatgaaattgaatttcccgatattccagagaaagatcttcaagatgtgttaaagtggttggttaaaaaangggaccccaaaaccagganggattnttccatttccctggagccttcctgggctt

SEQ ID NO: 300998 - DNA, 460 bp, Homo sapiens
gagccgggccgcccgcggctgtttgctgccctccggccggccgcgttatctgggggccagttcggcctcctttccctaggtcttttcggaggcggagtttagtatccaagtccgcgggtgtgagcgcgcgcgtgtgtcggcgcgcctcgcccggcgcccccgccagtcctgccggaagatggtcaacgaccggtggaagaccatgggcggcgctgcccaacttgaggaccggccgcgcgacaagccgcagacaaatcagccccgttgctgagtctccgtttcctcacctctacaatgggcatcttaactacccacagaatctccactctgggcgctaccctgtgccaggcacctggtcctgaacctgaccccctgaatctcctctgcatccttccctttagccagggccctgcatacagtaggggatcaataaagattcatctcctgcaaaaaaaaaaaa

SEQ ID NO: 300999 - DNA, 852 bp, Homo sapiens
acggcgcgcagcgcgagcggcgggcgttgggctggcggctttcgcgctcccgctcctgctcccgcccgcacacagcggcgcgctcatcctcacacgcccgcccgctcccgggccgccccggcgcggggcacagaggcggggacccggcggacagagcgcgccccgcgcccgcgcccgcgcccaccccgtctcctttgcgctccgcagcggcgcgcctcgcccggcgcccccgccagtcctgccggaagatggtcaacgaccggtggaagaccatgggcggcgctgcccaacttgaggaccggccgcgcgacaagccgcagcggccgagctgcggctacgtgctgtgcaccgtgctgctggccctggctgtgctgctggctgtagctgtcaccggtgccgtgctcttcctgaaccacgcccacgcgccgggcacggcgcccccacctgtcgtcagcactggggctgccagcgccaacagcgccctggtcactgtggaaagggcggacagctcgcacctcagcatcctcattgacccgcgctgccccgacctcaccgacagcttcgcacgcctggagagcgcccaggcctcggtgctgcaggcgctgacagagcaccaggcccagccacggctggtgggcgaccaggagcaggagctgctggacacgctggccgaccagctgccccggctgctggcccgagcctcagagctgcagacggagtgcatggggctgcggaaggggcatggcacgctgggccagggcctcagcgccctgcagagtgagcagggccgcctcatccagctggctctctgtcccagtgccaccaggtcatccacatgcgcaaatgtctgca

SEQ ID NO: 301000 - DNA, 2767 bp, Homo sapiens
gagccgggccgcccgcggctgtttgctgccctccggccggccgcgttatctgggggccagttcggcctcctttccctaggtcttttcggaggcggagtttagtatccaagtccgcgggtgtgagcgcgcgcgtgtgtcggcgcgcctcgcccggcgcccccgccagtcctgccggaagatggtcaacgaccggtggaagaccatgggcggcgctgcccaacttgaggaccggccgcgcgacaagccgcagcggccgagctgcggctacgtgctgtgcaccgtgctgctggccctggctgtgctgctggctgtagctgtcaccggtgccgtgctcttcctgaaccacgcccacgcgccgggcacggcgcccccacctgtcgtcagcactggggctgccagcgccaacagcgccctggtcactgtggaaagggcggacagctcgcacctcagcatcctcattgacccgcgctgccccgacctcaccgacagcttcgcacgcctggagagcgcccaggcctcggtgctgcaggcgctgacagagcaccaggcccagccacggctggtgggcgaccaggagcaggagctgctggacacgctggccgaccagctgccccggctgctggcccgagcctcagagctgcagacggagtgcatggggctgcggaaggggcatggcacgctgggccagggcctcagcgccctgcagagtgagcagggccgcctcatccagcttctctctgagagccagggccacatggctcacctggtgaactccgtcagcgacatcctggatgccctgcagagggaccgggggctgggccggccccgcaacaaggccgaccttcagagagcgcctgcccggggaacccggccccggggctgtgccactggctcccggccccgagactgtctggacgtcctcctaagcggacagcaggacgatggcgtctactctgtctttcccacccactacccggccggcttccaggtgtactgtgacatgcgcacggacggcggcggctggacggtgtttcagcgccgggaggacggctccgtgaacttcttccggggctgggatgcgtaccgagacggctttggcaggctcaccggggagcactggctaggaccgctagaccggtgcaccttgtccttggccctgctggtccctgtcgccccatccccgaccccacctcactctttcgtgaatgttctccacccacctgtgcctggcggacccactctccagtagggaggggccgggccatccctgacacgaagctccctgggccggtgaagtcacacatcgccttctcgccgtccccaccccctccatttggcagctcactgatctcttgcctctgctgatgggggctggcaaacttgacgaccccaactcctgcctgcccccaccgtgactccggtgctgtttgccgtcccctggccaggatggtggagtctgccccaggcaccctctgccctgcccggccaaatacccggcattatggggacagagagcagggggcagacagcacccctggagtcctcctagcagatcgtggggaacgtcaggtctctctgaggtcaggtctgaggccagtatcctccagccctcccaatgccaacccccaccccgtttccctggtgcccagagaacccacctctcccccaagggcctcagcctggctgtgggctgggtggccccatcctaccaggccctgaggtcaggatggggagctgctgcctttggggacccacgctccaaggctgagaccagttccctggaggccacccaccctgtgccccggcaggcctggggtctgcagtcctcttacctgctgtgcccacctgctctctgtctcaaatgaggcccaacccatcccccacccagctcccggccgtcctcctacctggggcagctggggctgccatcccatttctcctgcctctggaaggtgggtggggccctgcaccgtggggctggactgcgctaatgggaagctcttggttttctgggctggggcctaggcagggctgggatgaggcttgtacaacccccaccaccaatttcccagggactccagggtcctgaggcctcccaggagggccttgggggtgatgaccccttccctgaggtggctgtctccatgaggaggccaacccttgccattgaccgtggccacctggacccaggccaggcccggcccggcgagtggtcaagggacagggaccacctcaccgggcaaatggggtcggggggactggggcaccagaccaggcaccacctggacactttcttgttgaatcctcccaacacccagcacgctgtcatccccactccttgtgtgcacacatgcagaggtgagacccgcaggctcccaggaccagcagccacaagggcagggctggagccgggtcctcagctgtctgctcagcagccctggacccgcgtgcgttacgtcaggcccagatgcagggcggcttttccaaggcctcctgatggggggcctccgaaagggctggagtcagccttggggagctgcctagcagcctctcctcgggcaggaggggaggtggcttcctccaaaggacacccgatggcaggtgcctagggggtgtggggttccgttctcccttcccctcccactgaagtttgtgcttaaaaaacaataaatttgacttggcaccactgggggttggtgggagaggccgtgtgacctggctctctgtcccagtgccaccaggtcatccacatgcgcaaatgtctgca

SEQ ID NO: 301001 - DNA, 2059 bp, Homo sapiens
acgccctgaccacacaggctgcctacgagctgcacgtggacctggaggactttgagaatggcacggcctatgcccgctacgggagcttcggcgtgggcttgttctccgtggaccctgaggaagacgggtacccgctcaccgtggctgactattccggcactgcaggcgactccctcctgaagcacagcggcatgaggttcaccaccaaggaccgtgacagcgaccattcagagaacaactgtgccgccttctaccgcggtgcctggtggtaccgcaactgccacacgtccaacctcaatgggcagtacctgcgcggtgcgcacgcctcctatgccgacggcgtggagtggtcctcctggaccggctggcagtactcactcaagttctctgagatgaagatccggccggtccgggaggaccgctagaccggtgcaccttgtccttggccctgctggtccctgtcgccccatccccgaccccacctcactctttcgtgaatgttctccacccacctgtgcctggcggacccactctccagtagggaggggccgggccatccctgacacgaagctccctgggccggtgaagtcacacatcgccttctcgccgtccccaccccctccatttggcagctcactgatctcttgcctctgctgatgggggctggcaaacttgacgaccccaactcctgcctgcccccaccgtgactccggtgctgtttgccgtcccctggccaggatggtggagtctgccccaggcaccctctgccctgcccggccaaatacccggcattatggggacagagagcagggggcagacagcacccctggagtcctcctagcagatcgtggggaacgtcaggtctctctgaggtcaggtctgaggccagtatcctccagccctcccaatgccaacccccaccccgtttccctggtgcccagagaacccacctctcccccaagggcctcagcctggctgtgggctgggtggccccatcctaccaggccctgaggtcaggatggggagctgctgcctttggggacccacgctccaaggctgagaccagttccctggaggccacccaccctgtgccccggcaggcctggggtctgcagtcctcttacctgctgtgcccacctgctctctgtctcaaatgaggcccaacccatcccccacccagctcccggccgtcctcctacctggggcagctggggctgccatcccatttctcctgcctctggaaggtgggtggggccctgcaccgtggggctggactgcgctaatgggaagctcttggttttctgggctggggcctaggcagggctgggatgaggcttgtacaacccccaccaccaatttcccagggactccagggtcctgaggcctcccaggagggccttgggggtgatgaccccttccctgaggtggctgtctccatgaggaggccaacccttgccattgaccgtggccacctggacccaggccaggcccggcccggcgagtggtcaagggacagggaccacctcaccgggcaaatggggtcggggggactggggcaccagaccaggcaccacctggacactttcttgttgaatcctcccaacacccagcacgctgtcatccccactccttgtgtgcacacatgcagaggtgagacccgcaggctcccaggaccagcagccacaagggcagggctggagccgggtcctcagctgtctgctcagcagccctggacccgcgtgcgttacgtcaggcccagatgcagggcggcttttccaaggcctcctgatggggggcctccgaaagggctggagtcagccttggggagctgcctagcagcctctcctcgggcaggaggggaggtggcttcctccaaaggacacccgatggcaggtgcctagggggtgtggggttccgttctcccttcccctcccactgaagtttgtgcttaaaaaacaataaatttgacttggcaccactgggggttggtgggagaggccgtgtgacctggctctctgtcccagtgccaccaggtcatccacatgcgcaaatgtctgca

SEQ ID NO: 301002 - DNA, 986 bp, Homo sapiens
  misc_feature (1)..(1): n is a, c, g, or t
  misc_feature (38)..(38): n is a, c, g, or t
ntcatgcgtgactgactctcttacctaccaccgctacngaggaaggcatcaaccacgagtgtaagctgtgcaaccagatgttcgactccccggccaagctcctctgtcacctcattgagcacagcttcgagggcatgggcggcaccttcaaatgccccgtgtgtttcacagtcttcgtccaggccaacaagttgcagcagcacatctttgccgtgcacgggcaggaggacaagatctacgactgctcacagtgccctcagaagttcttcttccagaccgagctgcagaaccacacgatgagccagcacgcacagtgagggatcgctcaacaggacacctctccgcagaaggcttgccggagacgccgtggggagggccatttgaacattacatccaatcaaagtgtcatttgcaacccagatgtaaaactctaatgatttggccatgaggcgctgctattataagcagctggaaatgaatattaatggcagagattaaaagtattccatgctcagtattttttattgtcctgctacagctagtgtgcttttagactttccgccgcagactacatttctagagttagagaaacctgctttttaaggctattgtcctttgttccttcatgtattatattgatagtttttaaaaaagaattagtgtgattttttttctttgcttcttttttttctttcttgtttttcttcccccccacccccccacccccttcggttaactactttttaattgcaattctaggtaattgtgcatcgtgatgtgattgcttggctattgtctgaatatttccttttaattttttaattaaagactaatgctttgattggatttgccagttcaccggacagtgattaaaactatgtaatgaatataatcggtttcagtgcaactggatggtctgcttttaaatgtgacttaatctgactgcagtaactagtacagttcaataaagggaatccatgcgatta

SEQ ID NO: 301003 - DNA, 481 bp, Homo sapiens
aggcccatctctgttctctctttcagttgaagagggggaggcctcagacttctcgctggcctgggattcctccgtgacagcagcaggaggcctagaaggagagccagagtgcgatcagaaaaccagccgtgcgctggaagacaggaacagcgtgacaagtcaagaggagagaaatgaggatgatgaagacatggaggatgaatcaatttacacctgcgatcactgtcagcaggacttcgagtctctggcagacctgacggaccaccgggcccaccgctgtcctggaggtaatgcaaaacagccccaggactctgacaggtggttacacgggtaattggacatagcaacagcttgaagcctcaagtgagattaaagaattaataatgtaattttacagttaatgtcattttattgtggtgtcttgggtaccctgtatccgccttttaaatacaattaaaaataaaagcaacagctttccggc

SEQ ID NO: 301004 - DNA, 4534 bp, Homo sapiens
aggcccatctctgttctctctttcagttgaagagggggaggcctcagacttctcgctggcctgggattcctccgtgacagcagcaggaggcctagaaggagagccagagtgcgatcagaaaaccagccgtgcgctggaagacaggaacagcgtgacaagtcaagaggagagaaatgaggatgatgaagacatggaggatgaatcaatttacacctgcgatcactgtcagcaggacttcgagtctctggcagacctgacggaccaccgggcccaccgctgtcctggagatggtgatgacgacccacaactctcctgggtggcctcgtctccctccagcaaggatgttgcgtcacccacgcagatgatcggagatggttgtgacctcggcctcggcgaggaggaagggggcacgggcctgccatacccttgccagttctgcgacaagtccttcatccgcttgagctacttgaagaggcacgagcagatccacagcgacaagctgccgttcaagtgcacctactgcagccgcctcttcaagcacaagaggagccgcgaccggcacatcaagctgcatacgggcgacaagaagtatcactgccacgagtgcgaggcagccttctcccgcagcgaccacctcaagatccacctgaagacccacagctccagcaagcccttcaagtgcactgtgtgcaagcgcggcttctcctccaccagctcgctgcagagccacatgcaggcccacaaaaagaacaaggagcatctggccaagtcggagaaggaagccaagaaggacgacttcatgtgcgactactgcgaggacaccttcagccagacggaggagctggagaagcacgtgctcacccgccacccgcagctgtccgagaaggcggacctgcagtgcattcactgccctgaggtcttcgtcgacgagaacacactgctcgcccatatccaccaagcccacgccaaccagaaacacaagtgccccatgtgccctgagcagttctcctcagtggaaggtgtctactgccacctggacagccaccggcagcccgactccagcaaccacagtgtcagtcccgaccctgtactgggcagcgtggcctccatgagcagcgccacacccgactccagcgcctctgtggagcgtggctccaccccggactccaccttgaagccgctgcgggggcagaagaagatgcgggatgacgggcagggctggaccaaggtggtctatagctgcccctattgttccaagcgggactttaacagcctggccgtgctggagatccacctgaagaccatccacgcggacaagccccagcagagccacacatgtcagatctgcctggactccatgcccaccctctacaacctcaacgagcacgttcgcaagctgcacaagaaccatgcctaccctgtgatgcagtttggcaacatctctgccttccactgcaactactgccccgagatgttcgccgacatcaatagcctgcaggagcacatccgcgtctcccactgcggccccaacgccaacccctctgacggtaataatgctttcttctgcaaccagtgctccatgggtttccttactgagtcctccctcaccgagcacatccagcaggcccactgcagtgtgggcagtgccaaactagagtctccggtggtgcagcccacgcagtccttcatggaggtctattcctgcccctactgcaccaactcccccatctttggctccatcctgaaactcaccaagcacatcaaggagaaccacaagaacattccactggcccacagcaagaagtccaaggccgagcagagcccagtctcgtccgatgtggaggtgtcttccccgaagcggcagcggctctcagcaagcgccaactccatctccaatggggagtatccttgcaatcaatgcgacctcaagttctccaactttgagagcttccagacccacctgaagctgcacctggagctgctgctgcggaagcaagcgtgcccccagtgcaaagaggactttgactcccaggagtccctcctgcagcacctgacagtgcattacatgaccacgtcgacccactatgtgtgcgagagctgcgacaagcaattttcctcggtggatgacctgcagaagcacctgctggacatgcacacctttgtgttgtaccactgcaccctgtgtcaggaggtcttcgactccaaggtgtccatccaggtgcacctggcggtgaagcacagcaatgagaagaagatgtaccgctgcacggcctgcaactgggacttccgcaaggaggctgacctgcaggtgcacgtcaaacacagccacctgggcaacccggccaaggctcacaagtgcatcttctgtggggagaccttcagcaccgaggtggagctgcagtgccacatcaccacacacagcaagaagtataactgtaagttctgcagcaaggccttccacgccatcatcctgctggagaagcacctgcgggagaagcactgtgtgtttgatgctgcgaccgagaacggcacggccaatggggtacccccaatggccaccaagaaagctgagcctgctgacctgcagggcatgctgcttaagaaccctgaggcacctaacagccatgaggccagcgaggatgacgtggacgcgtcggagcccatgtacggctgtgacatctgcggggcggcctacaccatggaggtgctgctgcagaatcaccggctgcgggaccacaatatccggccgggcgaggatgatggctcacgcaagaaggctgagtttatcaagggcagtcacaagtgcaacgtttgttcacggactttcttctcggagaacgggctacgggagcacctgcagacgcaccggggccctgccaagcactacatgtgtcccatctgtggtgagcgcttcccttcgctgctgacgctcaccgaacacaaggtgacccacagcaagagcctggacacgggcacctgtcgcatctgcaagatgcccctgcagagcgaggaggagtttattgagcactgccagatgcaccctgacctgcgcaactcactcacgggcttccgctgtgtggtctgcatgcagacagtcacttccacgcttgagctcaagatccatggcaccttccacatgcagaagctggcgggcagctcagcggcgtcctcccccaatggccaggggctgcagaagctctacaagtgcgccctgtgcctcaaggagttccgcagcaagcaggacctggtgaagcttgacgtcaatgggctgccctacggcctctgcgccggctgcatggcccgcagcgccaacggacaggtgggtggcctggccccgcccgagcccgccgaccggccctgtgccggcctccgttgccccgagtgcagtgtcaagtttgagagtgccgaagacctggagagccacatgcaggtggaccaccgtgacctcacgccggagaccagtgggccccggaaaggcacccagacatcgccagtgccccggaaaaagacataccagtgcatcaagtgccagatgaccttcgagaacgagagagagatccaaatccacgttgccaaccacatgattgaggaaggcatcaaccacgagtgtaagctgtgcaaccagatgttcgactccccggccaagctcctctgtcacctcattgagcacagcttcgagggcatgggcggcaccttcaaatgccccgtgtgtttcacagtcttcgtccaggccaacaagttgcagcagcacatctttgccgtgcacgggcaggaggacaagatctacgactgctcacagtgccctcagaagttcttcttccagaccgagctgcagaaccacacgatgagccagcacgcacagtgagggatcgctcaacaggacacctctccgcagaaggcttgccggagacgccgtggggagggccatttgaacattacatccaatcaaagtgtcatttgcaacccagatgtaaaactctaatgatttggccatgaggcgctgctattataagcagctggaaatgaatattaatggcagagattaaaagtattccatgctcagtattttttattgtcctgctacagctagtgtgcttttagactttccgccgcagactacatttctagagttagagaaacctgctttttaaggctattgtcctttgttccttcatgtattatattgatagtttttaaaaaagaattagtgtgattttttttctttgcttcttttttttctttcttgtttttcttcccccccacccccccacccccttcggttaactactttttaattgcaattctaggtaattgtgcatcgtgatgtgattgcttggctattgtctgaatatttccttttaattttttaattaaagactaatgctttgattggatttgccagttcaccggacagtgattaaaactatgtaatgaatataatcggtttcagtgcaactggatggtctgcttttaaatgtgacttaatctgactgcagtaactagtacagttcaataaagggaatccatgcgatta

SEQ ID NO: 301005 - DNA, 4418 bp, Homo sapiens
aggcccatctctgttctctctttcagttgaagagggggaggcctcagacttctcgctggcctgggattcctccgtgacagcagcaggaggcctagaaggagagccagagtgcgatcagaaaaccagccgtgcgctggaagacaggaacagcgtgacaagtcaagaggagagaaatgaggatgatgaagacatggaggatgaatcaatttacacctgcgatcactgtcagcaggacttcgagtctctggcagacctgacggaccaccgggcccaccgctgtcctggagatggtgatgacgacccacaactctcctgggtggcctcgtctccctccagcaaggatgttgcgtcacccacgcagatgatcggagatggttgtgacctcggcctcggcgaggaggaagggggcacgggcctgccatacccttgccagttctgcgacaagtccttcatccgcttgagctacttgaagaggcacgagcagatccacagcgacaagctgccgttcaagtgcacctactgcagccgcctcttcaagcacaagaggagccgcgaccggcacatcaagctgcatacgggcgacaagaagtatcactgccacgagtgcgaggcagccttctcccgcagcgaccacctcaagatccacctgaagacccacagctccagcaagcccttcaagtgcactgtgtgcaagcgcggcttctcctccaccagctcgctgcagagccacatgcaggcccacaaaaagaacaaggagcatctggccaagtcggagaaggaagccaagaaggacgacttcatgtgcgactactgcgaggacaccttcagccagacggaggagctggagaagcacgtgctcacccgccacccgcagctgtccgagaaggcggacctgcagtgcattcactgccctgaggtcttcgtcgacgagaacacactgctcgcccatatccaccaagcccacgccaaccagaaacacaagtgccccatgtgccctgagcagttctcctcagtggaaggtgtctactgccacctggacagccaccggcagcccgactccagcaaccacagtgtcagtcccgaccctgtactgggcagcgtggcctccatgagcagcgccacacccgactccagcgcctctgtggagcgtggctccaccccggactccaccttgaagccgctgcgggggcagaagaagatgcgggatgacgggcagggctggaccaaggtggtctatagctgcccctattgttccaagcgggactttaacagcctggccgtgctggagatccacctgaagaccatccacgcggacaagccccagcagagccacacatgtcagatctgcctggactccatgcccaccctctacaacctcaacgagcacgttcgcaagctgcacaagaaccatgcctaccctgtgatgcagtttggcaacatctctgccttccactgcaactactgccccgagatgttcgccgacatcaatagcctgcaggagcacatccgcgtctcccactgcggccccaacgccaacccctctgacggtaataatgctttcttctgcaaccagtgctccatgggtttccttactgagtcctccctcaccgagcacatccagcaggcccactgcagtgtgggcagtgccaaactagagtctccggtggtgcagcccacgcagtccttcatggaggtctattcctgcccctactgcaccaactcccccatctttggctccatcctgaaactcaccaagcacatcaaggagaaccacaagaacattccactggcccacagcaagaagtccaaggccgagcagagcccagtctcgtccgatgtggaggtgtcttccccgaagcggcagcggctctcagcaagcgccaactccatctccaatggggagtatccttgcaatcaatgcgacctcaagttctccaactttgagagcttccagacccacctgaagctgcacctggagctgctgctgcggaagcaagcgtgcccccagtgcaaagaggactttgactcccaggagtccctcctgcagcacctgacagtgcattacatgaccacgtcgacccactatgtgtgcgagagctgcgacaagcaattttcctcggtggatgacctgcagaagcacctgctggacatgcacacctttgtgttgtaccactgcaccctgtgtcaggaggtcttcgactccaaggtgtccatccaggtgcacctggcggtgaagcacagcaatgagaagaagatgtaccgctgcacggcctgcaactgggacttccgcaaggaggctgacctgcaggtgcacgtcaaacacagccacctgggcaacccggccaaggctcacaagtgcatcttctgtggggagaccttcagcaccgaggtggagctgcagtgccacatcaccacacacagcaagaagtataactgtaagttctgcagcaaggccttccacgccatcatcctgctggagaagcacctgcgggagaagcactgtgtgtttgatgctgcgaccgagaacggcacggccaatggggtacccccaatggccaccaagaaagctgagcctgctgacctgcagggcatgctgcttaagaaccctgaggcacctaacagccatgaggccagcgaggatgacgtggacgcgtcggagcccatgtacggctgtgacatctgcggggcggcctacaccatggaggtgctgctgcagaatcaccggctgcgggaccacaatatccggccgggcgaggatgatggctcacgcaagaaggctgagtttatcaagggcagtcacaagtgcaacgtttgttcacggactttcttctcggagaacgggctacgggagcacctgcagacgcaccggggccctgccaagcactacatgtgtcccatctgtggtgagcgcttcccttcgctgctgacgctcaccgaacacaaggtgacccacagcaagagcctggacacgggcacctgtcgcatctgcaagatgcccctgcagagcgaggaggagtttattgagcactgccagatgcaccctgacctgcgcaactcactcacgggcttccgctgtgtggtctgcatgcagacagtcacttccacgcttgagctcaagatccatggcaccttccacatgcagaagctggcgggcagctcagcggcgtcctcccccaatggccaggggctgcagaagctctacaagtgcgccctgtgcctcaaggagttccgcagcaagcaggacctggtgaagcttgacgtcaatgggctgccctacggcctctgcgccggctgcatggcccgcagcgccaacggacaggtgggtggcctggccccgcccgagcccgccgaccggccctgtgccggcctccgttgccccgagtgcagtgtcaagtttgagagtgccgaagacctggagagccacatgcaggtggaccaccgtgacctcacgccggagaccagtgggccccggaaaggcacccagacatcgccagtgccccggaaaaagacataccagtgcatcaagtgccagatgaccttcgagaacgagagagagatccaaatccacgttgccaaccacatgattgaggaaggcatcaaccacgagtgtaagctgtgcaaccagatgttcgactccccggccaagctcctctgtcacctcattgagcacagcttcgagggcatgggcggcaccttcaaatgccccgtgtgtttcacagaaccacacgatgagccagcacgcacagtgagggatcgctcaacaggacacctctccgcagaaggcttgccggagacgccgtggggagggccatttgaacattacatccaatcaaagtgtcatttgcaacccagatgtaaaactctaatgatttggccatgaggcgctgctattataagcagctggaaatgaatattaatggcagagattaaaagtattccatgctcagtattttttattgtcctgctacagctagtgtgcttttagactttccgccgcagactacatttctagagttagagaaacctgctttttaaggctattgtcctttgttccttcatgtattatattgatagtttttaaaaaagaattagtgtgattttttttctttgcttcttttttttctttcttgtttttcttcccccccacccccccacccccttcggttaactactttttaattgcaattctaggtaattgtgcatcgtgatgtgattgcttggctattgtctgaatatttccttttaattttttaattaaagactaatgctttgattggatttgccagttcaccggacagtgattaaaactatgtaatgaatataatcggtttcagtgcaactggatggtctgcttttaaatgtgacttaatctgactgcagtaactagtacagttcaataaagggaatccatgcgatta

SEQ ID NO: 301006 - DNA, 4445 bp, Homo sapiens
aggcccatctctgttctctctttcagttgaagagggggaggcctcagacttctcgctggcctgggattcctccgtgacagcagcaggaggcctagaaggagagccagagtgcgatcagaaaaccagccgtgcgctggaagacaggaacagcgtgacaagtcaagaggagagaaatgaggatgatgaagacatggaggatgaatcaatttacacctgcgatcactgtcagcaggacttcgagtctctggcagacctgacggaccaccgggcccaccgctgtcctggagatggtgatgacgacccacaactctcctgggtggcctcgtctccctccagcaaggatgttgcgtcacccacgcagatgatcggagatggttgtgacctcggcctcggcgaggaggaagggggcacgggcctgccatacccttgccagttctgcgacaagtccttcatccgcttgagctacttgaagaggcacgagcagatccacagcgacaagctgccgttcaagtgcacctactgcagccgcctcttcaagcacaagaggagccgcgaccggcacatcaagctgcatacgggcgacaagaagtatcactgccacgagtgcgaggcagccttctcccgcagcgaccacctcaagatccacctgaagacccacagctccagcaagcccttcaagtgcactgtgtgcaagcgcggcttctcctccaccagctcgctgcagagccacatgcaggcccacaaaaagaacaaggagcatctggccaagtcggagaaggaagccaagaaggacgacttcatgtgcgactactgcgaggacaccttcagccagacggaggagctggagaagcacgtgctcacccgccacccgcagctgtccgagaaggcggacctgcagtgcattcactgccctgaggtcttcgtcgacgagaacacactgctcgcccatatccaccaagcccacgccaaccagaaacacaagtgccccatgtgccctgagcagttctcctcagtggaaggtgtctactgccacctggacagccaccggcagcccgactccagcaaccacagtgtcagtcccgaccctgtactgggcagcgtggcctccatgagcagcgccacacccgactccagcgcctctgtggagcgtggctccaccccggactccaccttgaagccgctgcgggggcagaagaagatgcgggatgacgggcagggctggaccaaggtggtctatagctgcccctattgttccaagcgggactttaacagcctggccgtgctggagatccacctgaagaccatccacgcggacaagccccagcagagccacacatgtcagatctgcctggactccatgcccaccctctacaacctcaacgagcacgttcgcaagctgcacaagaaccatgcctaccctgtgatgcagtttggcaacatctctgccttccactgcaactactgccccgagatgttcgccgacatcaatagcctgcaggagcacatccgcgtctcccactgcggccccaacgccaacccctctgacggtaataatgctttcttctgcaaccagtgctccatgggtttccttactgagtcctccctcaccgagcacatccagcaggcccactgcagtgtgggcagtgccaaactagagtctccggtggtgcagcccacgcagtccttcatggaggtctattcctgcccctactgcaccaactcccccatctttggctccatcctgaaactcaccaagcacatcaaggagaaccacaagaacattccactggcccacagcaagaagtccaaggccgagcagagcccagtctcgtccgatgtggaggtgtcttccccgaagcggcagcggctctcagcaagcgccaactccatctccaatggggagtatccttgcaatcaatgcgacctcaagttctccaactttgagagcttccagacccacctgaagctgcacctggagctgctgctgcggaagcaagcgtgcccccagtgcaaagaggactttgactcccaggagtccctcctgcagcacctgacagtgcattacatgaccacgtcgacccactatgtgtgcgagagctgcgacaagcaattttcctcggtggatgacctgcagaagcacctgctggacatgcacacctttgtgttgtaccactgcaccctgtgtcaggaggtcttcgactccaaggtgtccatccaggtgcacctggcggtgaagcacagcaatgagaagaagatgtaccgctgcacggcctgcaactgggacttccgcaaggaggctgacctgcaggtgcacgtcaaacacagccacctgggcaacccggccaaggctcacaagtgcatcttctgtggggagaccttcagcaccgaggtggagctgcagtgccacatcaccacacacagcaagaagtataactgtaagttctgcagcaaggccttccacgccatcatcctgctggagaagcacctgcgggagaagcactgtgtgtttgatgctgcgaccgagaacggcacggccaatggggtacccccaatggccaccaagaaagctgagcctgctgacctgcagggcatgctgcttaagaaccctgaggcacctaacagccatgaggccagcgaggatgacgtggacgcgtcggagcccatgtacggctgtgacatctgcggggcggcctacaccatggaggtgctgctgcagaatcaccggctgcgggaccacaatatccggccgggcgaggatgatggctcacgcaagaaggctgagtttatcaagggcagtcacaagtgcaacgtttgttcacggactttcttctcggagaacgggctacgggagcacctgcagacgcaccggggccctgccaagcactacatgtgtcccatctgtggtgagcgcttcccttcgctgctgacgctcaccgaacacaaggtgacccacagcaagagcctggacacgggcacctgtcgcatctgcaagatgcccctgcagagcgaggaggagtttattgagcactgccagatgcaccctgacctgcgcaactcactcacgggcttccgctgtgtggtctgcatgcagacagtcacttccacgcttgagctcaagatccatggcaccttccacatgcagaagctggcgggcagctcagcggcgtcctcccccaatggccaggggctgcagaagctctacaagtgcgccctgtgcctcaaggagttccgcagcaagcaggacctggtgaagcttgacgtcaatgggctgccctacggcctctgcgccggctgcatggcccgcagcgccaacggacaggtgggtggcctggccccgcccgagcccgccgaccggccctgtgccggcctccgttgccccgagtgcagtgtcaagtttgagagtgccgaagacctggagagccacatgcaggtggaccaccgtgacctcacgccggagaccagtgggccccggaaaggcacccagacatcgccagtgccccggaaaaagacataccagtgcatcaagtgccagatgaccttcgagaacgagagagagatccaaatccacgttgccaaccacatgattgaggaaggcatcaaccacgagtgtaagctgtgcaaccagatgttcgactccccggccaagctcctctgtcacctcattgagcacagttggccctgacagccgtgtctgtgtctagtcttcgtccaggccaacaagttgcagcagcacatctttgccgtgcacgggcagactgctcacagtgccctcagaagttcttcttccagaccgagctgcagaaccacacgatgagccagcacgcacagtgagggatctccgcagaaggcttgccggagacgccgtggggagggccatttgaacattacatccaatcaaagtgtcatttgcaacccagatgtaaaactgcgctgctattataagcagctggaaatgaatattaatggcagagattaaaagtattccatgctcagtattttttattgtcctgctacagctagccgcagactacatttctagagttagagaaacctgctttttaaggctattgtcctttgttccttcatgtattatattgatagtttttaaaaaagaattagtgtgattttttttctttgcttcttttttttctttcttgtttttcttcccccccacccccccacccccttcggttaactactttttaattgcaattctaggtaattgtgcatcgtgatgtgattgcttggctattgtctgaatatttccttttaattttttaattaaagactaatgctttgattggatttgccagttcaccggacagtgattaaaactatgtaatgaatataatcggtttcagtgcaactggatggtctgcttttaaatgtgacttaatctgactgcagtaactagtacagttcaataaagggaatccatgcgatta

SEQ ID NO: 301007 - DNA, 296 bp, Homo sapiens
actgagagttcaacctcagcctgagactgtcttggaatctccttgggattgctcctgttgaccctcagattgcaaagtgtcatggaggctgcttagtttcaggaccaactgaggcctttagatccacgggagcatgcagaatgtggacatgtgggaagtcaggtgtgcgggtggtgatgctggctgatgctgaggtgggactcagttctgctgaagtcccggtttttttgtaaatgcaaaactcagaacacttttccatggatttcgtttcagtgcaagcagcattttctccttgg

SEQ ID NO: 301008 - DNA, 4009 bp, Homo sapiens
gagggactgcggcagtgtcggagccgcgccgagcctggtggcccaggtgccccgcccgcgtcagccctgctccagccccgcgctagcccagcgcccctcgccccgggccgtccggaccgcgcccccgcccagggccttgcgcacgccggggcccaggccgagggccgcagcgccggggccggcgatgagcgcgaggagccggcatgagcgcagacagcagccctctcgtgggcagcacgcccaccggttatgggaccctgacgatagggacatcaatagatcccctcagctcctcagtttcatccgtgaggctcagcggctactgtggcagtccatggagggtcatcggctatcacgtcgtggtctggatgatggctgggatccctttgctgctcttccgttggaagcccctgtggggggtgcggctgcggctccggccctgcaacctggcccacgccgaaacactcgttatcgaaataagagacaaagaggatagttcctggcagctcttcactgtccaggtgcagactgaggccatcggcgagggcagcctggagccgtccccacagtcccaggcagaggatggccggagccaggcggcagttggggcggtaccagagggtgcctggaaggatacggcccagctccacaagagcgaggaggcggtgagtgtcggacagaagcgggtgctgcggtattacctcttccagggccagcgctatatctggatcgagacccagcaagccttctaccaggtcagcctcctggaccatggccgctcttgtgacgacgtccaccgctcccgccatggcctcagcctccaggaccaaatggtgaggaaggccatttacggccccaacgtgatcagcataccggtcaagtcctacccccagctgctggtggacgaggcactgaacccctactatgggttccaggccttcagcatcgcgctgtggctggctgaccactactactggtacgccctgtgcatcttcctcatttcctccatctccatctgcctgtcgctgtacaagaccagaaagcaaagccagactctaagggacatggtcaagttgtccatgcgggtgtgcgtgtgccggccagggggagaggaagagtgggtggactccagtgagctagtgcccggagactgcctggtgctgccccaggagggtgggctgatgccctgtgatgccgccctggtggccggcgagtgcatggtgaatgagagctctctgacaggagagagcattccagtgctgaagacggcactgccggaggggctggggccctactgtgcagagacacaccggcggcacacactcttctgcgggaccctcatcttgcaggcccgggcctatgtgggaccgcacgtcctggcagtggtgacccgcacagggttctgcacggcaaaagggggcctggtgagctccatcttgcacccccggcccatcaacttcaagttctataaacacagcatgaagtttgtggctgccctctctgtcctggctctcctcggcaccatctacagcatcttcatcctctaccgaaaccgggtgcctctgaatgagattgtaatccgggctctcgacctggtgaccgtggtggtgccacctgccctgcctgctgccatgactgtgtgcacgctctacgcccagagccgactgcggagacagggcattttctgcatccacccactgcgcatcaacctggggggcaagctgcagctggtgtgtttcgacaagacgggcaccctcactgaggacggcttagacgtgatgggggtggtgcccctgaaggggcaggcattcctgcccctggtcccagagcctcgccgcctgcctgtggggcccctgctccgagcactggccacctgccatgccctcagccggctccaggacacccccgtgggcgaccccatggacttgaagatggtggagtctactggctgggtcctggaggaagagccggctgcagactcagcatttgggacccaggtcttggcagtgatgagacctccactttgggagccccagctgcaggcaatggaggagcccccggtgccagtcagcgtcctccaccgcttccccttctcttcggctctgcagcgcatgagtgtggtggtggcgtggccaggggccactcagcccgaggcctacgtcaaaggctccccggagctggtggcagggctctgcaaccccgagacagtgcccaccgacttcgcccagatgctgcagagctatacagctgctggctaccgtgtcgtggccctggccagcaagccactgcccactgtgcccagcctggaggcagcccagcaactgacgagggacactgtggaaggagacctgagcctcctggggctgctggtcatgaggaacctactgaagccgcagacaacgccagttatccaggctctgcgaaggacccgcatccgcgccgtcatggtgacaggggacaacctgcagacagcggtgactgtggcccggggctgtggcatggtggccccccaggagcatctgatcatcgtccacgccacccaccctgagcggggtcagcctgcctctctcgagttcctgccgatggagtcccccacagccgtgaatggcgttaaggatcctgaccaggctgcaagctacaccgtggagccagacccccgatccaggcacctggccctcagcgggcccacctttggtatcattgtgaagcacttccccaagctgctgcccaaggtcctggtccagggcactgtctttgcccgcatggcccctgagcagaagacagagctggtgtgcgagctacagaagcttcagtactgcgtgggcatgtgcggagacggcgccaatgactgtggggccctgaaggcggctgatgtcggcatctcgctgtcccaggcagaagcctcagtggtctcacccttcacctcgagcatggccagtattgagtgcgtgcccatggtcatcagggaggggcgctgttcccttgacacttcgttcagcgtcttcaagtacatggctctgtacagcctgacccagttcatctccgtcctgatcctctacacgatcaacaccaacctgggtgacctgcagttcctggccatcgacctggtcatcaccaccacagtggcagtgctcatgagccgcacggggccagcgctggtcctgggacgggtgcggccaccgggggcgctgctcagcgtgcccgtgctcagcagcctgctgctgcagatggtcctggtgaccggcgtgcagctagggggctacttcctgaccctggcccagccatggttcgtgcctctgaacaggacagtggccgcaccagacaacctgcccaactacgagaacaccgtggtcttctctctgtccagcttccagtacctcatcctggctgcagccgtgtccaagggggcgcccttccgccggccgctctacaccaatgtgcccttcctggtggccctggcgctcctgagctccgtcctggtgggccttgtcctggtccccggcctcctgcaggggccgctggcgctgaggaacatcactgacaccggcttcaagctgctgctgctgggtctggtcaccctcaacttcgtgggggccttcatgctggagagcgtgctagaccagtgcctccccgcctgcctgcgccgcctccggcccaagcgggcctccaagaagcgcttcaagcagctggaacgagagctggccgagcagccctggccgccgctgcccgccggccccctgaggtagtgcaggcccacgggcaccccagacactggaactccctgcctctgagccaccaactggacccctctccagcaacaccaccgccaccacctcccacatccctgaggttggcgactgtctacactcctcccccgagaccacccccaccctggggaagcgttgactactgtcccctaccttggaccatcccgcgtaggggtggcagcccccagctcccctcagtgctgctgtcagtgtagcaaataaagtcatgatattttcctggc

SEQ ID NO: 301009 - DNA, 900 bp, Homo sapiens
ctggggctagagaagcgcagtgagggtcagggtcgggggtggaggatgcttgggtgccaacccggccactgactttccatgggacattaggcaggtcccgctcttctctggacctcagctttcccatctgagcattgggcagaagggacgggtcgggtggtttctggagggctctccatagccttgatttctgccttctccagcaggggccgcctggctgtaggacagggcctgggaggggaggggactcttctgagactgagtccatacctctgtgttccaggatagttcctggcagctcttcactgtccaggtgcagactgaggccatcggcgagggcaggtgaggcagccccattgccccttcccagaagcccctgctaccctggcctccccaacttccccaaccctcggcccccccataaaggctgactctggcgcctcccatcctagggagggaagatggctctgtgagcacagggaggtgccagggcagctcccagagctcgagagtaaccctcacctgcttccccagcctggagccgtccccacagtcccaggcagaggatggccggagccaggcggcagttggggcggtaccagagggtgcctggaaggatacggcccagctccacaagagcgaggaggcggtgagtgtcggacaggtgggttctgaaaaagtccttgcccctctctcggcctcggtttcatgatctacagtgtcagggggtgcagaacccccagcctgggtgatgtcacggccccttcagtgctgcctttctgggatccagaggagccccctcaggcttcactctcgtgcttcctgctgctgcaaatagcccgggtctcgtgagcctgtgatgcacacagccaggtcttgcgaggcctggaggcctggcag

SEQ ID NO: 301010 - DNA, 3993 bp, Homo sapiens
ctggggctagagaagcgcagtgagggtcagggtcgggggtggaggatgcttgggtgccaacccggccactgactttccatgggacattaggcaggtcccgctcttctctggacctcagctttcccatctgagcattgggcagaagggacgggtcgggtggtttctggagggctctccatagccttgatttctgccttctccagcaggggccgcctggctgtaggacagggcctgggaggggaggggactcttctgagactgagtccatacctctgtgttccaggatagttcctggcagctcttcactgtccaggtgcagactgaggccatcggcgagggcaggtgaggcagccccattgccccttcccagaagcccctgctaccctggcctccccaacttccccaaccctcggcccccccataaaggctgactctggcgcctcccatcctagggagggaagatggctctgtgagcacagggaggtgccagggcagctcccagagctcgagagtaaccctcacctgcttccccagcctggagccgtccccacagtcccaggcagaggatggccggagccaggcggcagttggggcggtaccagagggtgcctggaaggatacggcccagctccacaagagcgaggaggcggtgagtgtcggacagaagcgggtgctgcggtattacctcttccagggccagcgctatatctggatcgagacccagcaagccttctaccaggtcagcctcctggaccatggccgctcttgtgacgacgtccaccgctcccgccatggcctcagcctccaggaccaaatggtgaggaaggccatttacggccccaacgtgatcagcataccggtcaagtcctacccccagctgctggtggacgaggcactgaacccctactatgggttccaggccttcagcatcgcgctgtggctggctgaccactactactggtacgccctgtgcatcttcctcatttcctccatctccatctgcctgtcgctgtacaagaccagaaagcaaagccagactctaagggacatggtcaagttgtccatgcgggtgtgcgtgtgccggccagggggagaggaagagtgggtggactccagtgagctagtgcccggagactgcctggtgctgccccaggagggtgggctgatgccctgtgatgccgccctggtggccggcgagtgcatggtgaatgagagctctctgacaggagagagcattccagtgctgaagacggcactgccggaggggctggggccctactgtgcagagacacaccggcggcacacactcttctgcgggaccctcatcttgcaggcccgggcctatgtgggaccgcacgtcctggcagtggtgacccgcacagggttctgcacggcaaaagggggcctggtgagctccatcttgcacccccggcccatcaacttcaagttctataaacacagcatgaagtttgtggctgccctctctgtcctggctctcctcggcaccatctacagcatcttcatcctctaccgaaaccgggtgcctctgaatgagattgtaatccgggctctcgacctggtgaccgtggtggtgccacctgccctgcctgctgccatgactgtgtgcacgctctacgcccagagccgactgcggagacagggcattttctgcatccacccactgcgcatcaacctggggggcaagctgcagctggtgtgtttcgacaagacgggcaccctcactgaggacggcttagacgtgatgggggtggtgcccctgaaggggcaggcattcctgcccctggtcccagagcctcgccgcctgcctgtggggcccctgctccgagcactggccacctgccatgccctcagccggctccaggacacccccgtgggcgaccccatggacttgaagatggtggagtctactggctgggtcctggaggaagagccggctgcagactcagcatttgggacccaggtcttggcagtgatgagacctccactttgggagccccagctgcaggcaatggaggagcccccggtgccagtcagcgtcctccaccgcttccccttctcttcggctctgcagcgcatgagtgtggtggtggcgtggccaggggccactcagcccgaggcctacgtcaaaggctccccggagctggtggcagggctctgcaaccccgagacagtgcccaccgacttcgcccagatgctgcagagctatacagctgctggctaccgtgtcgtggccctggccagcaagccactgcccactgtgcccagcctggaggcagcccagcaactgacgagggacactgtggaaggagacctgagcctcctggggctgctggtcatgaggaacctactgaagccgcagacaacgccagttatccaggctctgcgaaggacccgcatccgcgccgtcatggtgacaggggacaacctgcagacagcggtgactgtggcccggggctgtggcatggtggccccccaggagcatctgatcatcgtccacgccacccaccctgagcggggtcagcctgcctctctcgagttcctgccgatggagtcccccacagccgtgaatggcgttaaggatcctgaccaggctgcaagctacaccgtggagccagacccccgatccaggcacctggccctcagcgggcccacctttggtatcattgtgaagcacttccccaagctgctgcccaaggtcctggtccagggcactgtctttgcccgcatggcccctgagcagaagacagagctggtgtgcgagctacagaagcttcagtactgcgtgggcatgtgcggagacggcgccaatgactgtggggccctgaaggcggctgatgtcggcatctcgctgtcccaggcagaagcctcagtggtctcacccttcacctcgagcatggccagtattgagtgcgtgcccatggtcatcagggaggggcgctgttcccttgacacttcgttcagcgtcttcaagtacatggctctgtacagcctgacccagttcatctccgtcctgatcctctacacgatcaacaccaacctgggtgacctgcagttcctggccatcgacctggtcatcaccaccacagtggcagtgctcatgagccgcacggggccagcgctggtcctgggacgggtgcggccaccgggggcgctgctcagcgtgcccgtgctcagcagcctgctgctgcagatggtcctggtgaccggcgtgcagctagggggctacttcctgaccctggcccagccatggttcgtgcctctgaacaggacagtggccgcaccagacaacctgcccaactacgagaacaccgtggtcttctctctgtccagcttccagtacctcatcctggctgcagccgtgtccaagggggcgcccttccgccggccgctctacaccaatgtgcccttcctggtggccctggcgctcctgagctccgtcctggtgggccttgtcctggtccccggcctcctgcaggggccgctggcgctgaggaacatcactgacaccggcttcaagctgctgctgctgggtctggtcaccctcaacttcgtgggggccttcatgctggagagcgtgctagaccagtgcctccccgcctgcctgcgccgcctccggcccaagcgggcctccaagaagcgcttcaagcagctggaacgagagctggccgagcagccctggccgccgctgcccgccggccccctgaggtagtgcaggcccacgggcaccccagacactggaactccctgcctctgagccaccaactggacccctctccagcaacaccaccgccaccacctcccacatccctgaggttggcgactgtctacactcctcccccgagaccacccccaccctggggaagcgttgactactgtcccctaccttggaccatcccgcgtaggggtggcagcccccagctcccctcagtgctgctgtcagtgtagcaaataaagtcatgatattttcctggc

SEQ ID NO: 301011 - DNA, 2889 bp, Homo sapiens
ttcacacctggttacagagttaactgagacttagagcttgtgggacaattctacacagaactcctggtttgctggtgggagggaggggtgtggagtggtcctcacaccacgttccccaccaggagagagcattccagtgctgaagacggcactgccggaggggctggggccctactgtgcagagacacaccggcggcacacactcttctgcgggaccctcatcttgcaggcccgggcctatgtgggaccgcacgtcctggcagtggtgacccgcacagggttctgcacggcaaaagggggcctggtgagctccatcttgcacccccggcccatcaacttcaagttctataaacacagcatgaagtttgtggctgccctctctgtcctggctctcctcggcaccatctacagcatcttcatcctctaccgaaaccgggtgcctctgaatgagattgtaatccgggctctcgacctggtgaccgtggtggtgccacctgccctgcctgctgccatgactgtgtgcacgctctacgcccagagccgactgcggagacagggcattttctgcatccacccactgcgcatcaacctggggggcaagctgcagctggtgtgtttcgacaagacgggcaccctcactgaggacggcttagacgtgatgggggtggtgcccctgaaggggcaggcattcctgcccctggtcccagagcctcgccgcctgcctgtggggcccctgctccgagcactggccacctgccatgccctcagccggctccaggacacccccgtgggcgaccccatggacttgaagatggtggagtctactggctgggtcctggaggaagagccggctgcagactcagcatttgggacccaggtcttggcagtgatgagacctccactttgggagccccagctgcaggcaatggaggagcccccggtgccagtcagcgtcctccaccgcttccccttctcttcggctctgcagcgcatgagtgtggtggtggcgtggccaggggccactcagcccgaggcctacgtcaaaggctccccggagctggtggcagggctctgcaaccccgagacagtgcccaccgacttcgcccagatgctgcagagctatacagctgctggctaccgtgtcgtggccctggccagcaagccactgcccactgtgcccagcctggaggcagcccagcaactgacgagggacactgtggaaggagacctgagcctcctggggctgctggtcatgaggaacctactgaagccgcagacaacgccagttatccaggctctgcgaaggacccgcatccgcgccgtcatggtgacaggggacaacctgcagacagcggtgactgtggcccggggctgtggcatggtggccccccaggagcatctgatcatcgtccacgccacccaccctgagcggggtcagcctgcctctctcgagttcctgccgatggagtcccccacagccgtgaatggcgttaaggatcctgaccaggctgcaagctacaccgtggagccagacccccgatccaggcacctggccctcagcgggcccacctttggtatcattgtgaagcacttccccaagctgctgcccaaggtcctggtccagggcactgtctttgcccgcatggcccctgagcagaagacagagctggtgtgcgagctacagaagcttcagtactgcgtgggcatgtgcggagacggcgccaatgactgtggggccctgaaggcggctgatgtcggcatctcgctgtcccaggcagaagcctcagtggtctcacccttcacctcgagcatggccagtattgagtgcgtgcccatggtcatcagggaggggcgctgttcccttgacacttcgttcagcgtcttcaagtacatggctctgtacagcctgacccagttcatctccgtcctgatcctctacacgatcaacaccaacctgggtgacctgcagttcctggccatcgacctggtcatcaccaccacagtggcagtgctcatgagccgcacggggccagcgctggtcctgggacgggtgcggccaccgggggcgctgctcagcgtgcccgtgctcagcagcctgctgctgcagatggtcctggtgaccggcgtgcagctagggggctacttcctgaccctggcccagccatggttcgtgcctctgaacaggacagtggccgcaccagacaacctgcccaactacgagaacaccgtggtcttctctctgtccagcttccagtacctcatcctggctgcagccgtgtccaagggggcgcccttccgccggccgctctacaccaatgtgcccttcctggtggccctggcgctcctgagctccgtcctggtgggccttgtcctggtccccggcctcctgcaggggccgctggcgctgaggaacatcactgacaccggcttcaagctgctgctgctgggtctggtcaccctcaacttcgtgggggccttcatgctggagagcgtgctagaccagtgcctccccgcctgcctgcgccgcctccggcccaagcgggcctccaagaagcgcttcaagcagctggaacgagagctggccgagcagccctggccgccgctgcccgccggccccctgaggtagtgcaggcccacgggcaccccagacactggaactccctgcctctgagccaccaactggacccctctccagcaacaccaccgccaccacctcccacatccctgaggttggcgactgtctacactcctcccccgagaccacccccaccctggggaagcgttgactactgtcccctaccttggaccatcccgcgtaggggtggcagcccccagctcccctcagtgctgctgtcagtgtagcaaataaagtcatgatattttcctggc

SEQ ID NO: 301012 - DNA, 3949 bp, Homo sapiens
gagggactgcggcagtgtcggagccgcgccgagcctggtggcccaggtgccccgcccgcgtcagccctgctccagccccgcgctagcccagcgcccctcgccccgggccgtccggaccgcgcccccgcccagggccttgcgcacgccggggcccaggccgagggccgcagcgccggggccggcgatgagcgcgaggagccggcatgagcgcagacagcagccctctcgtgggcagcacgcccaccggttatgggaccctgacgatagggacatcaatagatcccctcagctcctcagtttcatccgtgaggctcagcggctactgtggcagtccatggagggtcatcggctatcacgtcgtggtctggatgatggctgggatccctttgctgctcttccgttggaagcccctgtggggggtgcggctgcggctccggccctgcaacctggcccacgccgaaacactcgttatcgaaataagagacaaagaggatagttcctggcagctcttcactgtccaggtgcagactgaggccatcggcgagggcagcctggagccgtccccacagtcccaggcagaggatggccggagccaggcggcagttggggcggtaccagagggtgcctggaaggatacggcccagctccacaagagcgaggaggcggtgagtgtcggacagaagcgggtgctgcggtattacctcttccagggccagcgctatatctggatcgagacccagcaagccttctaccaggtcagcctcctggaccatggccgctcttgtgacgacgtccaccgctcccgccatggcctcagcctccaggaccaaatggtgaggaaggccatttacggccccaacgtgatcagcataccggtcaagtcctacccccagctgctggtggacgaggcactgaacccctactatgggttccaggccttcagcatcgcgctgtggctggctgaccactactactggtacgccctgtgcatcttcctcatttcctccatctccatctgcctgtcgctgtacaagaccagaaagcaaagccagactctaagggacatggtcaagttgtccatgcgggtgtgcgtgtgccggccagggggagaggaagagtgggtggactccagtgagctagtgcccggagactgcctggtgctgccccaggagggtgggctgatgccctgtgatgccgccctggtggccggcgagtgcatggtgaatgagagctctctgacaggagagagcattccagtgctgaagacggcactgccggaggggctggggccctactgtgcagagacacaccggcggcacacactcttctgcgggaccctcatcttgcaggcccgggcctatgtgggaccgcacgtcctggcagtggtgacccgcacagggttctgcacggcaaaagggggcctggtgagctccatcttgcacccccggcccatcaacttcaagttctataaacacagcatgaagtttgtggctgccctctctgtcctggctctcctcggcaccatctacagcatcttcatcctctaccgaaaccgggtgcctctgaatgagattgtaatccgggctctcgacctggtgaccgtggtggtgccacctgccctgcctgctgccatgactgtgtgcacgctctacgcccagagccgactgcggagacagggcattttctgcatccacccactgcgcatcaacctggggggcaagctgcagctggtgtgtttcgacaagacgggcaccctcactgaggacggcttagacgtgatgggggtggtgcccctgaaggggcaggcattcctgcccctggtcccagagcctcgccgcctgcctgtggggcccctgctccgagcactggccacctgccatgccctcagccggctccaggacacccccgtgggcgaccccatggacttgaagatggtggagtctactggctgggtcctggaggaagagccggctgcagactcagcatttgggacccaggtcttggcagtgatgagacctccactttgggagccccagctgcaggcaatgcgcatgagtgtggtggtggcgtggccaggggccactcagcccgaggcctacgtcaaaggctccccggagctggtggcagggctctgcaaccccgagacagtgcccaccgacttcgcccagatgctgcagagctatacagctgctggctaccgtgtcgtggccctggccagcaagccactgcccactgtgcccagcctggaggcagcccagcaactgacgagggacactgtggaaggagacctgagcctcctggggctgctggtcatgaggaacctactgaagccgcagacaacgccagttatccaggctctgcgaaggacccgcatccgcgccgtcatggtgacaggggacaacctgcagacagcggtgactgtggcccggggctgtggcatggtggccccccaggagcatctgatcatcgtccacgccacccaccctgagcggggtcagcctgcctctctcgagttcctgccgatggagtcccccacagccgtgaatggcgttaaggatcctgaccaggctgcaagctacaccgtggagccagacccccgatccaggcacctggccctcagcgggcccacctttggtatcattgtgaagcacttccccaagctgctgcccaaggtcctggtccagggcactgtctttgcccgcatggcccctgagcagaagacagagctggtgtgcgagctacagaagcttcagtactgcgtgggcatgtgcggagacggcgccaatgactgtggggccctgaaggcggctgatgtcggcatctcgctgtcccaggcagaagcctcagtggtctcacccttcacctcgagcatggccagtattgagtgcgtgcccatggtcatcagggaggggcgctgttcccttgacacttcgttcagcgtcttcaagtacatggctctgtacagcctgacccagttcatctccgtcctgatcctctacacgatcaacaccaacctgggtgacctgcagttcctggccatcgacctggtcatcaccaccacagtggcagtgctcatgagccgcacggggccagcgctggtcctgggacgggtgcggccaccgggggcgctgctcagcgtgcccgtgctcagcagcctgctgctgcagatggtcctggtgaccggcgtgcagctagggggctacttcctgaccctggcccagccatggttcgtgcctctgaacaggacagtggccgcaccagacaacctgcccaactacgagaacaccgtggtcttctctctgtccagcttccagtacctcatcctggctgcagccgtgtccaagggggcgcccttccgccggccgctctacaccaatgtgcccttcctggtggccctggcgctcctgagctccgtcctggtgggccttgtcctggtccccggcctcctgcaggggccgctggcgctgaggaacatcactgacaccggcttcaagctgctgctgctgggtctggtcaccctcaacttcgtgggggccttcatgctggagagcgtgctagaccagtgcctccccgcctgcctgcgccgcctccggcccaagcgggcctccaagaagcgcttcaagcagctggaacgagagctggccgagcagccctggccgccgctgcccgccggccccctgaggtagtgcaggcccacgggcaccccagacactggaactccctgcctctgagccaccaactggacccctctccagcaacaccaccgccaccacctcccacatccctgaggttggcgactgtctacactcctcccccgagaccacccccaccctggggaagcgttgactactgtcccctaccttggaccatcccgcgtaggggtggcagcccccagctcccctcagtgctgctgtcagtgtagcaaataaagtcatgatattttcctggc

SEQ ID NO: 301013 - DNA, 3742 bp, Homo sapiens
gagggactgcggcagtgtcggagccgcgccgagcctggtggcccaggtgccccgcccgcgtcagccctgctccagccccgcgctagcccagcgcccctcgccccgggccgtccggaccgcgcccccgcccagggccttgcgcacgccggggcccaggccgagggccgcagcgccggggccggcgatgagcgcgaggagccggcatgagcgcagacagcagccctctcgtgggcagcacgcccaccggttatgggaccctgacgatagggacatcaatagatcccctcagctcctcagtttcatccgtgaggctcagcggctactgtggcagtccatggagggtcatcggctatcacgtcgtggtctggatgatggctgggatccctttgctgctcttccgttggaagcccctgtggggggtgcggctgcggctccggccctgcaacctggcccacgccgaaacactcgttatcgaaataagagacaaagaggatagttcctggcagctcttcactgtccaggtgcagactgaggccatcggcgagggcagcctggagccgtccccacagtcccaggcagaggatggccggagccaggcggcagttggggcggtaccagagggtgcctggaaggatacggcccagctccacaagagcgaggaggcggtgagtgtcggacagaagcgggtgctgcggtattacctcttccagggccagcgctatatctggatcgagacccagcaagccttctaccaggtcagcctcctggaccatggccgctcttgtgacgacgtccaccgctcccgccatggcctcagcctccaggaccaaatggtgaggaaggccatttacggccccaacgtgatcagcataccggtcaagtcctacccccagctgctggtggacgaggcactgaacccctactatgggttccaggccttcagcatcgcgctgtggctggctgaccactactactggtacgccctgtgcatcttcctcatttcctccatctccatctgcctgtcgctgtacaagaccagaaagcaaagccagactctaagggacatggtcaagttgtccatgcgggtgtgcgtgtgccggccagggggagaggaagagtgggtggactccagtgagctagtgcccggagactgcctggtgctgccccaggagggtgggctgatgccctgtgatgccgccctggtggccggcgagtgcatggtgaatgagagctctctgacaggagagagcattccagtgctgaagacggcactgccggaggggctggggccctactgtgcagagacacaccggcggcacacactcttctgcgggaccctcatcttgcaggcccgggcctatgtgggaccgcacgtcctggcagtggtgacccgcacagggttctgcacggcaaaagggggcctggtgagctccatcttgcacccccggcccatcaacttcaagttctataaacacagcatgaagtttgtggctgccctctctgtcctggctctcctcggcaccatctacagcatcttcatcctctaccgaaaccgggtgcctctgaatgagattgtaatccgggctctcgacctggtgaccgtggtggtgccacctgccctgcctgctgccatgactgtgtgcacgctctacgcccagagccgactgcggagacagggcattttctgcatccacccactgcgcatcaacctggggggcaagctgcagctggtgtgtttcgacaaggtcctggaggaagagccggctgcagactcagcatttgggacccaggtcttggcagtgatgagacctccactttgggagccccagctgcaggcaatgcgcatgagtgtggtggtggcgtggccaggggccactcagcccgaggcctacgtcaaaggctccccggagctggtggcagggctctgcaaccccgagacagtgcccaccgacttcgcccagatgctgcagagctatacagctgctggctaccgtgtcgtggccctggccagcaagccactgcccactgtgcccagcctggaggcagcccagcaactgacgagggacactgtggaaggagacctgagcctcctggggctgctggtcatgaggaacctactgaagccgcagacaacgccagttatccaggctctgcgaaggacccgcatccgcgccgtcatggtgacaggggacaacctgcagacagcggtgactgtggcccggggctgtggcatggtggccccccaggagcatctgatcatcgtccacgccacccaccctgagcggggtcagcctgcctctctcgagttcctgccgatggagtcccccacagccgtgaatggcgttaaggatcctgaccaggctgcaagctacaccgtggagccagacccccgatccaggcacctggccctcagcgggcccacctttggtatcattgtgaagcacttccccaagctgctgcccaaggtcctggtccagggcactgtctttgcccgcatggcccctgagcagaagacagagctggtgtgcgagctacagaagcttcagtactgcgtgggcatgtgcggagacggcgccaatgactgtggggccctgaaggcggctgatgtcggcatctcgctgtcccaggcagaagcctcagtggtctcacccttcacctcgagcatggccagtattgagtgcgtgcccatggtcatcagggaggggcgctgttcccttgacacttcgttcagcgtcttcaagtacatggctctgtacagcctgacccagttcatctccgtcctgatcctctacacgatcaacaccaacctgggtgacctgcagttcctggccatcgacctggtcatcaccaccacagtggcagtgctcatgagccgcacggggccagcgctggtcctgggacgggtgcggccaccgggggcgctgctcagcgtgcccgtgctcagcagcctgctgctgcagatggtcctggtgaccggcgtgcagctagggggctacttcctgaccctggcccagccatggttcgtgcctctgaacaggacagtggccgcaccagacaacctgcccaactacgagaacaccgtggtcttctctctgtccagcttccagtacctcatcctggctgcagccgtgtccaagggggcgcccttccgccggccgctctacaccaatgtgcccttcctggtggccctggcgctcctgagctccgtcctggtgggccttgtcctggtccccggcctcctgcaggggccgctggcgctgaggaacatcactgacaccggcttcaagctgctgctgctgggtctggtcaccctcaacttcgtgggggccttcatgctggagagcgtgctagaccagtgcctccccgcctgcctgcgccgcctccggcccaagcgggcctccaagaagcgcttcaagcagctggaacgagagctggccgagcagccctggccgccgctgcccgccggccccctgaggtagtgcaggcccacgggcaccccagacactggaactccctgcctctgagccaccaactggacccctctccagcaacaccaccgccaccacctcccacatccctgaggttggcgactgtctacactcctcccccgagaccacccccaccctggggaagcgttgactactgtcccctaccttggaccatcccgcgtaggggtggcagcccccagctcccctcagtgctgctgtcagtgtagcaaataaagtcatgatattttcctggc

SEQ ID NO: 301014 - DNA, 3839 bp, Homo sapiens
gagggactgcggcagtgtcggagccgcgccgagcctggtggcccaggtgccccgcccgcgtcagccctgctccagccccgcgctagcccagcgcccctcgccccgggccgtccggaccgcgcccccgcccagggccttgcgcacgccggggcccaggccgagggccgcagcgccggggccggcgatgagcgcgaggagccggcatgagcgcagacagcagccctctcgtgggcagcacgcccaccggttatgggaccctgacgatagggacatcaatagatcccctcagctcctcagtttcatccgtgaggctcagcggctactgtggcagtccatggagggtcatcggctatcacgtcgtggtctggatgatggctgggatccctttgctgctcttccgttggaagcccctgtggggggtgcggctgcggctccggccctgcaacctggcccacgccgaaacactcgttatcgaaataagagacaaagaggatagttcctggcagctcttcactgtccaggtgcagactgaggccatcggcgagggcagcctggagccgtccccacagtcccaggcagaggatggccggagccaggcggcagttggggcggtaccagagggtgcctggaaggatacggcccagctccacaagagcgaggaggcggtgagtgtcggacagaagcgggtgctgcggtattacctcttccagggccagcgctatatctggatcgagacccagcaagccttctaccaggtcagcctcctggaccatggccgctcttgtgacgacgtccaccgctcccgccatggcctcagcctccaggaccaaatggtgaggaaggccatttacggccccaacgtgatcagcataccggtcaagtcctacccccagctgctggtggacgaggcactgaacccctactatgggttccaggccttcagcatcgcgctgtggctggctgaccactactactggtacgccctgtgcatcttcctcatttcctccatctccatctgcctgtcgctgtacaagaccagaaagcaaagccagactctaagggacatggtcaagttgtccatgcgggtgtgcgtgtgccggccagggggagaggaagagtgggtggactccagtgagctagtgcccggagactgcctggtgctgccccaggagggtgggctgatgccctgtgatgccgccctggtggccggcgagtgcatggtgaatgagagctctctgacaggagagagcattccagtgctgaagacggcactgccggaggggctggggccctactgtgcagagacacaccggcggcacacactcttctgcgggaccctcatcttgcaggcccgggcctatgtgggaccgcacgtcctggcagtggtgacccgcacagggttctgcacggcaaaagggggcctggtgagctccatcttgcacccccggcccatcaacttcaagttctataaacacagcatgaagtttgtggctgccctctctgtcctggctctcctcggcaccatctacagcatcttcatcctctaccgaaaccgggtgcctctgaatgagattgtaatccgggctctcgacctggtgaccgtggtggtgccacctgccctgcctgctgccatgactgtgtgcacgctctacgcccagagccgactgcggagacagggcattttctgcatccacccactgcgcatcaacctggggggcaagctgcagctggtgtgtttcgacaagacgggcaccctcactgaggacggcttagacgtgatgggggtggtgcccctgaaggggcaggcattcctgcccctggtcccagagcctcgccgcctgcctgtggggcccctgctccgagcactggccacctgccatgccctcagccggctccaggacacccccgtgggcgaccccatggacttgaagatggtggagtctactggctgggtcctggaggaagagccggctgcagactcagcatttgggacccaggtcttggcagtgatgagacctccactttgggagccccagctgcaggcaatggaggagcccccggtgccagtcagcgtcctccaccgcttccccttctcttcggctctgcagcgcatgagtgtggtggtggcgtggccaggggccactcagcccgaggcctacgtcaaaggctccccggagctggtggcagggctctgcaaccccgagacagtgcccaccgacttcgcccagatgctgcagagctatacagctgctggctaccgtgtcgtggccctggccagcaagccactgcccactgtgcccagcctggaggcagcccagcaactgacgagggacactgtggaaggagacctgagcctcctggggctgctggtcatgaggaacctactgaagccgcagacaacgccagttatccaggctctgcgaaggacccgcatccgcgccgtcatggtgacaggggacaacctgcagacagcggtgactgtggcccggggctgtggcatggtggccccccaggagcatctgatcatcgtccacgccacccaccctgagcggggtcagcctgcctctctcgagttcctgccgatggagtcccccacagccgtgaatggcgttaaggatcctgaccaggctgcaagctacaccgtggagccagacccccgatccaggcacctggccctcagcgggcccacctttggtatcattgtgaagcacttccccaagctgctgcccaaggtcctggtccagggcactgtctttgcccgcatggcccctgagcagaagacagagctggtgtgcgagctacagaagcttcagtactgcgtgggcatgtgcggagacggcgccaatgactgtggggccctgaaggcggctgatgtcggcatctcgctgtcccaggcagaagcctcagtggtctcacccttcacctcgagcatggccagtattgagtgcgtgcccatggtcatcagggaggggcgctgttcccttgacacttcgttcagcgtcttcaagtacatggctctgtacagcctgacccagttcatctccgtcctgatcctctacacgatcaacaccaacctgggtgacctgcagttcctggccatcgacctggtcatcaccaccacagtggcagtgctcatgagccgcacggggccagcgctggtcctgggacgggtgcggccaccgggggcgctgctcagcgtgcccgtgctcagcagcctgctgctgcagatggtcctggtgaccggcgtgcagctagggggctacttcctgaccctggcccagccatggttcgtgcctctgaacaggacagtggccgcaccagacaacctgcccaactacgagaacaccgtggtcttctctctgtccagcttccagtacctcatcctggctgcagccgtgtccaagggggcgcccttccgccggccgctctacaccaatgagcgtgctagaccagtgcctccccgcctgcctgcgccgcctccggcccaagcgggcctccaagaagcgcttcaagcagctggaacgagagctggccgagcagccctggccgccgctgcccgccggccccctgaggtagtgcaggcccacgggcaccccagacactggaactccctgcctctgagccaccaactggacccctctccagcaacaccaccgccaccacctcccacatccctgaggttggcgactgtctacactcctcccccgagaccacccccaccctggggaagcgttgactactgtcccctaccttggaccatcccgcgtaggggtggcagcccccagctcccctcagtgctgctgtcagtgtagcaaataaagtcatgatattttcctggc

SEQ ID NO: 301015 - DNA, 3892 bp, Homo sapiens
gagggactgcggcagtgtcggagccgcgccgagcctggtggcccaggtgccccgcccgcgtcagccctgctccagccccgcgctagcccagcgcccctcgccccgggccgtccggaccgcgcccccgcccagggccttgcgcacgccggggcccaggccgagggccgcagcgccggggccggcgatgagcgcgaggagccggcatgagcgcagacagcagccctctcgtgggcagcacgcccaccggttatgggaccctgacgatagggacatcaatagatcccctcagctcctcagtttcatccgtgaggctcagcggctactgtggcagtccatggagggtcatcggctatcacgtcgtggtctggatgatggctgggatccctttgctgctcttccgttggaagcccctgtggggggtgcggctgcggctccggccctgcaacctggcccacgccgaaacactcgttatcgaaataagagacaaagaggatagttcctggcagctcttcactgtccaggtgcagactgaggccatcggcgagggcagcctggagccgtccccacagtcccaggcagaggatggccggagccaggcggcagttggggcggtaccagagggtgcctggaaggatacggcccagctccacaagagcgaggaggcggtgagtgtcggacagaagcgggtgctgcggtattacctcttccagggccagcgctatatctggatcgagacccagcaagccttctaccaggtcagcctcctggaccatggccgctcttgtgacgacgtccaccgctcccgccatggcctcagcctccaggaccaaatggtgaggaaggccatttacggccccaacgtgatcagcataccggtcaagtcctacccccagctgctggtggacgaggcactgaacccctactatgggttccaggccttcagcatcgcgctgtggctggctgaccactactactggtacgccctgtgcatcttcctcatttcctccatctccatctgcctgtcgctgtacaagaccagaaagcaaagccagactctaagggacatggtcaagttgtccatgcgggtgtgcgtgtgccggccagggggagaggaagagtgggtggactccagtgagctagtgcccggagactgcctggtgctgccccaggagggtgggctgatgccctgtgatgccgccctggtggccggcgagtgcatggtgaatgagagctctctgacaggagagagcattccagtgctgaagacggcactgccggaggggctggggccctactgtgcagagacacaccggcggcacacactcttctgcgggaccctcatcttgcaggcccgggcctatgtgggaccgcacgtcctggcagtggtgacccgcacagggttctgcacggcaaaagggggcctggtgagctccatcttgcacccccggcccatcaacttcaagttctataaacacagcatgaagtttgtggctgccctctctgtcctggctctcctcggcaccatctacagcatcttcatcctctaccgaaaccgggtgcctctgaatgagattgtaatccgggctctcgacctggtgaccgtggtggtgccacctgccctgcctgctgccatgactgtgtgcacgctctacgcccagagccgactgcggagacagggcattttctgcatccacccactgcgcatcaacctggggggcaagctgcagctggtgtgtttcgacaagacgggcaccctcactgaggacggcttagacgtgatgggggtggtgcccctgaaggggcaggcattcctgcccctggtcccagagcctcgccgcctgcctgtggggcccctgctccgagcactggccacctgccatgccctcagccggctccaggacacccccgtgggcgaccccatggacttgaagatggtggagtctactggctgggtcctggaggaagagccggctgcagactcagcatttgggacccaggtcttggcagtgatgagacctccactttgggagccccagctgcaggcaatggaggagcccccggtgccagtcagcgtcctccaccgcttccccttctcttcggctctgcagcgcatgagtgtggtggtggcgtggccaggggccactcagcccgaggcctacgtcaaaggctccccggagctggtggcagggctctgcaaccccgagacagtgcccaccgacttcgcccagatgctgcagagctatacagctgctggctaccgtgtcgtggccctggccagcaagccactgcccactgtgcccagcctggaggcagcccagcaactgacgagggacactgtggaaggagacctgagcctcctggggctgctggtcatgaggaacctactgaagccgcagacaacgccagttatccaggctctgcgaaggacccgcatccgcgccgtcatggtgacaggggacaacctgcagacagcggtgactgtggcccggggctgtggcatggtggccccccaggagcatctgatcatcgtccacgccacccaccctgagcggggtcagcctgcctctctcgagttcctgccgatggagtcccccacagccgtgaatggcgttaaggtcctggtccagggcactgtctttgcccgcatggcccctgagcagaagacagagctggtgtgcgagctacagaagcttcagtactgcgtgggcatgtgcggagacggcgccaatgactgtggggccctgaaggcggctgatgtcggcatctcgctgtcccaggcagaagcctcagtggtctcacccttcacctcgagcatggccagtattgagtgcgtgcccatggtcatcagggaggggcgctgttcccttgacacttcgttcagcgtcttcaagtacatggctctgtacagcctgacccagttcatctccgtcctgatcctctacacgatcaacaccaacctgggtgacctgcagttcctggccatcgacctggtcatcaccaccacagtggcagtgctcatgagccgcacggggccagcgctggtcctgggacgggtgcggccaccgggggcgctgctcagcgtgcccgtgctcagcagcctgctgctgcagatggtcctggtgaccggcgtgcagctagggggctacttcctgaccctggcccagccatggttcgtgcctctgaacaggacagtggccgcaccagacaacctgcccaactacgagaacaccgtggtcttctctctgtccagcttccagtacctcatcctggctgcagccgtgtccaagggggcgcccttccgccggccgctctacaccaatgtgcccttcctggtggccctggcgctcctgagctccgtcctggtgggccttgtcctggtccccggcctcctgcaggggccgctggcgctgaggaacatcactgacaccggcttcaagctgctgctgctgggtctggtcaccctcaacttcgtgggggccttcatgctggagagcgtgctagaccagtgcctccccgcctgcctgcgccgcctccggcccaagcgggcctccaagaagcgcttcaagcagctggaacgagagctggccgagcagccctggccgccgctgcccgccggccccctgaggtagtgcaggcccacgggcaccccagacactggaactccctgcctctgagccaccaactggacccctctccagcaacaccaccgccaccacctcccacatccctgaggttggcgactgtctacactcctcccccgagaccacccccaccctggggaagcgttgactactgtcccctaccttggaccatcccgcgtaggggtggcagcccccagctcccctcagtgctgctgtcagtgtagcaaataaagtcatgatattttcctggc

SEQ ID NO: 301016 - DNA, 3957 bp, Homo sapiens
gagggactgcggcagtgtcggagccgcgccgagcctggtggcccaggtgccccgcccgcgtcagccctgctccagccccgcgctagcccagcgcccctcgccccgggccgtccggaccgcgcccccgcccagggccttgcgcacgccggggcccaggccgagggccgcagcgccggggccggcgatgagcgcgaggagccggcatgagcgcagacagcagccctctcgtgggcagcacgcccaccggttatgggaccctgacgatagggacatcaatagatcccctcagctcctcagtttcatccgtgaggctcagcggctactgtggcagtccatggagggtcatcggctatcacgtcgtggtctggatgatggctgggatccctttgctgctcttccgttggaagcccctgtggggggtgcggctgcggctccggccctgcaacctggcccacgccgaaacactcgttatcgaaataagagacaaagaggatagttcctggcagctcttcactgtccaggtgcagactgaggccatcggcgagggcagcctggagccgtccccacagtcccaggcagaggatggccggagccaggcggcagttggggcggtaccagagggtgcctggaaggatacggcccagctccacaagagcgaggaggcggtgagtgtcggacagaagcgggtgctgcggtattacctcttccagggccagcgctatatctggatcgagacccagcaagccttctaccaggtcagcctcctggaccatggccgctcttgtgacgacgtccaccgctcccgccatggcctcagcctccaggaccaaatggtgaggaaggccatttacggccccaacgtgatcagcataccggtcaagtcctacccccagctgctggtggacgaggcactgaacccctactatgggttccaggccttcagcatcgcgctgtggctggctgaccactactactggtacgccctgtgcatcttcctcatttcctccatctccatctgcctgtcgctgtacaagaccagaaagcaaagccagactctaagggacatggtcaagttgtccatgcgggtgtgcgtgtgccggccagggggagaggaagagtgggtggactccagtgagctagtgcccggagactgcctggtgctgccccaggagggtgggctgatgccctgtgatgccgccctggtggccggcgagtgcatggtgaatgagagctctctgacaggagagagcattccagtgctgaagacggcactgccggaggggctggggccctactgtgcagagacacaccggcggcacacactcttctgcgggaccctcatcttgcaggcccgggcctatgtgggaccgcacgtcctggcagtggtgacccgcacagggttctgcacggcaaaagggggcctggtgagctccatcttgcacccccggcccatcaacttcaagttctataaacacagcatgaagtttgtggctgccctctctgtcctggctctcctcggcaccatctacagcatcttcatcctctaccgaaaccgggtgcctctgaatgagattgtaatccgggctctcgacctggtgaccgtggtggtgccacctgccctgcctgctgccatgactgtgtgcacgctctacgcccagagccgactgcggagacagggcattttctgcatccacccactgcgcatcaacctggggggcaagctgcagctggtgtgtttcgacaagacgggcaccctcactgaggacggcttagacgtgatgggggtggtgcccctgaaggggcaggcattcctgcccctggtcccagagcctcgccgcctgcctgtggggcccctgctccgagcactggccacctgccatgccctcagccggctccaggacacccccgtgggcgaccccatggacttgaagatggtggagtctactggctgggtcctggaggaagagccggctgcagactcagcatttgggacccaggtcttggcagtgatgagacctccactttgggagccccagctgcaggcaatggaggagcccccggtgccagtcagcgtcctccaccgcttccccttctcttcggctctgcagcgcatgagtgtggtggtggcgtggccaggggccactcagcccgaggcctacgtcaaaggctccccggagctggtggcagggctctgcaaccccgagacagtgcccaccgacttcgcccagatgctgcagagctatacagctgctggctaccgtgtcgtggccctggccagcaagccactgcccactgtgcccagcctggaggcagcccagcaactgacgagggacactgtggaaggagacctgagcctcctggggctgctggtcatgaggaacctactgaagccgcagacaacgccagttatccaggctctgcgaaggacccgcatccgcgccgtcatggtgacaggggacaacctgcagacagcggtgactgtggcccggggctgtggcatggtggccccccaggagcatctgatcatcgtccacgccacccaccctgagcggggtcagcctgcctctctcgagttcctgccgatggagtcccccacagccgtgaatggcgttaaggatcctgaccaggctgcaagctacaccgtggagccagacccccgatccaggcacctggccctcagcgggcccacctttggtatcattgtgaagcacttccccaagctgctgcccaaggtcctggtccagggcactgtctttgcccgcatggcccctgagcagaagacagagctggtgtgcgagctacagaagcttcagtactgcgtgggcatgtgcggagacggcgccaatgactgtggggccctgaaggcggctgatgtcggcatctcgctgtcccaggcagaagcctcagtggtctcacccttcacctcgagcatggccagtattgagtgcgtgcccatggtcatcagggaggggcgctgttcccttgacacttcgttcagcgtcttcaagtacatggctctgtacagcctgacccagttcatctccgtcctgatcctctacacgatcaacaccaacctgggtgacctgcagttcctggccatcgactggtcctgggacgggtgcggccaccgggggcgctgctcagcgtgcccgtgctcagcagcctgctgctgcagatggtcctggtgaccggcgtgcagctagggggctacttcctgaccctggcccagccatggttcgtgcctctgaacaggacagtggccgcaccagacaacctgcccaactacgagaacaccgtggtcttctctctgtccagcttccagtacctcatcctggctgcagccgtgtccaagggggcgcccttccgccggccgctctacaccaatgtgcccttcctggtggccctggcgctcctgagctccgtcctggtgggccttgtcctggtccccggcctcctgcaggggccgctggcgctgaggaacatcactgacaccggcttcaagctgctgctgctgggtctggtcaccctcaacttcgtgggggccttcatgctggagagcgtgctagaccagtgcctccccgcctgcctgcgccgcctccggcccaagcgggcctccaagaagcgcttcaagcagctggaacgagagctggccgagcagccctggccgccgctgcccgccggccccctgaggtagtgcaggcccacgggcaccccagacactggaactccctgcctctgagccaccaactggacccctctccagcaacaccaccgccaccacctcccacatccctgaggttggcgactgtctacactcctcccccgagaccacccccaccctggggaagcgttgactactgtcccctaccttggaccatcccgcgtaggggtggcagcccccagctcccctcagtgctgctgtcagtgtagcaaataaagtcatgatattttcctggc

SEQ ID NO: 301017 - DNA, 3536 bp, Homo sapiens
gagggactgcggcagtgtcggagccgcgccgagcctggtggcccaggtgccccgcccgcgtcagccctgctccagccccgcgctagcccagcgcccctcgccccgggccgtccggaccgcgcccccgcccagggccttgcgcacgccggggcccaggccgagggccgcagcgccggggccggcgatgagcgcgaggagccggcatgagcgcagacagcagccctctcgtgggcagcacgcccaccggttatgggaccctgacgatagggacatcaatagatcccctcagctcctcagtttcatccgtgaggctcagcggctactgtggcagtccatggagggtcatcggctatcacgtcgtggtctggatgatggctgggatccctttgctgctcttccgttggaagcccctgtggggggtgcggctgcggctccggccctgcaacctggcccacgccgaaacactcgttatcgaaataagagacaaagaggatagttcctggcagctcttcactgtccaggtgcagactgaggccatcggcgagggcagcctggagccgtccccacagtcccaggcagaggatggccggagccaggcggcagttggggcggtaccagagggtgcctggaaggatacggcccagctccacaagagcgaggaggcggtgagtgtcggacagaagcgggtgctgcggtattacctcttccagggccagcgctatatctggatcgagacccagcaagccttctaccaggtcagcctcctggaccatggccgctcttgtgacgacgtccaccgctcccgccatggcctcagcctccaggaccaaatggtgaggaaggccatttacggccccaacgtgatcagcataccggtcaagtcctacccccagctgctggtggacgaggcactgaacccctactatgggttccaggccttcagcatcgcgctgtggctggctgaccactactactggtacgccctgtgcatcttcctcatttcctccatctccatctgcctgtcgctgtacaagaccagaaagcaaagccagactctaagggacatggtcaagttgtccatgcgggtgtgcgtgtgccggccagggggagaggaagagtgggtggactccagtgagctagtgcccggagactgcctggtgctgccccaggagggtgggctgatgccctgtgatgccgccctggtggccggcgagtgcatggtgaatgagagctctctgacaggagagagcattccagtgctgaagacggcactgccggaggggctggggccctactgtgcagagacacaccggcggcacacactcttctgcgggaccctcatcttgcaggcccgggcctatgtgggaccgcacgtcctggcagtggtgacccgcacagggttctgcacggcaaaagggggcctggtgagctccatcttgcacccccggcccatcaacttcaagttctataaacacagcatgaagtttgtggctgccctctctgtcctggctctcctcggcaccatctacagcatcttcatcctctaccgaaaccgggtgcctctgaatgagattgtaatccgggctctcgacctggtgaccgtggtggtgccacctgccctgcctgctgccatgactgtgtgcacgctctacgcccagagccgactgcggagacagggcattttctgcatccacccactgcgcatcaacctggggggcaagctgcagctggtgtgtttcgacaagacgggcaccctcactgaggacggcttagacgtgatgggggtggtgcccctgaaggggcaggcattcctgcccctggtcccagagcctcgccgcctgcctgtggggcccctgctccgagcactggccacctgccatgccctcagccggctccaggacacccccgtgggcgaccccatggacttgaagatggtggagtctactggctgggtcctggaggaagagccggctgcagactcagcatttgggacccaggtcttggcagtgatgagacctccactttgggagccccagctgcaggcaatggaggagcccccggtgccagtcagcgtcctccaccgcttccccttctcttcggctctgcagcgcatgagtgtggtggtggcgtggccaggggccactcagcccgaggcctacgtcaaaggctccccggagctggtggcagggctctgcaaccccgagacagtgcccaccgacttcgcccagatgctgcagagctatacagctgctggctaccgtgtcgtggccctggccagcaagccactgcccactgtgcccagcctggaggcagcccagcaactgacgagggacactgtggaaggagacctgagcctcctggggctgctggtcatgaggaacctactgaagccgcagacaacgccagttatccaggctctgcgaaggacccgcatccgcgccgtcatggtgacaggggacaacctgcagacagcggtgactgtggcccggggctgtggcatggtggccccccaggagcatctgatcatcgtccacgccacccaccctgagcggggtcagcctgcctctctcgagttcctgccgatggagtcccccacagccgtgaatggcgttaaggatcctgaccaggctgcaagctacaccgtggagccagacccccgatccaggcacctggccctcagcgggcccacctttggtatcattgtgaagcacttccccaagctgctgcccaaggtcctggtccagggcactgtctttgcccgcatggcccctgagcagaagacagagctggtgtgcgagctacagaagcttcagtactgcgtgggcatgtgcggagacggcgccaatgactgtggggccctgaaggcggctgatgtcggcatctcgctgtcccaggcagaagcctcagtggtctcacccttcacctcgagcatggccagtattgagtgcgtgcccatggtcatcagggaggggcgctgttcccttgacacttcgttcagcgtcttcaagtacatggctctgtacagcctgacccagttcatctccgtcctgatcctctacacgatcaacaccaacctgggtgacctgcagttcctggccatcgacctggtcatcaccaccacagtggcagtgctcatgagccgcacggggccagcgctggtcctgggacgggtgcggccaccgggggcgctgctcagcgtgcccgtgctcagcagcctgctgctgcagatggtcctggtgaccggcgtgcagctagggggctacttcctgaccctggcccagccatggttcgtgcctctgaacaggacagtggccgcaccagacaacctgcccaactacgagaacaccgtggtcttctctctgtccagcttccagtacctcatcctggctgcagccgtgtccaagggggcgcccttccgccggccgctctacaccaatggtgccactgcgggcgcgggcgggagatgctggcggagggagggaggagccctggggtgctggggaggcagatgggagagaggtgccggccgagtggaa

SEQ ID NO: 301018 - DNA, 2718 bp, Homo sapiens
gagggactgcggcagtgtcggagccgcgccgagcctggtggcccaggtgccccgcccgcgtcagccctgctccagccccgcgctagcccagcgcccctcgccccgggccgtccggaccgcgcccccgcccagggccttgcgcacgccggggcccaggccgagggccgcagcgccggggccggcgatgagcgcgaggagccggcatgagcgcagacagcagccctctcgtgggcagcacgcccaccggttatgggaccctgacgatagggacatcaatagatcccctcagctcctcagtttcatccgtgaggctcagcggctactgtggcagtccatggagggtcatcggctatcacgtcgtggtctggatgatggctgggatccctttgctgctcttccgttggaagcccctgtggggggtgcggctgcggctccggccctgcaacctggcccacgccgaaacactcgttatcgaaataagagacaaagaggatagttcctggcagctcttcactgtccaggtgcagactgaggccatcggcgagggcagcctggagccgtccccacagtcccaggcagaggatggccggagccaggcggcagttggggcggtaccagagggtgcctggaaggatacggcccagctccacaagagcgaggaggcggtgagtgtcggacagaagcgggtgctgcggtattacctcttccagggccagcgctatatctggatcgagacccagcaagccttctaccaggtcagcctcctggaccatggccgctcttgtgacgacgtccaccgctcccgccatggcctcagcctccaggaccaaatggtgaggaaggccatttacggccccaacgtgatcagcataccggtcaagtcctacccccagctgctggtggacgaggcactgaacccctactatgggttccaggccttcagcatcgcgctgtggctggctgaccactactactggtacgccctgtgcatcttcctcatttcctccatctccatctgcctgtcgctgtacaagaccagaaagcaaagccagactctaagggacatggtcaagttgtccatgcgggtgtgcgtgtgccggccagggggagaggaagagtgggtggactccagtgagctagtgcccggagactgcctggtgctgccccaggagggtgggctgatgccctgtgatgccgccctggtggccggcgagtgcatggtgaatgagagctctctgacaggagagagcattccagtgctgaagacggcactgccggaggggctggggccctactgtgcagagacacaccggcggcacacactcttctgcgggaccctcatcttgcaggcccgggcctatgtgggaccgcacgtcctggcagtggtgacccgcacagggttctgcacggcaaaagggggcctggtgagctccatcttgcacccccggcccatcaacttcaagttctataaacacagcatgaagtttgtggctgccctctctgtcctggctctcctcggcaccatctacagcatcttcatcctctaccgaaaccgggtgcctctgaatgagattgtaatccgggctctcgacctggtgaccgtggtggtgccacctgccctgcctgctgccatgactgtgtgcacgctctacgcccagagccgactgcggagacagggcattttctgcatccacccactgcgcatcaacctggggggcaagctgcagctggtgtgtttcgacaagacgggcaccctcactgaggacggcttagacgtgatgggggtggtgcccctgaaggggcaggcattcctgcccctggtcccagagcctcgccgcctgcctgtggggcccctgctccgagcactggccacctgccatgccctcagccggctccaggacacccccgtgggcgaccccatggacttgaagatggtggagtctactggctgggtcctggaggaagagccggctgcagactcagcatttgggacccaggtcttggcagtgatgagacctccactttgggagccccagctgcaggcaatggaggagcccccggtgccagtcagcgtcctccaccgcttccccttctcttcggctctgcagcgcatgagtgtggtggtggcgtggccaggggccactcagcccgaggcctacgtcaaaggctccccggagctggtggcagggctctgcaaccccgagacagtgcccaccgacttcgcccagatgctgcagagctatacagctgctggctaccgtgtcgtggccctggccagcaagccactgcccactgtgcccagcctggaggcagcccagcaactgacgagggacactgtggaaggagacctgagcctcctggggctgctggtcatgaggaacctactgaagccgcagacaacgccagttatccaggctctgcgaaggacccgcatccgcgccgtcatggtgacaggggacaacctgcagacagcggtgactgtggcccggggctgtggcatggtggccccccaggagcatctgatcatcgtccacgccaccacctcccacatccctgaggttggcgactgtctacactcctcccccgagaccacccccaccctggggaagcgttgactactgtcccctaccttggaccatcccgcgtaggggtggcagcccccagctcccctcagtgctgctgtcagtgtagcaaataaagtcatgatattttcctggc

SEQ ID NO: 301019 - DNA, 2054 bp, Homo sapiens
gagggactgcggcagtgtcggagccgcgccgagcctggtggcccaggtgccccgcccgcgtcagccctgctccagccccgcgctagcccagcgcccctcgccccgggccgtccggaccgcgcccccgcccagggccttgcgcacgccggggcccaggccgagggccgcagcgccggggccggcgatgagcgcgaggagccggcatgagcgcagacagcagccctctcgtgggcagcacgcccaccggttatgggaccctgacgatagggacatcaatagatcccctcagctcctcagtttcatccgtgaggctcagcggctactgtggcagtccatggagggtcatcggctatcacgtcgtggtctggatgatggctgggatccctttgctgctcttccgttggaagcccctgtggggggtgcggctgcggctccggccctgcaacctggcccacgccgaaacactcgttatcgaaataagagacaaagaggatagttcctggcagctcttcactgtccaggtgcagactgaggccatcggcgagggcagcctggagccgtccccacagtcccaggcagaggatggccggagccaggcggcagttggggcggtaccagagggtgcctggaaggatacggcccagctccacaagagcgaggaggcggtgagtgtcggacagaagcgggtgctgcggtattacctcttccagggccagcgctatatctggatcgagacccagcaagccttctaccaggtcagcctcctggaccatggccgctcttgtgacgacgtccaccgctcccgccatggcctcagcctccaggaccaaatggtgaggaaggccatttacggccccaacgtgatcagcataccggtcaagtcctacccccagctgctggtggacgaggcactgaacccctactatgggttccaggccttcagcatcgcgctgtggctggctgaccactactactggtacgccctgtgcatcttcctcatttcctccatctccatctgcctgtcgctgtacaagaccagaaagcaaagccagactctaagggacatggtcaagttgtccatgcgggtgtgcgtgtgccggccagggggagaggaagagtgggtggactccagtgagctagtgcccggagactgcctggtgctgccccaggagggtgggctgatgccctgtgatgccgccctggtggccggcgagtgcatggtgaatgagagctctctgacaggagagagcattccagtgctgaagacggcactgccggaggggctggggccctactgtgcagagacacaccggcggcacacactcttctgcgggaccctcatcttgcaggcccgggcctatgtgggaccgcacgtcctggcagtggtgacccgcacagggttctgcacggcaaaagggggcctggtgagctccatcttgcacccccggcccatcaacttcaagttctataaacacagcatgaagtttgtggctgccctctctgtcctggctctcctcggcaccatctacagcatcttcatcctctaccgaaaccgggtgcctctgaatgagattgtaatccgggctctcgacctggtgaccgtggtggtgccacctgccctgcctgctgccatgactgtgtgcacgctctacgcccagagccgactgcggagacagggcattttctgcatccacccactgcgcatcaacctggggggcaagctgcagctggtgtgtttcgacaaggtggggccgcaggtggggttggtgcaggggagcgggacagccacaggcgccccagtgaggcctccacacccgcgttattctctcagcagcacccacaggatgccaggtcctgtctagggatggaaacccccagaggatccaccccatcccactcctgccctcactgggctcacggtctggcagatgaaatgtctagaatcatgtattcatgtgttcaagaactggtggggggccgggcgcggtggctcacgtctgtaatcccagcactttgggaggctgaggcagatacatcacttgaggtcaggagtt

SEQ ID NO: 301020 - DNA, 671 bp, Homo sapiens
tatcactaaataacagctactcttttcactgttcatattattagcatcatctctcgctgttctccttcttcagtgacttggtttggaacccagtgagaggaacaaaagggcaaagccaagccttgggttcaagggggcttacttgctcccaggagctcagtgtggcagaacggggatggggggcctagagcccatagtctccagcctgcacagggtgggggatgcagacctcaggccccatggcccatgcgtgtcccctcgcacccacccccagcctcctggaccatggccgctcttgtgacgacgtccaccgctcccgccatggcctcagcctccaggaccaaatggtgaggtcagtgctgccctggaccggggtgccctgagaactggggctccttgtgttgccccccaatgtggttgccttccagtcacctgccttctctgggcctcagttcccccagctgaaagtggggagctccttcaccccgggagggtccagccacagctcctccttctgatggcttggcctcatcccctcttccaggaaggccatttacggccccaacgtgatcagcataccggtcaagtcctacccccagctgctggtggacgaggtagggctgtccctgggtcttgccccagccctgcctggcgtgctgtgtgaccttggc

SEQ ID NO: 301021 - DNA, 155 bp, Homo sapiens
tggtcctgggacgggtgcggccaccgggggcgctgctcagcgtgcccgtgctcagcagcctgctgctgcagatggtcctggtgaccggcgtgcagctagggggctacttcctgaccctggcccagccatggtgagtagggagctgactgaccacc

SEQ ID NO: 301022 - DNA, 2285 bp, Homo sapiens
  misc_feature (1)..(1): n is a, c, g, or t
  misc_feature (18)..(18): n is a, c, g, or t
  misc_feature (20)..(20): n is a, c, g, or t
nggtccggaattcccggnangccctctgcggtgaaggagagaccacactgccatgcctccctctgggccccgaggaaccctccttctgttgccgctgctgctgctgctcctgcttcgcgccgtgctggctgtccccctggagcgaggggcgcccaacaaggaggagacccctgcgactgagagtcccgacacaggcctgtactaccaccggtacctccaggaggtcatcgatgtactggagacggatgggcatttccgagagaagctgcaggctgccaatgcggaggacatcaagagcgggaagctgagccgagagctggactttgtcagccaccacgtccgcaccaagctggatgagctcaagcgacaggaggtgtcacggctgcggatgctgctcaaggccaagatggacgccgagcaggatcccaatgtacaggtggatcatctgaatctcctgaaacagtttgaacacctggaccctcagaaccagcatacattcgaggcccgcgacctggagctgctgatccagacggccacccgggaccttgcccagtacgacgcagcccatcatgaagagttcaagcgctacgagatgcttaaggaacacgagagacggcgttatctggagtcactgggagaggagcagagaaaggaggcggagaggaagctggaagagcaacagcgccggcaccgcgagcaccctaaagtcaacgtgcctggcagccaagcccagttgaaggaggtgtgggaggagctggatggactggaccccaacaggtttaaccccaagaccttcttcatactgcatgatatcaacagtgatggtgtcctggatgagcaggagctggaggcactcttcaccaaggagctggagaaagtgtacgacccaaagaatgaggaggacgacatgcgggagatggaggaggagcgactgcgcatgcgggagcatgtgatgaagaatgtggacaccaaccaggaccgcctcgtgaccctggaggagttcctcgcatccactcagaggaaggagtttggggacaccggggagggctgggagacagtggagatgcaccctgcctacaccgaggaagagctgaggcgctttgaagaggagctggctgcccgggaggcagagctgaatgccaaggcccagcgcctcagccaggagacagaggctctagggcggtcccagggccgcctggaggcccagaagagagagctgcagcaggctgtgctgcacatggagcagcggaagcagcagcagcagcagcagcaaggccacaaggccccggctgcccaccctgaggggcagctcaagttccacccagacacagacgatgtacctgtcccagctccagccggtgaccagaaggaggtggacacttcagaaaagaaacttctcgagcggctccctgaggttgaggtgccccagcatctgtgatcctccgggaccccagccctcaggattcctgatgctccaaggcgactgatgggcgctggatgaagtggcacagtcagcttccctgggggccggtgtcatgttgggctcctggggcgggggcacggcctggcatttcacgcattgctgccaccccagatccacctgtctccactttcacagcctccaagtctgtggctcttcccttctgtcctccgaggggcttgccttctctcgtgtccagtgaggtgctcagtgatcggcttaacttagagaagcccgccccctccccttctccgtctgtcccaagagggtctgctctgagcctgcgttcctaggtggctcggcctcagctgcctgggttgtggccgccctagcatcctgtatgcccacagctactggaatccccgctgctgctccaggccaagcttctggttgattaatgagggcatggggtggtccctcaagaccttcccctaccttttgtggaaccagtgatgcctcaaagacagtgtcccctccacagctgggtgccaggggcaggggatcctcagtatagccggtgaaccctgataccaggagcctgggcctccctgaacccctggcttccagccatctcatcgccagcctcctcctggacctcttggcccccagccccttccccacacagccccagaagggtcccagagctgaccccactccaggacctaggcccagcccctcagcctcatctggagcccctgaagaccagtcccacccacctttctggcctcatctgacactgctccgcatcctgctgtgtgtcctgttccatgttccggttccatccaaatacactttctggaacaaa

SEQ ID NO: 301023 - DNA, 2082 bp, Homo sapiens
ctgctggctgactcttgaggatcccggctccggtgtactgcgtggtcctttcctgtacgagcctgtgcgctgccaatgcggaggacatcaagagcgggaagctgagccgagagctggactttgtcagccaccacgtccgcaccaagctggatgagctcaagcgacaggaggtgtcacggctgcggatgctgctcaaggccaagatggacgccgagcaggatcccaatgtacaggtggatcatctgaatctcctgaaacagtttgaacacctggaccctcagaaccagcatacattcgaggcccgcgacctggagctgctgatccagacggccacccgggaccttgcccagtacgacgcagcccatcatgaagagttcaagcgctacgagatgcttaaggaacacgagagacggcgttatctggagtcactgggagaggagcagagaaaggaggcggagaggaagctggaagagcaacagcgccggcaccgcgagcaccctaaagtcaacgtgcctggcagccaagcccagttgaaggaggtgtgggaggagctggatggactggaccccaacaggtttaaccccaagaccttcttcatactgcatgatatcaacagtgatggtgtcctggatgagcaggagctggaggcactcttcaccaaggagctggagaaagtgtacgacccaaagaatgaggaggacgacatgcgggagatggaggaggagcgactgcgcatgcgggagcatgtgatgaagaatgtggacaccaaccaggaccgcctcgtgaccctggaggagttcctcgcatccactcagaggaaggagtttggggacaccggggagggctgggagacagtggagatgcaccctgcctacaccgaggaagagctgaggcgctttgaagaggagctggctgcccgggaggcagagctgaatgccaaggcccagcgcctcagccaggagacagaggctctagggcggtcccagggccgcctggaggcccagaagagagagctgcagcaggctgtgctgcacatggagcagcggaagcagcagcagcagcagcagcaaggccacaaggccccggctgcccaccctgaggggcagctcaagttccacccagacacagacgatgtacctgtcccagctccagccggtgaccagaaggaggtggacacttcagaaaagaaacttctcgagcggctccctgaggttgaggtgccccagcatctgtgatcctccgggaccccagccctcaggattcctgatgctccaaggcgactgatgggcgctggatgaagtggcacagtcagcttccctgggggccggtgtcatgttgggctcctggggcgggggcacggcctggcatttcacgcattgctgccaccccagatccacctgtctccactttcacagcctccaagtctgtggctcttcccttctgtcctccgaggggcttgccttctctcgtgtccagtgaggtgctcagtgatcggcttaacttagagaagcccgccccctccccttctccgtctgtcccaagagggtctgctctgagcctgcgttcctaggtggctcggcctcagctgcctgggttgtggccgccctagcatcctgtatgcccacagctactggaatccccgctgctgctccaggccaagcttctggttgattaatgagggcatggggtggtccctcaagaccttcccctaccttttgtggaaccagtgatgcctcaaagacagtgtcccctccacagctgggtgccaggggcaggggatcctcagtatagccggtgaaccctgataccaggagcctgggcctccctgaacccctggcttccagccatctcatcgccagcctcctcctggacctcttggcccccagccccttccccacacagccccagaagggtcccagagctgaccccactccaggacctaggcccagcccctcagcctcatctggagcccctgaagaccagtcccacccacctttctggcctcatctgacactgctccgcatcctgctgtgtgtcctgttccatgttccggttccatccaaatacactttctggaacaaa

SEQ ID NO: 301024 - DNA, 295 bp, Homo sapiens
ggaagccagggttcaggcaggcccaggctccagccatctcatcgccagcctcctcctggacctcttggcccccctcctcctggacctcttggcccccagccccttccccacacagccccagaagggtcccagagctgaccccactccaggacctaggcccagcccctcagcctcatctggagcccctgaagaccagtcccacccacctttctggcctcatctgacactgctccgcatcctgctgtgtgtcctgttccatgttccggttccatccaaatacactttctggaacaaa

SEQ ID NO: 301025 - DNA, 220 bp, Homo sapiens
  misc_feature (196)..(196): n is a, c, g, or t
  misc_feature (202)..(202): n is a, c, g, or t
aggggctgctatgtctgtccttgttgcctcaggacacaggcctgtactaccaccggtacctccaggaggtcatcgatgtactggagacggatgggcatttccgagagaagctgcaggctgccaatgcggaggacatcaagagcgggaagctgagccgagagctggactttgtcagccaaggccagcctcttcctgnaagccncgtgctccgataaacgac

SEQ ID NO: 301026 - DNA, 794 bp, Homo sapiens
ggataagtgggcgtggtctaggggggaagtcaccaagaacgcaccggaggtccttgcccgccctggaaaacgccctctgcggtgaaggagagagaccacactgccatgcctccctctgggccccgaggaaccctccttctgttgccgctgctgctgctgctcctgcttcgcgccgtgctggctgtccccctggagcgaggggcgcccaacaaggaggagacccctgcgactgagagtcccgacacaggcctgtactaccaccggtacctccaggaggtcatcgatgtactggagacggatgggcatttccgagagaagctgcaggctgccaatgcggaggacatcaagagcgggaagctgagccgagagctggactttgtcagccaccacgtccgcaccaagctggatgagctcaagcgacaggaggtgtcacggctgcggatgctgctcaaggccaagatggacgccgagcaggatcccaatgtacaggtggatcatctgaatctcctgaaacagtttgaacacctggaccctcagaaccagcatacattcgaggcccgcgacctggagctgctgatccagacggccacccgggaccttgcccagtacgacgcagcccatcatgaagagttcaagcgctacgagatgcttaaggaacacgagagacggcgttatctggagtcactgggagaggagcagagaaaggaggcggagaggaagctggaagagcaacagcgccggcaccgcgagcaccctaaagtcaacgtgcctgtgaggaccccatttgtgcccat

SEQ ID NO: 301027 - DNA, 404 bp, Homo sapiens
taggcactacatgttagtttttattatggttattattgtaagcatcagactcagtcgtgggatcacctcctccaggaagccttccctgattgccccaggttcaagctgtcttctgggcttccctagtgctgtccgtgacttctttggatcatgtctggcccaagatgggggttctgaaagaacatgccctcaggtgttggactcttccctctcttccagatgtacaggtggatcatctgaatctcctgacttgccatcctcttcccttcagatatcaacagtgatggtgtcctggatgagcaggagctggaggcactcttcaccaaggagtgagcatcttggaagcctcgggcacctggagggacgcccaaatcagccacttgtttcctcctgcagtcccctta

SEQ ID NO: 301028 - DNA, 537 bp, Homo sapiens
ctggcctggttgtctgggaggcagaggtccctgataaccctggagctgactctgtgtccagagcactgaatgccagggccagagaatcctgcatgacagtgacccaagcatgtttcctcgaaccctccctttgatctattccattctcaaccccctggtcgctaggcagtggccctagcaacgggtctagtggggtagctaaagcctgggggccaccgttccaccgcgggagacccgtagttacctgtcctctgataacagaccccacatcagcccaaaatttcttcaccagggaccttacacatcccgtcctcggtcccctgagataccttgccatcctcttcccttcagatatcaacagtgatggtgtcctggatgagcaggagctggaggcactcttcaccaaggagctggagaaagtgtacgacccaaagaatgaggaggacgacatgcgggagatggaggaggagcgactgcgcatgcgggagcatgtgatgaagaatgtgaggtgggggccaggcgggggagaggacgggc

SEQ ID NO: 301029 - DNA, 2298 bp, Homo sapiens
  misc_feature (28)..(28): n is a, c, g, or t
tgcaggctggtactggcctgggatgtanggatcgccctctgcggtgaaggagagaccacactgccatgcctccctctgggccccgaggaaccctccttctgttgccgctgctgctgctgctcctgcttcgcgccgtgctggctgtccccctggagcgaggggcgcccaacaaggaggagacccctgcgactgagagtcccgacacaggcctgtactaccaccggtacctccaggaggtcatcgatgtactggagacggatgggcatttccgagagaagctgcaggctgccaatgcggaggacatcaagagcgggaagctgagccgagagctggactttgtcagccaccacgtccgcaccaagctggatgagctcaagcgacaggaggtgtcacggctgcggatgctgctcaaggccaagatggacgccgagcaggatcccaatgtacaggtggatcatctgaatctcctgaaacagtttgaacacctggaccctcagaaccagcatacattcgaggcccgcgacctggagctgctgatccagacggccacccgggaccttgcccagtacgacgcagcccatcatgaagagttcaagcgctacgagatgcttaaggaacacgagagacggcgttatctggagtcactgggagaggagcagagaaaggaggcggagaggaagctggaagagcaacagcgccggcaccgcgagcaccctaaagtcaacgtgcctggcagccaagcccagttgaaggaggtgtgggaggagctggatggactggaccccaacaggtttaaccccaagaccttcttcatactgcatgatatcaacagtgatggtgtcctggatgagcaggagctggaggcactcttcaccaaggagctggagaaagtgtacgacccaaagaatgaggaggacgacatgcgggagatggaggaggagcgactgcgcatgcgggagcatgtgatgaagaatgtggacaccaaccaggaccgcctcgtgaccctggaggagttcctcgcatccactcagaggaaggagtttggggacaccggggagggctgggagacagtggagatgcaccctgcctacaccgaggaagagctgaggcgctttgaagaggagctggctgcccgggaggcagagctgaatgccaaggcccagcgcctcagccaggagacagaggctctagggcggtcccagggccgcctggaggcccagaagagagagctgcagcaggctgtgctgcacatggagcagcggaagcagcagcagcagcagcagcaaggccacaaggccccggctgcccaccctgaggggcagctcaagttccacccagacacagacgatgtacctgtcccagctccagccggtgaccagaaggaggtggacacttcagaaaagaaacttctcgagcggctccctgaggttgaggtgccccagcatctgtgatcctccgggaccccagccctcaggattcctgatgctccaaggcgactgatgggcgctggatgaagtggcacagtcagcttccctgggggccggtgtcatgttgggctcctggggcgggggcacggcctggcatttcacgcattgctgccaccccagatccacctgtctccactttcacagcctccaagtctgtggctcttcccttctgtcctccgaggggcttgccttctctcgtgtccagtgaggtgctcagtgatcggcttaacttagagaagcccgccccctccccttctccgtctgtcccaagagggtctgctctgagcctgcgttcctaggtggctcggcctcagctgcctgggttgtggccgccctagcatcctgtatgcccacagctactggaatccccgctgctgctccaggccaagcttctggttgattaatgagggcatggggtggtccctcaagaccttcccctaccttttgtggaaccagtgatgcctcaaagacagtgtcccctccacagctgggtgccaggggcaggggatcctcagtatagccggtgaaccctgataccaggagcctgggcctccctgaacccctggcttccagccatctcatcgccagcctcctcctggacctcttggcccccagccccttccccacacagccccagaagggtcccagagctgaccccactccaggacctaggcccagcccctcagcctcatctggagcccctgaagaccagtcccacccacctttctggcctcatctgacactgctccgcatcctgctgtgtgtcctgttccatgttccggttccatccaaatacactttctggaacaaa

SEQ ID NO: 301030 - DNA, 2287 bp, Homo sapiens
  misc_feature (15)..(15): n is a, c, g, or t
gcggctgtacgcccngcgggttatgggatgcggtgaaggagagaccacactgccatgcctccctctgggccccgaggaaccctccttctgttgccgctgctgctgctgctcctgcttcgcgccgtgctggctgtccccctggagcgaggggcgcccaacaaggaggagacccctgcgactgagagtcccgacacaggcctgtactaccaccggtacctccaggaggtcatcgatgtactggagacggatgggcatttccgagagaagctgcaggctgccaatgcggaggacatcaagagcgggaagctgagccgagagctggactttgtcagccaccacgtccgcaccaagctggatgagctcaagcgacaggaggtgtcacggctgcggatgctgctcaaggccaagatggacgccgagcaggatcccaatgtacaggtggatcatctgaatctcctgaaacagtttgaacacctggaccctcagaaccagcatacattcgaggcccgcgacctggagctgctgatccagacggccacccgggaccttgcccagtacgacgcagcccatcatgaagagttcaagcgctacgagatgcttaaggaacacgagagacggcgttatctggagtcactgggagaggagcagagaaaggaggcggagaggaagctggaagagcaacagcgccggcaccgcgagcaccctaaagtcaacgtgcctggcagccaagcccagttgaaggaggtgtgggaggagctggatggactggaccccaacaggtttaaccccaagaccttcttcatactgcatgatatcaacagtgatggtgtcctggatgagcaggagctggaggcactcttcaccaaggagctggagaaagtgtacgacccaaagaatgaggaggacgacatgcgggagatggaggaggagcgactgcgcatgcgggagcatgtgatgaagaatgtggacaccaaccaggaccgcctcgtgaccctggaggagttcctcgcatccactcagaggaaggagtttggggacaccggggagggctgggagacagtggagatgcaccctgcctacaccgaggaagagctgaggcgctttgaagaggagctggctgcccgggaggcagagctgaatgccaaggcccagcgcctcagccaggagacagaggctctagggcggtcccagggccgcctggaggcccagaagagagagctgcagcaggctgtgctgcacatggagcagcggaagcagcagcagcagcagcagcaaggccacaaggccccggctgcccaccctgaggggcagctcaagttccacccagacacagacgatgtacctgtcccagctccagccggtgaccagaaggaggtggacacttcagaaaagaaacttctcgagcggctccctgaggttgaggtgccccagcatctgtgatcctccgggaccccagccctcaggattcctgatgctccaaggcgactgatgggcgctggatgaagtggcacagtcagcttccctgggggccggtgtcatgttgggctcctggggcgggggcacggcctggcatttcacgcattgctgccaccccagatccacctgtctccactttcacagcctccaagtctgtggctcttcccttctgtcctccgaggggcttgccttctctcgtgtccagtgaggtgctcagtgatcggcttaacttagagaagcccgccccctccccttctccgtctgtcccaagagggtctgctctgagcctgcgttcctaggtggctcggcctcagctgcctgggttgtggccgccctagcatcctgtatgcccacagctactggaatccccgctgctgctccaggccaagcttctggttgattaatgagggcatggggtggtccctcaagaccttcccctaccttttgtggaaccagtgatgcctcaaagacagtgtcccctccacagctgggtgccaggggcaggggatcctcagtatagccggtgaaccctgataccaggagcctgggcctccctgaacccctggcttccagccatctcatcgccagcctcctcctggacctcttggcccccagccccttccccacacagccccagaagggtcccagagctgaccccactccaggacctaggcccagcccctcagcctcatctggagcccctgaagaccagtcccacccacctttctggcctcatctgacactgctccgcatcctgctgtgtgtcctgttccatgttccggttccatccaaatacactttctggaacaaa

SEQ ID NO: 301031 - DNA, 2533 bp, Homo sapiens
  misc_feature (28)..(28): n is a, c, g, or t
  misc_feature (2323)..(2323): n is a, c, g, or t
tgcaggctggtactggcctgggatgtanggatcgccctctgcggtgaaggagagaccacactgccatgcctccctctgggccccgaggaaccctccttctgttgccgctgctgctgctgctcctgcttcgcgccgtgctggctgtccccctggagcgaggggcgcccaacaaggaggagacccctgcgactgagagtcccgacacaggcctgtactaccaccggtacctccaggaggtcatcgatgtactggagacggatgggcatttccgagagaagctgcaggctgccaatgcggaggacatcaagagcgggaagctgagccgagagctggactttgtcagccaccacgtccgcaccaagctggatgagctcaagcgacaggaggtgtcacggctgcggatgctgctcaaggccaagatggacgccgagcaggatcccaatgtacaggtggatcatctgaatctcctgaaacagtttgaacacctggaccctcagaaccagcatacattcgaggcccgcgacctggagctgctgatccagacggccacccgggaccttgcccagtacgacgcagcccatcatgaagagttcaagcgctacgagatgcttaaggaacacgagagacggcgttatctggagtcactgggagaggagcagagaaaggaggcggagaggaagctggaagagcaacagcgccggcaccgcgagcaccctaaagtcaacgtgcctggcagccaagcccagttgaaggaggtgtgggaggagctggatggactggaccccaacaggtttaaccccaagaccttcttcatactgcatgatatcaacagtgatggtgtcctggatgagcaggagctggaggcactcttcaccaaggagctggagaaagtgtacgacccaaagaatgaggaggacgacatgcgggagatggaggaggagcgactgcgcatgcgggagcatgtgatgaagaatgtggacaccaaccaggaccgcctcgtgaccctggaggagttcctcgcatccactcagaggaaggagtttggggacaccggggagggctgggagacagtggagatgcaccctgcctacaccgaggaagagctgaggcgctttgaagaggagctggctgcccgggaggcagagctgaatgccaaggcccagcgcctcagccaggagacagaggctctagggcggtcccagggccgcctggaggcccagaagagagagctgcagcaggctgtgctgcacatggagcagcggaagcagcagcagcagcagcagcaaggccacaaggccccggctgcccaccctgaggggcagctcaagttccacccagacacagacgatgtacctgtcccagctccagccggtgaccagaaggaggtggacacttcagaaaagaaacttctcgagcggctccctgaggttgaggtgccccagcatctgtgatcctccgggaccccagccctcaggattcctgatgctccaaggcgactgatgggcgctggatgaagtggcacagtcagcttccctgggggccggtgtcatgttgggctcctggggcgggggcacggcctggcatttcacgcattgctgccaccccagatccacctgtctccactttcacagcctccaagtctgtggctcttcccttctgtcctccgaggggcttgccttctctcgtgtccagtgaggtgctcagtgatcggcttaacttagagaagcccgccccctccccttctccgtctgtcccaagagggtctgctctgagcctgcgttcctaggtggctcggcctcagctgcctgggttgtggccgccctagcatcctgtatgcccacagctactggaatccccgctgctgctccaggccaagcttctggttgattaatgagggcatggggtggtccctcaagaccttcccctaccttttgtggaaccagtgatgcctcaaagacagtgtcccctccacagctgggtgccaggggcaggggatcctcagtatagccggtgaaccctgataccaggagcctgggcctccctgaacccctggcttccagccatctcatcgccagcctcctcctggacctcttggcccccagccccttccccacacagccccagaagggtcccagagctgaccccactccaggacctaggcccagcccctcagcctcatctggagcccctgaagaccagtcccacccacctttctggcctcatctgacactgctccgcatcctgctgtgtgtcctgttccatgttccggttccatccaaatacactttctggaacaaaaaaaaacaaaacaaaaaaaaaacancaaagaacagaaagaccctaccgtcatcccgcaggggagaacaaaagaagctggccgacgacaggaacaccggcggacacaggtagaaggatacgccccctccacccccggcgtgccgcgcccaaggcagaaccagatggaacatcacggggaccgacgcgctcgcgaaaacagggcagggggaccctcagcgaggaacaacggggacac

SEQ ID NO: 301032 - DNA, 2275 bp, Homo sapiens
  misc_feature (16)..(16): n is a, c, g, or t
  misc_feature (21)..(21): n is a, c, g, or t
gtgtcctggtacggcnggaantagggatgagaccacactgccatgcctccctctgggccccgaggaaccctccttctgttgccgctgctgctgctgctcctgcttcgcgccgtgctggctgtccccctggagcgaggggcgcccaacaaggaggagacccctgcgactgagagtcccgacacaggcctgtactaccaccggtacctccaggaggtcatcgatgtactggagacggatgggcatttccgagagaagctgcaggctgccaatgcggaggacatcaagagcgggaagctgagccgagagctggactttgtcagccaccacgtccgcaccaagctggatgagctcaagcgacaggaggtgtcacggctgcggatgctgctcaaggccaagatggacgccgagcaggatcccaatgtacaggtggatcatctgaatctcctgaaacagtttgaacacctggaccctcagaaccagcatacattcgaggcccgcgacctggagctgctgatccagacggccacccgggaccttgcccagtacgacgcagcccatcatgaagagttcaagcgctacgagatgcttaaggaacacgagagacggcgttatctggagtcactgggagaggagcagagaaaggaggcggagaggaagctggaagagcaacagcgccggcaccgcgagcaccctaaagtcaacgtgcctggcagccaagcccagttgaaggaggtgtgggaggagctggatggactggaccccaacaggtttaaccccaagaccttcttcatactgcatgatatcaacagtgatggtgtcctggatgagcaggagctggaggcactcttcaccaaggagctggagaaagtgtacgacccaaagaatgaggaggacgacatgcgggagatggaggaggagcgactgcgcatgcgggagcatgtgatgaagaatgtggacaccaaccaggaccgcctcgtgaccctggaggagttcctcgcatccactcagaggaaggagtttggggacaccggggagggctgggagacagtggagatgcaccctgcctacaccgaggaagagctgaggcgctttgaagaggagctggctgcccgggaggcagagctgaatgccaaggcccagcgcctcagccaggagacagaggctctagggcggtcccagggccgcctggaggcccagaagagagagctgcagcaggctgtgctgcacatggagcagcggaagcagcagcagcagcagcagcaaggccacaaggccccggctgcccaccctgaggggcagctcaagttccacccagacacagacgatgtacctgtcccagctccagccggtgaccagaaggaggtggacacttcagaaaagaaacttctcgagcggctccctgaggttgaggtgccccagcatctgtgatcctccgggaccccagccctcaggattcctgatgctccaaggcgactgatgggcgctggatgaagtggcacagtcagcttccctgggggccggtgtcatgttgggctcctggggcgggggcacggcctggcatttcacgcattgctgccaccccagatccacctgtctccactttcacagcctccaagtctgtggctcttcccttctgtcctccgaggggcttgccttctctcgtgtccagtgaggtgctcagtgatcggcttaacttagagaagcccgccccctccccttctccgtctgtcccaagagggtctgctctgagcctgcgttcctaggtggctcggcctcagctgcctgggttgtggccgccctagcatcctgtatgcccacagctactggaatccccgctgctgctccaggccaagcttctggttgattaatgagggcatggggtggtccctcaagaccttcccctaccttttgtggaaccagtgatgcctcaaagacagtgtcccctccacagctgggtgccaggggcaggggatcctcagtatagccggtgaaccctgataccaggagcctgggcctccctgaacccctggcttccagccatctcatcgccagcctcctcctggacctcttggcccccagccccttccccacacagccccagaagggtcccagagctgaccccactccaggacctaggcccagcccctcagcctcatctggagcccctgaagaccagtcccacccacctttctggcctcatctgacactgctccgcatcctgctgtgtgtcctgttccatgttccggttccatccaaatacactttctggaacaaa

SEQ ID NO: 301033 - DNA, 2513 bp, Homo sapiens
  misc_feature (28)..(28): n is a, c, g, or t
  misc_feature (2304)..(2304): n is a, c, g, or t
  misc_feature (2306)..(2306): n is a, c, g, or t
tgcaggctggtactggcctgggatgtanggatcgccctctgcggtgaaggagagaccacactgccatgcctccctctgggccccgaggaaccctccttctgttgccgctgctgctgctgctcctgcttcgcgccgtgctggctgtccccctggagcgaggggcgcccaacaaggaggagacccctgcgactgagagtcccgacacaggcctgtactaccaccggtacctccaggaggtcatcgatgtactggagacggatgggcatttccgagagaagctgcaggctgccaatgcggaggacatcaagagcgggaagctgagccgagagctggactttgtcagccaccacgtccgcaccaagctggatgagctcaagcgacaggaggtgtcacggctgcggatgctgctcaaggccaagatggacgccgagcaggatcccaatgtacaggtggatcatctgaatctcctgaaacagtttgaacacctggaccctcagaaccagcatacattcgaggcccgcgacctggagctgctgatccagacggccacccgggaccttgcccagtacgacgcagcccatcatgaagagttcaagcgctacgagatgcttaaggaacacgagagacggcgttatctggagtcactgggagaggagcagagaaaggaggcggagaggaagctggaagagcaacagcgccggcaccgcgagcaccctaaagtcaacgtgcctggcagccaagcccagttgaaggaggtgtgggaggagctggatggactggaccccaacaggtttaaccccaagaccttcttcatactgcatgatatcaacagtgatggtgtcctggatgagcaggagctggaggcactcttcaccaaggagctggagaaagtgtacgacccaaagaatgaggaggacgacatgcgggagatggaggaggagcgactgcgcatgcgggagcatgtgatgaagaatgtggacaccaaccaggaccgcctcgtgaccctggaggagttcctcgcatccactcagaggaaggagtttggggacaccggggagggctgggagacagtggagatgcaccctgcctacaccgaggaagagctgaggcgctttgaagaggagctggctgcccgggaggcagagctgaatgccaaggcccagcgcctcagccaggagacagaggctctagggcggtcccagggccgcctggaggcccagaagagagagctgcagcaggctgtgctgcacatggagcagcggaagcagcagcagcagcagcagcaaggccacaaggccccggctgcccaccctgaggggcagctcaagttccacccagacacagacgatgtacctgtcccagctccagccggtgaccagaaggaggtggacacttcagaaaagaaacttctcgagcggctccctgaggttgaggtgccccagcatctgtgatcctccgggaccccagccctcaggattcctgatgctccaaggcgactgatgggcgctggatgaagtggcacagtcagcttccctgggggccggtgtcatgttgggctcctggggcgggggcacggcctggcatttcacgcattgctgccaccccagatccacctgtctccactttcacagcctccaagtctgtggctcttcccttctgtcctccgaggggcttgccttctctcgtgtccagtgaggtgctcagtgatcggcttaacttagagaagcccgccccctccccttctccgtctgtcccaagagggtctgctctgagcctgcgttcctaggtggctcggcctcagctgcctgggttgtggccgccctagcatcctgtatgcccacagctactggaatccccgctgctgctccaggccaagcttctggttgattaatgagggcatggggtggtccctcaagaccttcccctaccttttgtggaaccagtgatgcctcaaagacagtgtcccctccacagctgggtgccaggggcaggggatcctcagtatagccggtgaaccctgataccaggagcctgggcctccctgaacccctggcttccagccatctcatcgccagcctcctcctggacctcttggcccccagccccttccccacacagccccagaagggtcccagagctgaccccactccaggacctaggcccagcccctcagcctcatctggagcccctgaagaccagtcccacccacctttctggcctcatctgacactgctccgcatcctgctgtgtgtcctgttccatgttccggttccatccaaatacactttctggaacaaaaaaaananacacaaaacaccaacaacggcggggggcttaaaattcccgagggcgcccaattcccgtcccccttttttgaacagggcccccagaggacgtaaaacaaagaaggcccgtttaaccgtcgcggggaaagcctcgcattgaaggacccctctgccggaatggcacccacaatagcccaaaaactatgtagttacgcttcgcagagtata

SEQ ID NO: 301034 - DNA, 2700 bp, Homo sapiens
  misc_feature (28)..(28): n is a, c, g, or t
  misc_feature (2306)..(2306): n is a, c, g, or t
  misc_feature (2308)..(2308): n is a, c, g, or t
tgcaggctggtactggcctgggatgtanggatcgccctctgcggtgaaggagagaccacactgccatgcctccctctgggccccgaggaaccctccttctgttgccgctgctgctgctgctcctgcttcgcgccgtgctggctgtccccctggagcgaggggcgcccaacaaggaggagacccctgcgactgagagtcccgacacaggcctgtactaccaccggtacctccaggaggtcatcgatgtactggagacggatgggcatttccgagagaagctgcaggctgccaatgcggaggacatcaagagcgggaagctgagccgagagctggactttgtcagccaccacgtccgcaccaagctggatgagctcaagcgacaggaggtgtcacggctgcggatgctgctcaaggccaagatggacgccgagcaggatcccaatgtacaggtggatcatctgaatctcctgaaacagtttgaacacctggaccctcagaaccagcatacattcgaggcccgcgacctggagctgctgatccagacggccacccgggaccttgcccagtacgacgcagcccatcatgaagagttcaagcgctacgagatgcttaaggaacacgagagacggcgttatctggagtcactgggagaggagcagagaaaggaggcggagaggaagctggaagagcaacagcgccggcaccgcgagcaccctaaagtcaacgtgcctggcagccaagcccagttgaaggaggtgtgggaggagctggatggactggaccccaacaggtttaaccccaagaccttcttcatactgcatgatatcaacagtgatggtgtcctggatgagcaggagctggaggcactcttcaccaaggagctggagaaagtgtacgacccaaagaatgaggaggacgacatgcgggagatggaggaggagcgactgcgcatgcgggagcatgtgatgaagaatgtggacaccaaccaggaccgcctcgtgaccctggaggagttcctcgcatccactcagaggaaggagtttggggacaccggggagggctgggagacagtggagatgcaccctgcctacaccgaggaagagctgaggcgctttgaagaggagctggctgcccgggaggcagagctgaatgccaaggcccagcgcctcagccaggagacagaggctctagggcggtcccagggccgcctggaggcccagaagagagagctgcagcaggctgtgctgcacatggagcagcggaagcagcagcagcagcagcagcaaggccacaaggccccggctgcccaccctgaggggcagctcaagttccacccagacacagacgatgtacctgtcccagctccagccggtgaccagaaggaggtggacacttcagaaaagaaacttctcgagcggctccctgaggttgaggtgccccagcatctgtgatcctccgggaccccagccctcaggattcctgatgctccaaggcgactgatgggcgctggatgaagtggcacagtcagcttccctgggggccggtgtcatgttgggctcctggggcgggggcacggcctggcatttcacgcattgctgccaccccagatccacctgtctccactttcacagcctccaagtctgtggctcttcccttctgtcctccgaggggcttgccttctctcgtgtccagtgaggtgctcagtgatcggcttaacttagagaagcccgccccctccccttctccgtctgtcccaagagggtctgctctgagcctgcgttcctaggtggctcggcctcagctgcctgggttgtggccgccctagcatcctgtatgcccacagctactggaatccccgctgctgctccaggccaagcttctggttgattaatgagggcatggggtggtccctcaagaccttcccctaccttttgtggaaccagtgatgcctcaaagacagtgtcccctccacagctgggtgccaggggcaggggatcctcagtatagccggtgaaccctgataccaggagcctgggcctccctgaacccctggcttccagccatctcatcgccagcctcctcctggacctcttggcccccagccccttccccacacagccccagaagggtcccagagctgaccccactccaggacctaggcccagcccctcagcctcatctggagcccctgaagaccagtcccacccacctttctggcctcatctgacactgctccgcatcctgctgtgtgtcctgttccatgttccggttccatccaaatacactttctggaacaaaaaacaaananaacaacacaacacaaaaacaaaacacacaaaccaaaaaacacaaacacaaaacaacacacacacccacaccaaccacaacacacaccacaacaacaaaacctaacgctggaccgcgggggcggcccgcccccaccgcccgccaaccaccccgcagccgcgccacctcctcgccccacccgcccgccccccactcccgcgacacgcgccagccccccacaccaagagacgcgccaaagcaccacaccccgcgcgcccgacccccccccaacacccacggccccacgcaccgccacacccccacccacgccccaccccccgcagacaccccacaccaccccgcgcccgaccaccgcagcccacacccccgcaccgcacccacccacgcaaccca

SEQ ID NO: 301035 - DNA, 2519 bp, Homo sapiens
  misc_feature (28)..(28): n is a, c, g, or t
tgcaggctggtactggcctgggatgtanggatcgccctctgcggtgaaggagagaccacactgccatgcctccctctgggccccgaggaaccctccttctgttgccgctgctgctgctgctcctgcttcgcgccgtgctggctgtccccctggagcgaggggcgcccaacaaggaggagacccctgcgactgagagtcccgacacaggcctgtactaccaccggtacctccaggaggtcatcgatgtactggagacggatgggcatttccgagagaagctgcaggctgccaatgcggaggacatcaagagcgggaagctgagccgagagctggactttgtcagccaccacgtccgcaccaagctggatgagctcaagcgacaggaggtgtcacggctgcggatgctgctcaaggccaagatggacgccgagcaggatcccaatgtacaggtggatcatctgaatctcctgaaacagtttgaacacctggaccctcagaaccagcatacattcgaggcccgcgacctggagctgctgatccagacggccacccgggaccttgcccagtacgacgcagcccatcatgaagagttcaagcgctacgagatgcttaaggaacacgagagacggcgttatctggagtcactgggagaggagcagagaaaggaggcggagaggaagctggaagagcaacagcgccggcaccgcgagcaccctaaagtcaacgtgcctggcagccaagcccagttgaaggaggtgtgggaggagctggatggactggaccccaacaggtttaaccccaagaccttcttcatactgcatgatatcaacagtgatggtgtcctggatgagcaggagctggaggcactcttcaccaaggagctggagaaagtgtacgacccaaagaatgaggaggacgacatgcgggagatggaggaggagcgactgcgcatgcgggagcatgtgatgaagaatgtggacaccaaccaggaccgcctcgtgaccctggaggagttcctcgcatccactcagaggaaggagtttggggacaccggggagggctgggagacagtggagatgcaccctgcctacaccgaggaagagctgaggcgctttgaagaggagctggctgcccgggaggcagagctgaatgccaaggcccagcgcctcagccaggagacagaggctctagggcggtcccagggccgcctggaggcccagaagagagagctgcagcaggctgtgctgcacatggagcagcggaagcagcagcagcagcagcagcaaggccacaaggccccggctgcccaccctgaggggcagctcaagttccacccagacacagacgatgtacctgtcccagctccagccggtgaccagaaggaggtggacacttcagaaaagaaacttctcgagcggctccctgaggttgaggtgccccagcatctgtgatcctccgggaccccagccctcaggattcctgatgctccaaggcgactgatgggcgctggatgaagtggcacagtcagcttccctgggggccggtgtcatgttgggctcctggggcgggggcacggcctggcatttcacgcattgctgccaccccagatccacctgtctccactttcacagcctccaagtctgtggctcttcccttctgtcctccgaggggcttgccttctctcgtgtccagtgaggtgctcagtgatcggcttaacttagagaagcccgccccctccccttctccgtctgtcccaagagggtctgctctgagcctgcgttcctaggtggctcggcctcagctgcctgggttgtggccgccctagcatcctgtatgcccacagctactggaatccccgctgctgctccaggccaagcttctggttgattaatgagggcatggggtggtccctcaagaccttcccctaccttttgtggaaccagtgatgcctcaaagacagtgtcccctccacagctgggtgccaggggcaggggatcctcagtatagccggtgaaccctgataccaggagcctgggcctccctgaacccctggcttccagccatctcatcgccagcctcctcctggacctcttggcccccagccccttccccacacagccccagaagggtcccagagctgaccccactccaggacctaggcccagcccctcagcctcatctggagcccctgaagaccagtcccacccacctttctggcctcatctgacactgctccgcatcctgctgtgtgtcctgttccatgttccggttccatccaaatacactttctggaacaaacaaaaaaagacacagagaagagaagacgaaaagaacacaaaagaaatgaaagactagcagaatccgagagacgaagaaaatacacatatgaccgggacacctgcataacacccggagcccctgcgggcgctccgtacacgcgaagaggccggcccagcgcgcgttcccgctccctagatgtcgttgcgtgtgaagggaccttgcatcccaactcgccgacg

SEQ ID NO: 301036 - DNA, 2324 bp, Homo sapiens
  misc_feature (28)..(28): n is a, c, g, or t
  misc_feature (2242)..(2242): n is a, c, g, or t
  misc_feature (2251)..(2251): n is a, c, g, or t
  misc_feature (2291)..(2292): n is a, c, g, or t
tgcaggctggtactggcctgggatgtanggatcgccctctgcggtgaaggagagaccacactgccatgcctccctctgggccccgaggaaccctccttctgttgccgctgctgctgctgctcctgcttcgcgccgtgctggctgtccccctggagcgaggggcgcccaacaaggaggagacccctgcgactgagagtcccgacacaggcctgtactaccaccggtacctccaggaggtcatcgatgtactggagacggatgggcatttccgagagaagctgcaggctgccaatgcggaggacatcaagagcgggaagctgagccgagagctggactttgtcagccaccacgtccgcaccaagctggatgagctcaagcgacaggaggtgtcacggctgcggatgctgctcaaggccaagatggacgccgagcaggatcccaatgtacaggtggatcatctgaatctcctgaaacagtttgaacacctggaccctcagaaccagcatacattcgaggcccgcgacctggagctgctgatccagacggccacccgggaccttgcccagtacgacgcagcccatcatgaagagttcaagcgctacgagatgcttaaggaacacgagagacggcgttatctggagtcactgggagaggagcagagaaaggaggcggagaggaagctggaagagcaacagcgccggcaccgcgagcaccctaaagtcaacgtgcctggcagccaagcccagttgaaggaggtgtgggaggagctggatggactggaccccaacaggtttaaccccaagaccttcttcatactgcatgatatcaacagtgatggtgtcctggatgagcaggagctggaggcactcttcaccaaggagctggagaaagtgtacgacccaaagaatgaggaggacgacatgcgggagatggaggaggagcgactgcgcatgcgggagcatgtgatgaagaatgtggacaccaaccaggaccgcctcgtgaccctggaggagttcctcgcatccactcagaggaaggagtttggggacaccggggagggctgggagacagtggagatgcaccctgcctacaccgaggaagagctgaggcgctttgaagaggagctggctgcccgggaggcagagctgaatgccaaggcccagcgcctcagccaggagacagaggctctagggcggtcccagggccgcctggaggcccagaagagagagctgcagcaggctgtgctgcacatggagcagcggaagcagcagcagcagcagcagcaaggccacaaggccccggctgcccaccctgaggggcagctcaagttccacccagacacagacgatgtacctgtcccagctccagccggtgaccagaaggaggtggacacttcagaaaagaaacttctcgagcggctccctgaggttgaggtgccccagcatctgtgatcctccgggaccccagccctcaggattcctgatgctccaaggcgactgatgggcgctggatgaagtggcacagtcagcttccctgggggccggtgtcatgttgggctcctggggcgggggcacggcctggcatttcacgcattgctgccaccccagatccacctgtctccactttcacagcctccaagtctgtggctcttcccttctgtcctccgaggggcttgccttctctcgtgtccagtgaggtgctcagtgatcggcttaacttagagaagcccgccccctccccttctccgtctgtcccaagagggtctgctctgagcctgcgttcctaggtggctcggcctcagctgcctgggttgtggccgccctagcatcctgtatgcccacagctactggaatccccgctgctgctccaggccaagcttctggttgattaatgagggcatggggtggtccctcaagaccttcccctaccttttgtggaaccagtgatgcctcaaagacagtgtcccctccacagctgggtgccaggggcaggggatcctcagtatagccggtgaaccctgataccaggagcctgggcctccctgaacccctggcttccagccatctcatcgccagcctcctcctggacctcttggcccccagccccttccccacacagccccagaagggtcccagagctgaccccactccaggacctaggcccagcccctcagcctcatctggagcccctgaagaccagtcccacccacctttctggcctcatctgacactgctccgcatgncttgattgntgttacccacaattttaacaacgccaccggtggtggcccnnggtttccaaagtcctcaaaataccacttttac

SEQ ID NO: 301037 - DNA, 2832 bp, Homo sapiens
  misc_feature (28)..(28): n is a, c, g, or t
  misc_feature (2283)..(2283): n is a, c, g, or t
  misc_feature (2310)..(2310): n is a, c, g, or t
  misc_feature (2430)..(2431): n is a, c, g, or t
  misc_feature (2475)..(2475): n is a, c, g, or t
tgcaggctggtactggcctgggatgtanggatcgccctctgcggtgaaggagagaccacactgccatgcctccctctgggccccgaggaaccctccttctgttgccgctgctgctgctgctcctgcttcgcgccgtgctggctgtccccctggagcgaggggcgcccaacaaggaggagacccctgcgactgagagtcccgacacaggcctgtactaccaccggtacctccaggaggtcatcgatgtactggagacggatgggcatttccgagagaagctgcaggctgccaatgcggaggacatcaagagcgggaagctgagccgagagctggactttgtcagccaccacgtccgcaccaagctggatgagctcaagcgacaggaggtgtcacggctgcggatgctgctcaaggccaagatggacgccgagcaggatcccaatgtacaggtggatcatctgaatctcctgaaacagtttgaacacctggaccctcagaaccagcatacattcgaggcccgcgacctggagctgctgatccagacggccacccgggaccttgcccagtacgacgcagcccatcatgaagagttcaagcgctacgagatgcttaaggaacacgagagacggcgttatctggagtcactgggagaggagcagagaaaggaggcggagaggaagctggaagagcaacagcgccggcaccgcgagcaccctaaagtcaacgtgcctggcagccaagcccagttgaaggaggtgtgggaggagctggatggactggaccccaacaggtttaaccccaagaccttcttcatactgcatgatatcaacagtgatggtgtcctggatgagcaggagctggaggcactcttcaccaaggagctggagaaagtgtacgacccaaagaatgaggaggacgacatgcgggagatggaggaggagcgactgcgcatgcgggagcatgtgatgaagaatgtggacaccaaccaggaccgcctcgtgaccctggaggagttcctcgcatccactcagaggaaggagtttggggacaccggggagggctgggagacagtggagatgcaccctgcctacaccgaggaagagctgaggcgctttgaagaggagctggctgcccgggaggcagagctgaatgccaaggcccagcgcctcagccaggagacagaggctctagggcggtcccagggccgcctggaggcccagaagagagagctgcagcaggctgtgctgcacatggagcagcggaagcagcagcagcagcagcagcaaggccacaaggccccggctgcccaccctgaggggcagctcaagttccacccagacacagacgatgtacctgtcccagctccagccggtgaccagaaggaggtggacacttcagaaaagaaacttctcgagcggctccctgaggttgaggtgccccagcatctgtgatcctccgggaccccagccctcaggattcctgatgctccaaggcgactgatgggcgctggatgaagtggcacagtcagcttccctgggggccggtgtcatgttgggctcctggggcgggggcacggcctggcatttcacgcattgctgccaccccagatccacctgtctccactttcacagcctccaagtctgtggctcttcccttctgtcctccgaggggcttgccttctctcgtgtccagtgaggtgctcagtgatcggcttaacttagagaagcccgccccctccccttctccgtctgtcccaagagggtctgctctgagcctgcgttcctaggtggctcggcctcagctgcctgggttgtggccgccctagcatcctgtatgcccacagctactggaatccccgctgctgctccaggccaagcttctggttgattaatgagggcatggggtggtccctcaagaccttcccctaccttttgtggaaccagtgatgcctcaaagacagtgtcccctccacagctgggtgccaggggcaggggatcctcagtatagccggtgaaccctgataccaggagcctgggcctccctgaacccccaacaggtttaaccccaagaccttcttcatactgcatgatatcaacagtgatggtgtcctggatgagcaggagctggaggcactcttcaccaaggagctggagaaagtgtacgacccaaagaatgaggaggacgacatgcagggagatggaggaggagcgactgcgcatgcgggagcatgtgatgaagaatgtggacaccaaccaggaccgcctcgtgaccctggaggagttnctcgcatccactcagaggaaggagttnggggacaccggggagggctgggagacagtggagatgcaccctgcctacaccgaggaagagctgaggcgctttgaagaggagctggctgcccgggaggcagagctgaatgccaaggcccanngcctcagccaggagacagaggctctagggcggtcccagggccgnctggaggcccacaagagagagctgcagcaggctgagctgcacatggagcagcggaagcatcagcagcagcagcagcaaggccacaaggccccggctgcccaccctgaggggcagctcaagttccacccagacacagacgatgtacctgtcccagctccagccggtgaccagaaggaggtggacacttcagaaaagaaacttctcgagccaggacctaggcccagcccctcagcctcatctggagcccctgaagaccagtcccacccacctttctggcctcatctgacactgctccgcatcctgctgtgtgtcctgttccatgttccggttccatccaaatacactttctggaacaaa

SEQ ID NO: 301038 - DNA, 2884 bp, Homo sapiens
  misc_feature (28)..(28): n is a, c, g, or t
  misc_feature (2283)..(2283): n is a, c, g, or t
  misc_feature (2310)..(2310): n is a, c, g, or t
  misc_feature (2430)..(2431): n is a, c, g, or t
  misc_feature (2475)..(2475): n is a, c, g, or t
tgcaggctggtactggcctgggatgtanggatcgccctctgcggtgaaggagagaccacactgccatgcctccctctgggccccgaggaaccctccttctgttgccgctgctgctgctgctcctgcttcgcgccgtgctggctgtccccctggagcgaggggcgcccaacaaggaggagacccctgcgactgagagtcccgacacaggcctgtactaccaccggtacctccaggaggtcatcgatgtactggagacggatgggcatttccgagagaagctgcaggctgccaatgcggaggacatcaagagcgggaagctgagccgagagctggactttgtcagccaccacgtccgcaccaagctggatgagctcaagcgacaggaggtgtcacggctgcggatgctgctcaaggccaagatggacgccgagcaggatcccaatgtacaggtggatcatctgaatctcctgaaacagtttgaacacctggaccctcagaaccagcatacattcgaggcccgcgacctggagctgctgatccagacggccacccgggaccttgcccagtacgacgcagcccatcatgaagagttcaagcgctacgagatgcttaaggaacacgagagacggcgttatctggagtcactgggagaggagcagagaaaggaggcggagaggaagctggaagagcaacagcgccggcaccgcgagcaccctaaagtcaacgtgcctggcagccaagcccagttgaaggaggtgtgggaggagctggatggactggaccccaacaggtttaaccccaagaccttcttcatactgcatgatatcaacagtgatggtgtcctggatgagcaggagctggaggcactcttcaccaaggagctggagaaagtgtacgacccaaagaatgaggaggacgacatgcgggagatggaggaggagcgactgcgcatgcgggagcatgtgatgaagaatgtggacaccaaccaggaccgcctcgtgaccctggaggagttcctcgcatccactcagaggaaggagtttggggacaccggggagggctgggagacagtggagatgcaccctgcctacaccgaggaagagctgaggcgctttgaagaggagctggctgcccgggaggcagagctgaatgccaaggcccagcgcctcagccaggagacagaggctctagggcggtcccagggccgcctggaggcccagaagagagagctgcagcaggctgtgctgcacatggagcagcggaagcagcagcagcagcagcagcaaggccacaaggccccggctgcccaccctgaggggcagctcaagttccacccagacacagacgatgtacctgtcccagctccagccggtgaccagaaggaggtggacacttcagaaaagaaacttctcgagcggctccctgaggttgaggtgccccagcatctgtgatcctccgggaccccagccctcaggattcctgatgctccaaggcgactgatgggcgctggatgaagtggcacagtcagcttccctgggggccggtgtcatgttgggctcctggggcgggggcacggcctggcatttcacgcattgctgccaccccagatccacctgtctccactttcacagcctccaagtctgtggctcttcccttctgtcctccgaggggcttgccttctctcgtgtccagtgaggtgctcagtgatcggcttaacttagagaagcccgccccctccccttctccgtctgtcccaagagggtctgctctgagcctgcgttcctaggtggctcggcctcagctgcctgggttgtggccgccctagcatcctgtatgcccacagctactggaatccccgctgctgctccaggccaagcttctggttgattaatgagggcatggggtggtccctcaagaccttcccctaccttttgtggaaccagtgatgcctcaaagacagtgtcccctccacagctgggtgccaggggcaggggatcctcagtatagccggtgaaccctgataccaggagcctgggcctccctgaacccccaacaggtttaaccccaagaccttcttcatactgcatgatatcaacagtgatggtgtcctggatgagcaggagctggaggcactcttcaccaaggagctggagaaagtgtacgacccaaagaatgaggaggacgacatgcagggagatggaggaggagcgactgcgcatgcgggagcatgtgatgaagaatgtggacaccaaccaggaccgcctcgtgaccctggaggagttnctcgcatccactcagaggaaggagttnggggacaccggggagggctgggagacagtggagatgcaccctgcctacaccgaggaagagctgaggcgctttgaagaggagctggctgcccgggaggcagagctgaatgccaaggcccanngcctcagccaggagacagaggctctagggcggtcccagggccgnctggaggcccacaagagagagctgcagcaggctgagctgcacatggagcagcggaagcatcagcagcagcagcagcaaggccacaaggccccggctgcccaccctgaggggcagctcaagttccacccagacacagacgatgtacctgtcccagctccagccggtgaccagaaggaggtggacacttcagaaaagaaacttctcgagccaggacctaggcccagcccctcagcctcatctggagcccctgaagaccagtcccacccacctttctggcctcatctgacactgctccgcatcctgctgtgtgtcctgttccatgttccggttccatccaaatacactttctggaacaaaaaagatattagccgtacttaagaattcaaaaagttctacaggttgaaatatc

SEQ ID NO: 301039 - DNA, 2096 bp, Homo sapiens
  misc_feature (28)..(28): n is a, c, g, or t
tgcaggctggtactggcctgggatgtanggatcgccctctgcggtgaaggagagaccacactgccatgcctccctctgggccccgaggaaccctccttctgttgccgctgctgctgctgctcctgcttcgcgccgtgctggctgtccccctggagcgaggggcgcccaacaaggaggagacccctgcgactgagagtcccgacacaggcctgtactaccaccggtacctccaggaggtcatcgatgtactggagacggatgggcatttccgagagaagctgcaggctgccaatgcggaggacatcaagagcgggaagctgagccgagagctggactttgtcagccaccacgtccgcaccaagctggatgagctcaagcgacaggaggtgtcacggctgcggatgctgctcaaggccaagatggacgccgagcaggatcccaatgtacaggtggatcatctgaatctcctgaaacagtttgaacacctggaccctcagaaccagcatacattcgaggcccgcgacctggagctgctgatccagacggccacccgggaccttgcccagtacgacgcagcccatcatgaagagttcaagcgctacgagatgcttaaggaacacgagagacggcgttatctggagtcactgggagaggagcagagaaaggaggcggagaggaagctggaagagcaacagcgccggcaccgcgagcaccctaaagtcaacgtgcctggcagccaagcccagttgaaggaggtgtgggaggagctggatggactggaccccaacaggtttaaccccaagaccttcttcatactgcatgatatcaacagtgatggtgtcctggatgagcaggagctggaggcactcttcaccaaggagctggagaaagtgtacgacccaaagaatgaggaggacgacatgcgggagatggaggaggagcgactgcgcatgcgggagcatgtgatgaagaatgtggacaccaaccaggaccgcctcgtgaccctggaggagttcctcgcatccactcagaggaaggagtttggggacaccggggagggctgggagacagtggagatgcaccctgcctacaccgaggaagagctgaggcgctttgaagaggagctggctgcccgggaggcagagctgaatgccaaggcccagcgcctcagccaggagacagaggctctagggcggtcccagggccgcctggaggcccagaagagagagctgcagcaggctgtgctgcacatggagcagcggaagcagcagcagcagcagcagcaaggccacaaggccccggctgcccaccctgaggggcagctcaagttccacccagacacagacgatgtacctgtcccagctccagccggtgaccagaaggaggtggacacttcagaaaagaaacttctcgagcggctccctgaggttgaggtgccccagcatctgtgatcctccgggaccccagccctcaggattcctgatgctccaaggcgactgatgggcgctggatgaagtggcacagtcagcttccctgggggccggtgtcatgttgggctcctggggcgggggcacggcctggcatttcacgcattgctgccaccccagatccacctgtctccactttcacagcctccaagtctgtggctcttcccttctgtcctccgaggggcttgccttctctcgtgtccagtgaggtgctcagtgatcggcttaacttagagaagcccgccccctccccttctccgtctgtcccaagagggtctgctctgagcctgcgttcctaggtggctcggcctcagctgcctgggttgtggccgccctagcatcctgtatgcccacagctactggaatccccgctgctgctccaggccaagcttctggttgattaatgagggcatggggtggtccctcaagaccttcccctaccttttgtggaaccagtgaccaggacctaggcccagcccctcagcctcatctggagcccctgaagaccagtcccacccacctttctggcctcatctgacactgctccgcatcctgctgtgtgtcctgttccatgttccggttccatccaaatacactttctggaacaaa

SEQ ID NO: 301040 - DNA, 2465 bp, Homo sapiens
  misc_feature (28)..(28): n is a, c, g, or t
tgcaggctggtactggcctgggatgtanggatcgccctctgcggtgaaggagagaccacactgccatgcctccctctgggccccgaggaaccctccttctgttgccgctgctgctgctgctcctgcttcgcgccgtgctggctgtccccctggagcgaggggcgcccaacaaggaggagacccctgcgactgagagtcccgacacaggcctgtactaccaccggtacctccaggaggtcatcgatgtactggagacggatgggcatttccgagagaagctgcaggctgccaatgcggaggacatcaagagcgggaagctgagccgagagctggactttgtcagccaccacgtccgcaccaagctggatgagctcaagcgacaggaggtgtcacggctgcggatgctgctcaaggccaagatggacgccgagcaggatcccaatgtacaggtggatcatctgaatctcctgaaacagtttgaacacctggaccctcagaaccagcatacattcgaggcccgcgacctggagctgctgatccagacggccacccgggaccttgcccagtacgacgcagcccatcatgaagagttcaagcgctacgagatgcttaaggaacacgagagacggcgttatctggagtcactgggagaggagcagagaaaggaggcggagaggaagctggaagagcaacagcgccggcaccgcgagcaccctaaagtcaacgtgcctggcagccaagcccagttgaaggaggtgtgggaggagctggatggactggaccccaacaggtttaaccccaagaccttcttcatactgcatgatatcaacagtgatggtgtcctggatgagcaggagctggaggcactcttcaccaaggagctggagaaagtgtacgacccaaagaatgaggaggacgacatgcgggagatggaggaggagcgactgcgcatgcgggagcatgtgatgaagaatgtggacaccaaccaggaccgcctcgtgaccctggaggagttcctcgcatccactcagaggaaggagtttggggacaccggggagggctgggagacagtggagatgcaccctgcctacaccgaggaagagctgaggcgctttgaagaggagctggctgcccgggaggcagagctgaatgccaaggcccagcgcctcagccaggagacagaggctctagggcggtcccagggccgcctggaggcccagaagagagagctgcagcaggctgtgctgcacatggagcagcggaagcagcagcagcagcagcagcaaggccacaaggccccggctgcccaccctgaggggcagctcaagttccacccagacacagacgatgtacctgtcccagctccagccggtgaccagaaggaggtggacacttcagaaaagaaacttctcgagcggctccctgaggttgaggtgccccagcatctgtgatcctccgggaccccagccctcaggattcctgatgctccaaggcgactgatgggcgctggatgaagtggcacagtcagcttccctgggggccggtgtcatgttgggctcctggggcgggggcacggcctggcatttcacgcattgctgccaccccagatccacctgtctccactttcacagcctccaagtctgtggctcttcccttctgtcctccgaggggcttgccttctctcgtgtccagtgaggtgctcagtgatcggcttaacttagagaagcccgccccctccccttctccgtctgtcccaagagggtctgctctgagcctgcgttcctaggtggctcggcctcagctgcctgggttgtggccgccctagcatcctgtatgcccacagctactggaatccccgctgctgctccaggccaagcttctggttgattaatgagggcatggggtggtccctcaagaccttcccctaccttttgtggaaccagtgaccaggacctaggcccagcccctcagcctcatctggagcccctgaagaccagtcccacccacctttctggcctcatctgacactgctccgcatcctgctgtgtgtcctgttccatgttccggttccatccaaatacactttctggaacaaaaaaaagaaaaaaaaaaaaaaaaagagggaaaaaaaaaaaagaaaaaaaaaaaaaaaaaagagtgtgtgggggggcgggggggaaaaaaagggggcccgggaaaaaatttttaaaaacatgtgggggggggggggggaccccagttgatgtgctaggccacaagttgggctaaaagcggtgtgtctcgaaaagaaacactcgcggggccacgagcacaaggcgggggggtttcctcccaaaataaaaaaggccgggggggaacacgcggcggtttcgcgaacacctccgagggggccctccgaggcgcacacgggggctctacacagcgggtccacagggcgcacacattaaaattacccgcacgggggg

SEQ ID NO: 301041 - DNA, 2120 bp, Homo sapiens
  misc_feature (28)..(28): n is a, c, g, or t
tgcaggctggtactggcctgggatgtanggatcgccctctgcggtgaaggagagaccacactgccatgcctccctctgggccccgaggaaccctccttctgttgccgctgctgctgctgctcctgcttcgcgccgtgctggctgtccccctggagcgaggggcgcccaacaaggaggagacccctgcgactgagagtcccgacacaggcctgtactaccaccggtacctccaggaggtcatcgatgtactggagacggatgggcatttccgagagaagctgcaggctgccaatgcggaggacatcaagagcgggaagctgagccgagagctggactttgtcagccaccacgtccgcaccaagctggatgagctcaagcgacaggagaacagtttgaacacctggaccctcagaaccagcatacattcgaggcccgcgacctggagctgctgatccagacggccacccgggaccttgcccagtacgacgcagcccatcatgaagagttcaagcgctacgagatgcttaaggaacacgagagacggcgttatctggagtcactgggagaggagcagagaaaggaggcggagaggaagctggaagagcaacagcgccggcaccgcgagcaccctaaagtcaacgtgcctggcagccaagcccagttgaaggaggtgtgggagctggaggcactcttcaccaaggagctggagaaagtgtacgacccaaagaatgaggaggacgacatgcgggagatggaggaggagcgactgcgcatgcgggagcatgtgatgaagaatgtggacaccaaccaggaccgcctcgtgaccctggaggagttcctcgcatccactcagaggaaggagtttggggacaccggggagggctgggagacagtggagatgcaccctgcctacaccgaggaagagctgaggcgctttgaagaggagctggctgcccgggaggcagagctgaatgccaaggcccagcgcctcagccaggagacagaggctctagggcggtcccagggccgcctggaggcccagaagagagagctgcagcaggctgtgctgcacatggagcagcggaagcagcagcagcagcagcagcaaggccacaaggccccggctgcccaccctgaggggcagctcaagttccacccagacacagacgatgtacctgtcccagctccagccggtgaccagaaggaggtggacacttcagaaaagaaacttctcgagcggctccctgaggttgaggtgccccagcatctgtgatcctccgggaccccagccctcaggattcctgatgctccaaggcgactgatgggcgctggatgaagtggcacagtcagcttccctgggggccggtgtcatgttgggctcctggggcgggggcacggcctggcatttcacgcattgctgccaccccagatccacctgtctccactttcacagcctccaagtctgtggctcttcccttctgtcctccgaggggcttgccttctctcgtgtccagtgaggtgctcagtgatcggcttaacttagagaagcccgccccctccccttctccgtctgtcccaagagggtctgctctgagcctgcgttcctaggtggctcggcctcagctgcctgggttgtggccgccctagcatcctgtatgcccacagctactggaatccccgctgctgctccaggccaagcttctggttgattaatgagggcatggggtggtccctcaagaccttcccctaccttttgtggaaccagtgatgcctcaaagacagtgtcccctccacagctgggtgccaggggcaggggatcctcagtatagccggtgaaccctgataccaggagcctgggcctccctgaacccctggcttccagccatctcatcgccagcctcctcctggacctcttggcccccagccccttccccacacagccccagaagggtcccagagctgaccccactccaggacctaggcccagcccctcagcctcatctggagcccctgaagaccagtcccacccacctttctggcctcatctgacactgctccgcatcctgctgtgtgtcctgttccatgttccggttccatccaaatacactttctggaacaaa

SEQ ID NO: 301042 - DNA, 1875 bp, Homo sapiens
  misc_feature (28)..(28): n is a, c, g, or t
tgcaggctggtactggcctgggatgtanggatcgccctctgcggtgaaggagagaccacactgccatgcctccctctgggccccgaggaaccctccttctgttgccgctgctgctgctgctcctgcttcgcgccgtgctggctgtccccctggagcgaggggcgcccaacaaggaggagacccctgcgactgagagtcccgacacaggcctgtactaccaccggtacctccaggaggtcatcgatgtactggagacggatgggcatttccgagagaagctgcaggctgccaatgcggaggacatcaagagcgggaagctgagccgagagctggactttgtcagccaccacgtccgcaccaagctggatgagctcaagcgacaggaggtgtcacggctgcggatgctgctcaaggccaagatggacgccgagcaggatcccaatgtacaggtggatcatctgaatctcctgaaacagtttgaacacctggaccctcagaaccagcatacattcgaggcccgcgacctggagctgctgatccagacggccacccgggaccttgcccagtacgacgcagcccatcatgaagagttcaagcgctacgagatgcttaaggaacacgagagacggcgttatctggagtcactgggagaggagcagagaaaggaggcggagaggaagctggaagagcaacagcgccggcaccgcgagcaccctaaagtcaacgtgcctggcagccaagcccagttgaaggaggtgtgggaggagctggatggactggaccccaacaggtttaaccccaagaccttcttcatactgcatgatatcaacagtgatggtgtcctggatgagcaggagctggaggcactcttcaccaaggagctggagaaagtgtacgacccaaagaatgaggaggacgacatgcgggagatggaggaggagcgactgcgcatgcgggagcatgtgatgaagaatgtggacaccaaccaggaccgcctcgtgaccctggaggagttcctcgcatccactcagaggaaggagtttggggacaccggggagggctgggagacagtggagatgcaccctgcctacaccgaggaagagctgaggcgctttgaagaggagctggctgcccgggaggcagagctgaatgccaaggcccagcgcctcagccaggagacagaggctctagggcggtcccagggccgcctggaggcccagaagagagagctgcagcaggctgtgctgcacatggagcagcggaagcagcagcagcagcagcagcaaggccacaaggccccggctgcccaccctgaggggcagctcaagttccacccagacacagacgatgtacctgtcccagctccagccggtgaccagaaggaggtggacacttcagaaaagaaacttctcgagcggctccctgaggttgaggtgccccagcatctgtgatcctccgggaccccagccctcaggattcctgatgctccaaggcgactgatgggcgctggatgaagtggcacagtcagcttccctgggggccggtgtcatgttgggctcctggggcgggggcacggcctggcatttcacgcattgctgccaccccagatccacctgtctccactttcacagcctccaagtctgtggctcttcccttctgtcctccgaggggcttgccttctctcgtgtccagtgaggtgctcagtgatcggcttaacttagagaaccaggacctaggcccagcccctcagcctcatctggagcccctgaagaccagtcccacccacctttctggcctcatctgacactgctccgcatcctgctgtgtgtcctgttccatgttccggttccatccaaatacactttctggaacaaa

SEQ ID NO: 301043 - DNA, 1794 bp, Homo sapiens
  misc_feature (15)..(15): n is a, c, g, or t
gcggctgtacgcccngcgggttatgggatgcggtgaaggagagaccacactgccatgcctccctctgggccccgaggaaccctccttctgttgccgctgctgctgctgctcctgcttcgcgccgtgctggctgtccccctggagcgaggggcgcccaacaaggaggagacccctgcgactgagagtcccgacacaggcctgtactaccaccggtacctccaggaggtcatcgatgtactggagacggatgggcatttccgagagaagctgcaggctgccaatgcggaggacatcaagagcgggaagctgagccgagagctggactttgtcagccaccacgtccgcaccaagctggatgagctcaagcgacaggaggtgtcacggctgcggatgctgctcaaggccaagatggacgccgagcaggatcccaatgtacaggtggatcatctgaatctcctgaaacagtttgaacacctggaccctcagaaccagcatacattcgaggcccgcgacctggagctgctgatccagacggccacccgggaccttgcccagtacgacgcagcccatcatgaagagttcaagcgctacgagatgcttaaggaacacgagagacggcgttatctggagtcactgggagaggagcagagaaaggaggcggagaggaagctggaagagcaacagcgccggcaccgcgagcaccctaaagtcaacgtgcctggcagccaagcccagttgaaggaggtgtgggaggagctggatggactggaccccaacaggtttaaccccaagaccttcttcatactgcatgatatcaacagtgatggtgtcctggatgagcaggagctggaggcactcttcaccaaggagctggagaaagtgtacgacccaaagaatgaggaggacgacatgcgggagatggaggaggagcgactgcgcatgcgggagcatgtgatgaagaatgtggacaccaaccaggaccgcctcgtgaccctggaggagttcctcgcatccactcagaggaaggagtttggggacaccggggagggctgggagacagtggagatgcaccctgcctacaccgaggaagagctgaggcgctttgaagaggagctggctgcccgggaggcagagctgaatgccaaggcccagcgcctcagccaggagacagaggctctagggcggtcccagggccgcctggaggcccagaagagagagctgcagcaggctgtgctgcacatggagcagcggaagcagcagcagcagcagcagcaaggccacaaggccccggctgcccaccctgaggggcagctcaagttccacccagacacagacgatgtacctgtcccagctccagccggtgaccagaaggaggtggacacttcagaaaagaaacttctcgagcggctccctgaggttgaggtgccccagcatctgtgatctgcctcaaagacagtgtcccctccacagctgggtgccaggggcaggggatcctcagtatagccggtgaaccctgataccaggagcctgggcctccctgaacccctggcttccagccatctcatcgccagcctcctcctggacctcttggcccccagccccttccccacacagccccagaagggtcccagagctgaccccactccaggacctaggcccagcccctcagcctcatctggagcccctgaagaccagtcccacccacctttctggcctcatctgacactgctccgcatcctgctgtgtgtcctgttccatgttccggttccatccaaatacactttctggaacaaa

SEQ ID NO: 301044 - DNA, 1407 bp, Homo sapiens
  misc_feature (28)..(28): n is a, c, g, or t
tgcaggctggtactggcctgggatgtanggatcgccctctgcggtgaaggagagaccacactgccatgcctccctctgggccccgaggaaccctccttctgttgccgctgctgctgctgctcctgcttcgatccactcagaggaaggagtttggggacaccggggagggctgggagacagtggagatgcaccctgcctacaccgaggaagagctgaggcgctttgaagaggagctggctgcccgggaggcagagctgaatgccaaggcccagcgcctcagccaggagacagaggctctagggcggtcccagggccgcctggaggcccagaagagagagctgcagcaggctgtgctgcacatggagcagcggaagcagcagcagcagcagcagcaaggccacaaggccccggctgcccaccctgaggggcagctcaagttccacccagacacagacgatgtacctgtcccagctccagccggtgaccagaaggaggtggacacttcagaaaagaaacttctcgagcggctccctgaggttgaggtgccccagcatctgtgatcctccgggaccccagccctcaggattcctgatgctccaaggcgactgatgggcgctggatgaagtggcacagtcagcttccctgggggccggtgtcatgttgggctcctggggcgggggcacggcctggcatttcacgcattgctgccaccccagatccacctgtctccactttcacagcctccaagtctgtggctcttcccttctgtcctccgaggggcttgccttctctcgtgtccagtgaggtgctcagtgatcggcttaacttagagaagcccgccccctccccttctccgtctgtcccaagagggtctgctctgagcctgcgttcctaggtggctcggcctcagctgcctgggttgtggccgccctagcatcctgtatgcccacagctactggaatccccgctgctgctccaggccaagcttctggttgattaatgagggcatggggtggtccctcaagaccttcccctaccttttgtggaaccagtgatgcctcaaagacagtgtcccctccacagctgggtgccaggggcaggggatcctcagtatagccggtgaaccctgataccaggagcctgggcctccctgaacccctggcttccagccatctcatcgccagcctcctcctggacctcttggcccccagccccttccccacacagccccagaagggtcccagagctgaccccactccaggacctaggcccagcccctcagcctcatctggagcccctgaagaccagtcccacccacctttctggcctcatctgacactgctccgcatcctgctgtgtgtcctgttccatgttccggttccatccaaatacactttctggaacaaa

SEQ ID NO: 301045 - DNA, 1760 bp, Homo sapiens
  misc_feature (15)..(15): n is a, c, g, or t
gcggctgtacgcccngcgggttatgggatgcggtgaaggagagaccacactgccatgcctccctctgggccccgaggaaccctccttctgttgccgctgctgctgctgctcctgcttcgcgccgtgctggctgtccccctggagcgaggggcgcccaacaaggaggagacccctgcgactgagagtcccgacacaggcctgtactaccaccggtacctccaggaggtcatcgatgtactggagacggatgggcatttccgagagaagctgcaggctgccaatgcggaggacatcaagagcgggaagctgagccgagagctggactttgtcagccaccacgtccgcaccaagctggatgagctcaagcgacaggaggtgtcacggctgcggatgctgctcaaggccaagatggacgccgagcaggatcccaatgtacaggtggatcatctgaatctcctgaaacagtttgaacacctggaccctcagaaccagcatacattcgaggcccgcgacctggagctgctgatccagacggccacccgggaccttgcccagtacgacgcagcccatcatgaagagttcaagcgctacgagatgcttaaggaacacgagagacggcgttatctggagtcactgggagaggagcagagaaaggaggcggagaggaagctggaagagcaacagcgccggcaccgcgagcaccctaaagtcaacgtgcctggcagccaagcccagttgaaggaggtgtgggaggagctggatggactggaccccaacaggtttaaccccaagaccttcttcatactgcatgatatcaacagtgatggtgtcctggatgagcaggagctggaggcactcttcaccaaggagctggagaaagtgtacgacccaaagaatgaggaggacgacatgcgggagatggaggaggagcgactgcgcatgcgggagcatgtgatgaagaatgtggacaccaaccaggaccgcctcgtgaccctggaggagttcctcgcatccactcagaggaaggagtttggggacaccggggagggctgggagacagtggagatgcaccctgcctacaccgaggaagagctgaggcgctttgaagaggagctggctgcccgggaggcagagctgaatgccaaggcccagcgcctcagccaggagacagaggctctagggcggtcccagggccgcctggaggcccagaagagagagctgcagcaggctgtgctgcacatggagcagcggaagcagcagcagcagcagcagcaaggccacaaggccccggctgcccaccctgaggggcagctcaagttccacccagacacagacgatgtacctgtcccagctccagccggtgaccagaaggaggtggacacttcagaaaagaaacttctcgagcggctccctgaggttgaggtgccccagcatctgtgatcctccgggaccccagccctcaggattcctgatgctccaaggcgactgatgggcgctggatgaagtggcacagtcagcttccctgggggccggtgtccctcctcctggacctcttggcccccagccccttccccacacagccccagaagggtcccagagctgaccccactccaggacctaggcccagcccctcagcctcatctggagcccctgaagaccagtcccacccacctttctggcctcatctgacactgctccgcatcctgctgtgtgtcctgttccatgttccggttccatccaaatacactttctggaacaaa

SEQ ID NO: 301046 - DNA, 2138 bp, Homo sapiens
  misc_feature (15)..(15): n is a, c, g, or t
gcggctgtacgcccngcgggttatgggatgcggtgaaggagagaccacactgccatgcctccctctgggccccgaggaaccctccttctgttgccgctgctgctgctgctcctgcttcgcgccgtgctggctgtccccctggagcgaggggcgcccaacaaggaggagacccctgcgactgagagtcccgacacaggcctgtactaccaccggtacctccaggaggtcatcgatgtactggagacggatgggcatttccgagagaagctgcaggctgccaatgcggaggacatcaagagcgggaagctgagccgagagctggactttgtcagccaccacgtccgcaccaagctggatgagctcaagcgacaggaggtgtcacggctgcggatgctgctcaaggccaagatggacgccgagcaggatcccaatgtacaggtggatcatctgaatctcctgaaacagtttgaacacctggaccctcagaaccagcatacattcgaggcccgcgacctggagctgctgatccagacggccacccgggaccttgcccagtacgacgcagcccatcatgaagagttcaagcgctacgagatgcttaaggaacacgagagacggcgttatctggagtcactgggagaggagcagagaaaggaggcggagaggaagctggaagagcaacagcgccggcaccgcgagcaccctaaagtcaacgtgcctggcagccaagcccagttgaaggaggtgtgggaggagctggatggactggaccccaacaggtttaaccccaagaccttcttcatactgcatgatatcaacagtgatggtgtcctggatgagcaggagctggaggcactcttcaccaaggagctggagaaagtgtacgacccaaagaatgaggaggacgacatgcgggagatggaggaggagcgactgcgcatgcgggagcatgtgatgaagaatgtggacaccaaccaggaccgcctcgtgaccctggaggagttcctcgcatccactcagaggaaggagtttggggacaccggggagggctgggagacagtggagatgcaccctgcctacaccgaggaagagctgaggcgctttgaagaggagctggctgcccgggaggcagagctgaatgccaaggcccagcgcctcagccaggagacagaggctctagggcggtcccagggccgcctggaggcccagaagagagagctgcagcaggctgtgctgcacatggagcagcggaagcagcagcagcagcagcagcaaggccacaaggccccggctgcccaccctgaggggcagctcaagttccacccagacacagacgatgtacctgtcccagctccagccggtgaccagaaggaggtggacacttcagaaaagaaacttctcgagcggctccctgaggttgaggtgccccagcatctgtgatcctccgggaccccagccctcaggattcctgatgctccaaggcgactgatgggcgctggatgaagtggcacagtcagcttccctgggggccggtgtcatgttgggctcctggggcgggggcacggcctggcatttcacgcattgctgccaccccagatccacctgtctccactttcacagccacccgggaccttgcccagtacgacgcagcccatcatgaagagttcaagcgctacgagatgcttaaggaacacgagagacggcgttatctggagtcactgggagaggagcagagaaatgaggcggagaggaagctggaagagcaacagcgccggcaccgcgagcaccctaaagtcaacgtgcctggcagccaagcccagttgaaggaggtgtgggaggagctggatggactggaccccaacaggtttaaccccaagaccttcttcatactgcatgatatcaacagtgatggtgtcctggatgagcaggagctggaggcactcttcaccaaggagctggagaaagtgtacgacccaaagaatgaggagccaggacctaggcccagcccctcagcctcatctggagcccctgaagaccagtcccacccacctttctggcctcatctgacactgctccgcatcctgctgtgtgtcctgttccatgttccggttccatccaaatacactttctggaacaaa

SEQ ID NO: 301047 - DNA, 1662 bp, Homo sapiens
  misc_feature (15)..(15): n is a, c, g, or t
gcggctgtacgcccngcgggttatgggatgcggtgaaggagagaccacactgccatgcctccctctgggccccgaggaaccctccttctgttgccgctgctgctgctgctcctgcttcgcgccgtgctggctgtccccctggagcgaggggcgcccaacaaggaggagacccctgcgactgagagtcccgacacaggcctgtactaccaccggtacctccaggaggtcatcgatgtactggagacggatgggcatttccgagagaagctgcaggctgccaatgcggaggacatcaagagcgggaagctgagccgagagctggactttgtcagccaccacgtccgcaccaagctggatgagctcaagcgacaggaggtgtcacggctgcggatgctgctcaaggccaagatggacgccgagcaggatcccaatgtacaggtggatcatctgaatctcctgaaacagtttgaacacctggaccctcagaaccagcatacattcgaggcccgcgacctggagctgctgatccagacggccacccgggaccttgcccagtacgacgcagcccatcatgaagagttcaagcgctacgagatgcttaaggaacacgagagacggcgttatctggagtcactgggagaggagcagagaaaggaggcggagaggaagctggaagagcaacagcgccggcaccgcgagcaccctaaagtcaacgtgcctggcagccaagcccagttgaaggaggtgtgggaggagctggatggactggaccccaacaggtttaaccccaagaccttcttcatactgcatgatatcaacagtgatggtgtcctggatgagcaggagctggaggcactcttcaccaaggagctggagaaagtgtacgacccaaagaatgaggaggacgacatgcgggagatggaggaggagcgactgcgcatgcgggagcatgtgatgaagaatgtggacaccaaccaggaccgcctcgtgaccctggaggagttcctcgcatccactcagaggaaggagtttggggacaccggggagggctgggagacagtggagatgcaccctgcctacaccgaggaagagctgaggcgctttgaagaggagctggctgcccgggaggcagagctgaatgccaaggcccagcgcctcagccaggagacagaggctctagggcggtcccagggccgcctggaggcccagaagagagagctgcagcaggctgtgctgcacatggagcagcggaagcagcagcagcagcagcagcaaggccacaaggccccggctgcccaccctgaggggcagctcaagttccacccagacacagacgatgtacctgtcccagctccagccggtgaccagaaggaggtggacacttcagaaaagaaacttctcgagcggctccctgaggttgaggtgccccagcatctgtgatcctccgggaccccagccctcaggattcctgatgctccaaggcgactgatgggcgctggatgaagtggcacaccaggacctaggcccagcccctcagcctcatctggagcccctgaagaccagtcccacccacctttctggcctcatctgacactgctccgcatcctgctgtgtgtcctgttccatgttccggttccatccaaatacactttctggaacaaa

SEQ ID NO: 301048 - DNA, 1554 bp, Homo sapiens
  misc_feature (15)..(15): n is a, c, g, or t
gcggctgtacgcccngcgggttatgggatgcggtgaaggagagaccacactgccatgcctccctctgggccccgaggaaccctccttctgttgccgctgctgctgctgctcctgcttcgcgccgtgctggctgtccccctggagcgaggggcgcccaacaaggaggagacccctgcgactgagagtcccgacacaggcctgtactaccaccggtacctccaggaggtcatcgatgtactggagacggatgggcatttccgagagaagctgcaggctgccaatgcggaggacatcaagagcgggaagctgagccgagagctggactttgtcagccaccacgtccgcaccaagctggatgagctcaagcgacaggaggtgtcacggctgcggatgctgctcaaggccaagatggacgccgagcaggatcccaatgtacaggtggatcatctgaatctcctgaaacagtttgaacacctggaccctcagaaccagcatacattcgaggcccgcgacctggagctgctgatccagacggccacccgggaccttgcccagtacgacgcagcccatcatgaagagttcaagcgctacgagatgcttaaggaacacgagagacggcgttatctggagtcactgggagaggagcagagaaaggaggcggagaggaagctggaagagcaacagcgccggcaccgcgagcaccctaaagtcaacgtgcctggcagccaagcccagttgaaggaggtgtgggaggagctggatggactggaccccaacaggtttaaccccaagaccttcttcatactgcatgatatcaacagtgatggtgtcctggatgagcaggagctggaggcactcttcaccaaggagctggagaaagtgtacgacccaaagaatgaggaggacgacatgcgggagatggaggaggagcgactgcgcatgcgggagcatgtgatgaagaatgtggacaccaaccaggaccgcctcgtgaccctggaggagttcctcgcatccactcagaggaaggagtttggggacaccggggagggctgggagacagtggagatgcaccctgcctacaccgaggaagagctgaggcgctttgaagaggagctggctgcccgggaggcagagctgaatgccaaggcccagcgcctcagccaggagacagaggctctagggcggtcccagggccgcctggaggcccagaagagagagctgcagcaggctgtgctgcacatggagcagcggaagcagcagcagcagcagcagcaaggccacaaggccccggctgcccaccctgaggggcagctcaagttccacccagacacagacgatgtacctgtcccagctccagccggtgaccagaaggaggtggacacttcagaaaagaaacttctcgagccaggacctaggcccagcccctcagcctcatctggagcccctgaagaccagtcccacccacctttctggcctcatctgacactgctccgcatcctgctgtgtgtcctgttccatgttccggttccatccaaatacactttctggaacaaa

SEQ ID NO: 301049 - DNA, 1351 bp, Homo sapiens
  misc_feature (15)..(15): n is a, c, g, or t
gcggctgtacgcccngcgggttatgggatgcggtgaaggagagaccacactgccatgcctccctctgggccccgaggaaccctccttctgttgccgctgctgctgctgctcctgcttcgcgccgtgctggctgtccccctggagcgaggggcgcccaacaaggaggagacccctgcgactgagagtcccgacacaggcctgtactaccaccggtacctccaggaggtcatcgatgtactggagacggatgggcatttccgagagaagctgcaggctgccaatgcggaggacatcaagagcgggaagctgagccgagagctggactttgtcagccaccacgtccgcaccaagctggatgagctcaagcgacaggaggtgtcacggctgcggatgctgctcaaggccaagatggacgccgagcaggatcccaatgtacaggtggatcatctgaatctcctgaaacagtttgaacacctggaccctcagaaccagcatacattcgaggcccgcgacctggagctgctgatccagacggccacccgggaccttgcccagtacgacgcagcccatcatgaagagttcaagcgctacgagatgcttaaggaacacgagagacggcgttatctggagtcactgggagaggagcagagaaaggaggcggagaggaagctggaagagcaacagcgccggcaccgcgagcaccctaaagtcaacgtgcctggcagccaagcccagttgaaggaggtgtgggaggagctggatggactggaccccaacaggtttaaccccaagaccttcttcatactgcatgatatcaacagtgatggtgtcctggatgagcaggagctggaggcactcttcaccaaggagctggagaaagtgtacgacccaaagaatgaggaggacgacatgcgggagatggaggaggagcgactgcgcatgcgggagcatgtgatgaagaatctcaagaccttcccctaccttttgtggaaccagtgatgcctcaaagacagtgtcccctccacagctgggtgccaggggcaggggatcctcagtatagccggtgaaccctgataccaggagcctgggcctccctgaacccctggcttccagccatctcatcgccagcctcctcctggacctcttggcccccagccccttccccacacagccccagaagggtcccagagctgaccccactccaggacctaggcccagcccctcagcctcatctggagcccctgaagaccagtcccacccacctttctggcctcatctgacactgctccgcatcctgctgtgtgtcctgttccatgttccggttccatccaaatacactttctggaacaaa

SEQ ID NO: 301050 - DNA, 1206 bp, Homo sapiens
  misc_feature (15)..(15): n is a, c, g, or t
gcggctgtacgcccngcgggttatgggatgcggtgaaggagagaccacactgccatgcctccctctgggccccgaggaaccctccttctgttgccgctgctgctgctgctcctgcttcgcgccgtgctggctgtccccctggagcgaggggcgcccaacaaggaggagacccctgcgactgagagtcccgacacaggcctgtactaccaccggtacctccaggaggtcatcgatgtactggagacggatgggcatttccgagagaagctgcaggctgccaatgcggaggacatcaagagcgggaagctgagccgagagctggactttgtcagccaccacgtccgcaccaagctggatgagctcaagcgacaggaggtgtcacggctgcggatgctgctcaaggccaagatggacgccgagcaggatcccaatgtacaggtggatcatctgaatctcctgaaacagtttgaacacctggaccctcagaaccagcatacattcgaggcccgcgacctggagctgctgatccagacggccacccgggaccttgcccagtacgacgcagcccatcatgaagagttcaagcgctacgagatgcttaaggaacacgagagacggcgttatctggagtcactgggagaggagcagagaaaggaggcggagaggaagctggaagagcaacagcgccggcaccgcgagcaccctaaagtcaacgtgcctggcagccaagcccagttgaaggaggtgtgggaggagctggatggactggaccccaacaggtttaaccccaagaccttcttcatactgcatgatatcaacagtgatggtgtcctggatgagcaggagctggaggcactcttcaccaaggagctggagaaagtgtacgacccaaagaatgaggaggacgacatgcgggagatggaggaggagcgactgcgcatgcgggagcatgtgatgaagaatgtggacaccaaccaggaccgcctcgtgaccctggaggagttcctcgcatccactcagaggaaggagtttggggacaccggggagggctgggagccaggacctaggcccagcccctcagcctcatctggagcccctgaagaccagtcccacccacctttctggcctcatctgacactgctccgcatcctgctgtgtgtcctgttccatgttccggttccatccaaatacactttctggaacaaa

SEQ ID NO: 301051 - DNA, 1069 bp, Homo sapiens
  misc_feature (9)..(9): n is a, c, g, or t
  misc_feature (71)..(71): n is a, c, g, or t
  misc_feature (88)..(88): n is a, c, g, or t
  misc_feature (93)..(93): n is a, c, g, or t
acacttcancaaccttctctcaaaatccacaaccccaacaacaacaaccacaacaacaaaccaaaaaccanccccctcaccaccttcnccccncttcaagtccacccagacacagacgatgtacctgtcccagctccagccggtgaccagaaggaggtggacacttcagaaaagaaacttctcgagcggctccctgaggttgaggtgccccagcatctgtgatcctccgggaccccagccctcaggattcctgatgctccaaggcgactgatgggcgctggatgaagtggcacagtcagcttccctgggggccggtgtcatgttgggctcctggggcgggggcacggcctggcatttcacgcattgctgccaccccagatccacctgtctccactttcacagcctccaagtctgtggctcttcccttctgtcctccgaggggcttgccttctctcgtgtccagtgaggtgctcagtgatcggcttaacttagagaagcccgccccctccccttctccgtctgtcccaagagggtctgctctgagcctgcgttcctaggtggctcggcctcagctgcctgggttgtggccgccctagcatcctgtatgcccacagctactggaatccccgctgctgctccaggccaagcttctggttgattaatgagggcatggggtggtccctcaagaccttcccctaccttttgtggaaccagtgatgcctcaaagacagtgtcccctccacagctgggtgccaggggcaggggatcctcagtatagccggtgaaccctgataccaggagcctgggcctccctgaacccctggcttccagccatctcatcgccagcctcctcctggacctcttggcccccagccccttccccacacagccccagaagggtcccagagctgaccccactccaggacctaggcccagcccctcagcctcatctggagcccctgaagaccagtcccacccacctttctggcctcatctgacactgctccgcatcctgctgtgtgtcctgttccatgttccggttccatccaaatacactttctggaacaaa

SEQ ID NO: 301052 - DNA, 1113 bp, Homo sapiens
  misc_feature (15)..(15): n is a, c, g, or t
gcggctgtacgcccngcgggttatgggatgcggtgaaggagagaccacactgccatgcctccctctgggccccgaggaaccctccttctgttgccgctgctgctgctgctcctgcttcgcgccgtgctggctgtccccctggagcgaggggcgcccaacaaggaggagacccctgcgactgagagtcccgacacaggcctgtactaccaccggtacctccaggaggtcatcgatgtactggagacggatgggcatttccgagagaagctgcaggctgccaatgcggaggacatcaagagcgggaagctgagccgagagctggactttgtcagccaccacgtccgcaccaagctggatgagctcaagcgacaggaggtgtcacggctgcggatgctgctcaaggccaagatggacgccgagcaggatcccaatgtacaggtggatcatctgaatctcctgaaacagtttgaacacctggaccctcagaaccagcatacattcgaggcccgcgacctggagctgctgatccagacggccacccgggaccttgcccagtacgacgcagcccatcatgaagagttcaagcgctacgagatgcttaaggaacacgagagacggcgttatctggagtcactgggagaggagcagagaaaggaggcggagaggaagctggaagagcaacagcgccggcaccgcgagcaccctaaagtcaacgtgcctggcagccaagcccagttgaaggaggtgtgggaggagctggatggactggaccccaacaggtttaaccccaagaccttcttcatactgcatgatatcaacagtgatggtgtcctggatgagcaggagctggaggcactcttcaccaaggagctggagaaagtgtacgacccaaagaatgaggaggacgacatgcgggagatggaggaggagcgactgcgcatgcgggagcatgtgatgaagaatccaggacctaggcccagcccctcagcctcatctggagcccctgaagaccagtcccacccacctttctggcctcatctgacactgctccgcatcctgctgtgtgtcctgttccatgttccggttccatccaaatacactttctggaacaaa

SEQ ID NO: 301053 - DNA, 1020 bp, Homo sapiens
  misc_feature (15)..(15): n is a, c, g, or t
gcggctgtacgcccngcgggttatgggatgcggtgaaggagagaccacactgccatgcctccctctgggccccgaggaaccctccttctgttgccgctgctgctgctgctcctgcttcgcgccgtgctggctgtccccctggagcgaggggcgcccaacaaggaggagacccctgcgactgagagtcccgacacaggcctgtactaccaccggtacctccaggaggtcatcgatgtactggagacggatgggcatttccgagagaagctgcaggctgccaatgcggaggacatcaagagcgggaagctgagccgagagctggactttgtcagccaccacgtccgcaccaagctggatgagctcaagcgacaggaggtgtcacggctgcggatgctgctcaaggccaagatggacgccgagcaggatcccaatgtacaggtggatcatctgaatctcctgaaacagtttgaacacctggaccctcagaaccagcatacattcgaggcccgcgacctggagctgctgatccagacggccacccgggaccttgcccagtacgacgcagcccatcatgaagagttcaagcgctacgagatgcttaaggaacacgagagacggcgttatctggagtcactgggagaggagcagagaaaggaggcggagaggaagctggaagagcaacagcgccggcaccgcgagcaccctaaagtcaacgtgcctggcagccaagcccagttgaaggaggtgtgggaggagctggatggactggaccccaacaggtttaaccccaagaccttcttcatactgcatgatatcaacagtgatggtgtcctggatgagcaggagctggaggcactcttcaccaaggagccaggacctaggcccagcccctcagcctcatctggagcccctgaagaccagtcccacccacctttctggcctcatctgacactgctccgcatcctgctgtgtgtcctgttccatgttccggttccatccaaatacactttctggaacaaa

SEQ ID NO: 301054 - DNA, 1210 bp, Homo sapiens
  misc_feature (28)..(28): n is a, c, g, or t
tgcaggctggtactggcctgggatgtanggatcgccctctgcggtgaaggagagaccacactgccatgcctccctctgggccccgaggaaccctccttctgttgccgctgctgctgctgctcctgcttcgcgccgtgctggctgtccccctggagcgaggggcgcccaacaaggaggagacccctgcgactgagagtcccgacacaggcctgtactaccaccggtacctccaggaggtcatcgatgtactggagacggatgggcatttccgagagaagctgcaggctgccaatgcggaggacatcaagagcgggaagctgagccgagagctggactttgtcagccaccacgtccgcaccaagctggatgagctcaagcgacaggaggtgtcacggctgcggatgctgctcaaggccaagatggacgccgagcaggatcccaatgtacaggtggatcatctgaatctcctgaaacagtttgaacacctggaccctcagaaccagcatacattcgaggcccgcgacctggagctgctgatccagacggccacccgggaccttgcccagtacgacgcagcccatcatgaagagttcaagcgctacgagatgcttaaggaacacgagagacggcgttatctggagtcactgggagaggagcagagaaaggaggcggagaggaagctggaagagcaacagcgccggcaccgcgagcaccctaaagtcaacgtgcctggcagccaagcccagttgaaggaggtgtgggaggagctggatggactggaccccaacaggtttaaccccaagaccttcttcatactgcatgctcaagaccttcccctaccttttgtggaaccagtgatgcctcaaagacagtgtcccctccacagctgggtgccaggggcaggggatcctcagtatagccggtgaaccctgataccaggagcctgggcctccctgaacccctggcttccagccatctcatcgccagcctcctcctggacctcttggcccccagccccttccccacacagccccagaagggtcccagagctgaccccactccaggacctaggcccagcccctcagcctcatctggagcccctgaagaccagtcccacccacctttctggcctcatctgacactgctccgcatcctgctgtgtgtcctgttccatgttccggttccatccaaatacactttctggaacaaa

SEQ ID NO: 301055 - DNA, 1571 bp, Homo sapiens
  misc_feature (1)..(1): n is a, c, g, or t
  misc_feature (18)..(18): n is a, c, g, or t
  misc_feature (20)..(20): n is a, c, g, or t
nggtccggaattcccggnangccctctgcggtgaaggagagaccacaaggccccggctgcccaccctgaggggcagctcaagtccacccagacacagacgatgtacctgtcccagctccagccggtgaccagaaggaggtggacacttcagaaaagaaacttctcgagcggctccctgaggttgaggtgccccagcatctgtgatcctccgggaccccagcgccgtgctggctgtccccctggagcgaggggcgcccaacaaggaggagacccctgcgactgagagtcccgacacaggcctgtactaccaccggtacctccaggaggtcatcgatgtactggagacggatgggcatttccgagagaagctgcaggctgccaatgcggaggacatcaagagcgggaagctgagccgagagctggactttgtcagccaccacgtccgcaccaagctggatgagctcaagcgacaggaggtgtcacggctgcggatgctgctcaaggccaagatggacgccgagcaggatcccaatgtacaggtggatcatctgaatctcctgaaacagtttgaacacctggaccctcagaaccagcatacattcgaggcccgcgacctggagctgctgatccagacggccacccgggaccttgcccagtacgacgcagcccatcatgaagagttcaagcgctacgagatgcttaaggaacacgagagacggcgttatctggagtcactgggagaggagcagagaaaggaggcggagaggaagctggaagagcaacagcgccggcaccgcgagcaccctaaagtcaacgtgcctatgttgggctcctggggcgggggcacggcctggcatttcacgcattgctgccaccccagatccacctgtctccactttcacagcctccaagtctgtggctcttcccttctgtcctccgaggggcttgccttctctcgtgtccagtgaggtgctcagtgatcggcttaacttagagaagcccgccccctccccttctccgtctgtcccaagagggtctgctctgagcctgcgttcctaggtggctcggcctcagctgcctgggttgtggccgccctagcatcctgtatgcccacagctactggaatccccgctgctgctccaggccaagcttctggttgattaatgagggcatggggtggtccctcaagaccttcccctaccttttgtggaaccagtgatgcctcaaagacagtgtcccctccacagctgggtgccaggggcaggggatcctcagtatagccggtgaaccctgataccaggagcctgggcctccctgaacccctggcttccagccatctcatcgccagcctcctcctggacctcttggcccccagccccttccccacacagccccagaagggtcccagagctgaccccactccaggacctaggcccagcccctcagcctcatctggagcccctgaagaccagtcccacccacctttctggcctcatctgacactgctccgcatcctgctgtgtgtcctgttccatgttccggttccatccaaatacactttctggaacaaa

SEQ ID NO: 301056 - DNA, 881 bp, Homo sapiens
  misc_feature (28)..(28): n is a, c, g, or t
tgcaggctggtactggcctgggatgtanggatcgccctctgcggtgaaggagagaccacactgccatgcctccctctgggccccgaggaaccctccttctgttgccgctgctgctgctgctcctgcttcgcgccgtgctggctgtccccctggagcgaggggcgcccaacaaggaggagacccctgcgactgagagtcccgacacaggcctgtactaccaccggtacctccaggaggtcatcgatgtactggagacggatgggcatttccgagagaagctgcaggctgccaatgcggaggacatcaagagcgggaagctgagccgagagctggactttgtcagccaccacgtccgcaccaagctggatgagctcaagcgacaggaggtgtcacggctgcggatgctgctcaaggccaagatggacgccgagcaggatcccaatgtacaggtggatcatctgaatctcctgaaacagtttgaacacctggaccctcagaaccagcatacattcgaggcccgcgacctggagctgctgatccagacggccacccgggaccttgcccagtacgacgcagcccatcatgaagagttcaagcgctacgagatgcttaaggaacacgagagacggcgttatctggagtcactgggagaggagcagagaaaggaggcggagaggaagctggaagagcaacagcgccggcaccgcgagcaccctaaagtcaacgtgcctggcagccaagcccagttgaaggaggtgtgggaggagctggatggactggaccccaacaggtttaaccccaagaccttcttcatactgcatgtcctgctgtgtgtcctgttccatgttccggttccatccaaatacactttctggaacaaa

SEQ ID NO: 301057 - DNA, 911 bp, Homo sapiens
  misc_feature (28)..(28): n is a, c, g, or t
tgcaggctggtactggcctgggatgtanggatcgccctctgcggtgaaggagagaccacactgccatgcctccctctgggccccgaggaaccctccttctgttgccgctgctgctgctgctcctgcttcgcgccgtgctggctgtccccctggagcgaggggcgcccaacaaggaggagacccctgcgactgagagtcccgacacaggcctgtactaccaccggtacctccaggaggtcatcgatgtactggagacggatgggcatttccgagagaagctgcaggctgccaatgcggaggacatcaagagcgggaagctgagccgagagctggactttgtcagccaccacgtccgcaccaagctggatgagctcaagcgacaggaggtgtcacggctgcggatgctgctcaaggccaagatggacgccgagcaggatcccaatgtacaggtggatcatctgaatctcctgaaacagtttgaacacctggaccctcagaaccagcatacattcgaggcccgcgacctggagctgctgatccagacggccacccgggaccttgcccagtacgacgcagcccatcatgaagagttcaagcgctacgagatgcttaaggaacacgagagacggcgttatctggagtcactgggagaggagcagagaaaggaggcggagaggaagctggaagagcaacagcgccggcaccgcgagcaccctaaagtcaacgtgcctggcagccaagcccagttgaaggaggtgtggccaggacctaggcccagcccctcagcctcatctggagcccctgaagaccagtcccacccacctttctggcctcatctgacactgctccgcatcctgctgtgtgtcctgttccatgttccggttccatccaaatacactttctggaacaaa

SEQ ID NO: 301058 - DNA, 983 bp, Homo sapiens
  misc_feature (28)..(28): n is a, c, g, or t
tgcaggctggtactggcctgggatgtanggatcgccctctgcggtgaaggagagaccacactgccatgcctccctctgggccccgaggaaccctccttctgttgccgctgctgctgctgctcctgcttcgcgccgtgctggctgtccccctggagcgaggggcgcccaacaaggaggagacccctgcgactgagagtcccgacacaggcctgtactaccaccggtacctccaggaggtcatcgatgtactggagacggatgggcatttccgagagaagctgcaggctgccaatgcggaggacatcaagagcaacagcgccggcaccgcgagcaccctaaagtcaacgtgcctggcagccaagcccagttgaaggaggtgtgggaggagctggatggactggaccccaacaggtttaaccccaagaccttcttcatactgcatgatatcaacagtgatggtgtcctggatgagcaggagctggaggcactcttcaccaaggagctggagaaagtgtacgacccaaagaatgaggaggacgacatgcgggagatggaggaggagcgactgcgcatgcgggagcatgtgatgaagaatctcaagaccttcccctaccttttgtggaaccagtgatgcctcaaagacagtgtcccctccacagctgggtgccaggggcaggggatcctcagtatagccggtgaaccctgataccaggagcctgggcctccctgaacccctggcttccagccatctcatcgccagcctcctcctggacctcttggcccccagccccttccccacacagccccagaagggtcccagagctgaccccactccaggacctaggcccagcccctcagcctcatctggagcccctgaagaccagtcccacccacctttctggcctcatctgacactgctccgcatcctgctgtgtgtcctgttccatgttccggttccatccaaatacactttctggaacaaa

SEQ ID NO: 301059 - DNA, 496 bp, Homo sapiens
  misc_feature (28)..(28): n is a, c, g, or t
tgcaggctggtactggcctgggatgtanggatcgccctctgcggtgaaggagagaccacactgccatgcctccctctgggccccgaggaaccctccttctgttgccgctgctgctgctgctcctgcttcgcgccgtgctggctgtccccctggagcgaggggcgcccaacaaggaggagacccctgcgactgagagtcccgacacaggcctgtactaccaccggtacctccaggaggtcatcgatgtactggagacggatgggcatttccgagagaagctgcaggctgccaatgcggaggacatcaagagcgggaagctgagccgagagctggactttgtcagccaccaggacctaggcccagcccctcagcctcatctggagcccctgaagaccagtcccacccacctttctggcctcatctgacactgctccgcatcctgctgtgtgtcctgttccatgttccggttccatccaaatacactttctggaacaaa

SEQ ID NO: 301060 - DNA, 223 bp, Homo sapiens
tgggatccctgattccagaccatgactcctggacagcatttctggagctccctttggccagaggggagcatagtacccttaagggagtaactcaggactggcagcactcatgacaagctgactgaagggcccgtggaccttgagtaacattggtggtaaccaggtagtatttatcatggtcctgggtcactggtggccatggggagatactgctctactcgag

SEQ ID NO: 301061 - DNA, 1718 bp, Homo sapiens
ctggggcccccagagagggtggggagatgacacagttgttcccccagccctggcggggcgggcagcatggttcactccagcatgggggctccagaaataagaatgtctaagcccctggaggccgagaagcaaggtctggactccccatcagagcacacagacaccgaaagaaatggaccagacactaatcatcagaacccccaaaataagacctccccattctccgtgtccccaactggccccagtacaaagatcaaggctgaagaccccagtggcgattcagccccagcagcacccctgccccctcagccggcccagcctcatctgccccaggcccaactcatgttgacgggcagccagctagctggggacatacagcagctcctccagctccagcagctggtgcttgtgccaggccaccacctccagccacctgctcagttcctgctaccgcaggcccagcagagccagccaggcctgctaccgacaccaaatctattccagctacctcagcaaacccagggagctcttctgacctcccagccccgggccgggcttcccacacaggccgtgacccgccctacgctgcccgacccgcacctctcgcacccgcagccccccaaatgcttggagccaccatcccaccccgaggagcccagtgatctggaggagctggagcaattcgcccgcaccttcaagcaacgccgcatcaagctgggcttcacgcagggtgatgtgggcctggccatgggcaagctctacggcaacgacttcagccagacgaccatttcccgcttcgaggccctcaacctgagcttcaagaacatgtgcaaactcaagcccctcctggagaagtggctcaacgatgcagagactatgtctgtggactcaagcctgcccagccccaaccagctgagcagccccagcctgggtttcgacggcctgcccggccggagacgcaagaagaggaccagcatcgagacaaacgtccgcttcgccttagagaagagttttctagcgaaccagaagcctacctcagaggagatcctgctgatcgccgagcagctgcacatggagaaggaagtgatccgcgtctggttctgcaaccggcgccagaaggagaaacgcatcaacccctgcagtgcggcccccatgctgcccagcccagggaagccggccagctacagcccccatatggtcacaccccaagggggcgcggggaccttaccgttgtcccaagcttccagcagtctgagcacaacagttactaccttatcctcagctgtggggacgctccaccccagccggacagctggagggggtgggggcgggggcggggctgcgccccccctcaattccatcccctctgtcactcccccacccccggccaccaccaacagcacaaaccccagccctcaaggcagccactcggctatcggcttgtcaggcctgaaccccagcacggggtaagtgggtgcacgtgggaagctgtggggagaagcagggtcgctgctgcttctagggtggggagcggcaccccagttatgttggcaggtccctgcccctgctaatgcctctgctttgcctcttgcagaagcacaatggtggggttgagctccgggctgagtccagccctcatgagcaacaaccctttggccactatccaaggtgcgtgctgcctcatgtcacacccatcgtcaccagccccggaattcgag

SEQ ID NO: 301062 - DNA, 4486 bp, Homo sapiens
cgtcaacatgagttgggcctggggcagatgaggctggctggcggggcgggcagcatggttcactccagcatgggggctccagaaataagaatgtctaagcccctggaggccgagaagcaaggtctggactccccatcagagcacacagacaccgaaagaaatggaccagacactaatcatcagaacccccaaaataagacctccccattctccgtgtccccaactggccccagtacaaagatcaaggctgaagaccccagtggcgattcagccccagcagcacccctgccccctcagccggcccagcctcatctgccccaggcccaactcatgttgacgggcagccagctagctggggacatacagcagctcctccagctccagcagctggtgcttgtgccaggccaccacctccagccacctgctcagttcctgctaccgcaggcccagcagagccagccaggcctgctaccgacaccaaatctattccagctacctcagcaaacccagggagctcttctgacctcccagccccgggccgggcttcccacacagccccccaaatgcttggagccaccatcccaccccgaggagcccagtgatctggaggagctggagcaattcgcccgcaccttcaagcaacgccgcatcaagctgggcttcacgcagggtgatgtgggcctggccatgggcaagctctacggcaacgacttcagccagacgaccatttcccgcttcgaggccctcaacctgagcttcaagaacatgtgcaaactcaagcccctcctggagaagtggctcaacgatgcagagactatgtctgtggactcaagcctgcccagccccaaccagctgagcagccccagcctgggtttcgacggcctgcccggccggagacgcaagaagaggaccagcatcgagacaaacgtccgcttcgccttagagaagagttttctagcgaaccagaagcctacctcagaggagatcctgctgatcgccgagcagctgcacatggagaaggaagtgatccgcgtctggttctgcaaccggcgccagaaggagaaacgcatcaacccctgcagtgcggcccccatgctgcccagcccagggaagccggccagctacagcccccatatggtcacaccccaagggggcgcggggaccttaccgttgtcccaagcttccagcagtctgagcacaacagttactaccttatcctcagctgtggggacgctccaccccagccggacagctggagggggtgggggcgggggcggggctgcgccccccctcaattccatcccctctgtcactcccccacccccggccaccaccaacagcacaaaccccagccctcaaggcagccactcggctatcggcttgtcaggcctgaaccccagcacgggccctggcctctggtggaaccctgccccttaccagccttgatggcagcgggaatctggtgctgggggcagccggtgcagccccggggagccctggcctggtgacctcgccgctcttcttgaatcatgctgggctgcccctgctcagcaccccgcctggtgtgggcctggtctcagcagcggctgcggctgtggcagcctccatctccagcaagtctcctggcctctcctcctcatcctcttcatcctcatcctcctcctcctccacttgcagcgagacggcagcacagacccctggaggtccaggggggcccgaggcagggtccaaacctgagtgagggccagccatgcctcccctcccattcctctggtccctgccttggtcccttgcctgggaagagggcgaggaggccagtggtggggacgcagagggtcctcagagcaggagtgacaagggaggaaagaccaaaaaaacaaccaaccaaaaaaaaaaaaaaaaaggaaagaaactaaccaacaaaagagaaaaccaaaaataatcacaacagaaaccagctgccccaaaggaaccagaggtgaaaaacaaacaaaaaaaaaccaaaaacaaaccaaaaaaaaaaaaaacccacaaaatcaaacaaaccaaaaaaccagtcgcgagccagacctcagcgtgctcaccctcactgctacgacgccaaataaaaaccccagccaggggcggagaagcctccagcaggtcagacctcatgccaccgagccctggctgtgggaccaacccccaaccctgcctcccccgtgggggctacagaaggaaaaagagaagatgccagcttcctaatcccagcccccagccctgggccagcgaagacagggcacagcctgggcagatgggctggggcttagcaccacccaccaaatgttcttttccagaaggtgaaagagaaagggcctgaacaaccttacaccaaatattcagtagcttcatccaaaggatgtacagaatttttagcattgtgctcaacagaatgtgtccctaccatgtgtccccttctcccctggcccccagctctccccacctgggcagggggtcttgctttaacctcctccctccccccagcaggggagagttcaagggaaggcctgcggacaacttttcatcccctgttcctccctcttttcccctttgaagggtgggctaggccattttgccaagttctagctctcacaagtccctcctcaaccctgtcaccctcctctgctctggaactgactccctccccagcctatgggaaggtggaaatttcaggcaagaggggatgaagacattcagttgagggcattcagttgtctttttccatcctgtctgtttccctgaaaaaaaaaaaaattcatattccagtgcctatccgtgggatccttcacgttctttgacattaaccagaaaccaaaaagagaactcacctcgcttttcccaccctgtgcccctctggtactggcgaatgcctctccctccccccacatgcacgcacgcacacaccccagtggtggggttcctcgagatggcatccccatcagggtccatgtggtggggacagtgccacagcctgtggtccccatctgagagggcgcggtggtggccaccactcccacaagacctccacaactcttggctggaccctgtgtttgaccagccccggacacgtctccactgacgacggacagaggagagacaccactgggagccaccctgccctcctgctattgtggaggccaacaaagttttgaaccgaaaaccaaaaaaacagaaacaaacaaacaataaatttaaactagaaaaaaaatttatatatatatataaacatatatatatatatatatatataaaagggaaagaagatgaggactcttcaagaataagatggaaccgcgaggcggagccaagcccctgcaccggtggtccaggcccttgttccccaaggcggatggaaggacggatgcttctttctcttcacaaatacctcatggacgttgtctttgggaaagccggagggggcggctggggcagggcctgtccctcggccagggcagatggaagcgggtgggcggggctgagagagggtatcagggacaggggtgaagagccccaaactcccctcccaaatcaactgaaaaagctttaaaaaaagacaggaaaaaaaggagtaagaaagcaaaaagaacagatgaaggaaaacttaacaacttttgggtggtttgattcctcctttgatttctttttcggttctcttttgtctgacctctctcctcccctccttcctctctcctcccctccttcctctctcctctcctccttcctgtctcctctctctccctttgctctcctctcttctctctcaatcttgttctttctgtgtctctcctcaaaccaaagtgttgcagtgaaggacacgagccattgaaatcagggtggggcctgacagccgtagtgtggcccctgccccttgttgggcaggagcagagagagaggagagccctgagaccgcagggctttggcctgggcagcttccactttctgccggacactctgaggagaggcagatggagctccaggcctcagcgttctcttttttccttgtctcccttctcccacccgggaaatgaaactgttgggctgggcgacggaggcagcagagactcggccattgcaggggcctctgggtgccttgtccgggcagtggtgaagtagccgcccctcccaccccggcacgatggggcctggcacctcgtctacccaacctcaccggaatgtaagcatctccgctgaacgactccctgcccttaccctacctctgagtttgtccatgtttatttcctgaagagagaagggactggcaagagggcttgggccccagcccaagggtggagagggggccaagggctcctgaccaaataggaaggacatttgagcagagcaaaatgaaaggaattacaaccaaaaaccccctccgagaagacaggcagcatggaaggcatggtggagatgactcaaacaaaaactatgattctagaccaaaaaggaa

SEQ ID NO: 301063 - DNA, 4534 bp, Homo sapiens
cgtcaacatgagttgggcctggggcagatgaggctggctggcggggcgggcagcatggttcactccagcatgggggctccagaaataagaatgtctaagcccctggaggccgagaagcaaggtctggactccccatcagagcacacagacaccgaaagaaatggaccagacactaatcatcagaacccccaaaataagacctccccattctccgtgtccccaactggccccagtacaaagatcaaggctgaagaccccagtggcgattcagccccagcagcacccctgccccctcagccggcccagcctcatctgccccaggcccaactcatgttgacgggcagccagctagctggggacatacagcagctcctccagctccagcagctggtgcttgtgccaggccaccacctccagccacctgctcagttcctgctaccgcaggcccagcagagccagccaggcctgctaccgacaccaaatctattccagctacctcagcaaacccagggagctcttctgacctcccagccccgggccgggcttcccacacaggccgtgacccgccctacgctgcccgacccgcacctctcgcacccgcagccccccaaatgcttggagccaccatcccaccccgaggagcccagtgatctggaggagctggagcaattcgcccgcaccttcaagcaacgccgcatcaagctgggcttcacgcagggtgatgtgggcctggccatgggcaagctctacggcaacgacttcagccagacgaccatttcccgcttcgaggccctcaacctgagcttcaagaacatgtgcaaactcaagcccctcctggagaagtggctcaacgatgcagagactatgtctgtggactcaagcctgcccagccccaaccagctgagcagccccagcctgggtttcgacggcctgcccggccggagacgcaagaagaggaccagcatcgagacaaacgtccgcttcgccttagagaagagttttctagcgaaccagaagcctacctcagaggagatcctgctgatcgccgagcagctgcacatggagaaggaagtgatccgcgtctggttctgcaaccggcgccagaaggagaaacgcatcaacccctgcagtgcggcccccatgctgcccagcccagggaagccggccagctacagcccccatatggtcacaccccaagggggcgcggggaccttaccgttgtcccaagcttccagcagtctgagcacaacagttactaccttatcctcagctgtggggacgctccaccccagccggacagctggagggggtgggggcgggggcggggctgcgccccccctcaattccatcccctctgtcactcccccacccccggccaccaccaacagcacaaaccccagccctcaaggcagccactcggctatcggcttgtcaggcctgaaccccagcacgggccctggcctctggtggaaccctgccccttaccagccttgatggcagcgggaatctggtgctgggggcagccggtgcagccccggggagccctggcctggtgacctcgccgctcttcttgaatcatgctgggctgcccctgctcagcaccccgcctggtgtgggcctggtctcagcagcggctgcggctgtggcagcctccatctccagcaagtctcctggcctctcctcctcatcctcttcatcctcatcctcctcctcctccacttgcagcgagacggcagcacagacccctggaggtccaggggggcccgaggcagggtccaaacctgagtgagggccagccatgcctcccctcccattcctctggtccctgccttggtcccttgcctgggaagagggcgaggaggccagtggtggggacgcagagggtcctcagagcaggagtgacaagggaggaaagaccaaaaaaacaaccaaccaaaaaaaaaaaaaaaaaggaaagaaactaaccaacaaaagagaaaaccaaaaataatcacaacagaaaccagctgccccaaaggaaccagaggtgaaaaacaaacaaaaaaaaaccaaaaacaaaccaaaaaaaaaaaaaacccacaaaatcaaacaaaccaaaaaaccagtcgcgagccagacctcagcgtgctcaccctcactgctacgacgccaaataaaaaccccagccaggggcggagaagcctccagcaggtcagacctcatgccaccgagccctggctgtgggaccaacccccaaccctgcctcccccgtgggggctacagaaggaaaaagagaagatgccagcttcctaatcccagcccccagccctgggccagcgaagacagggcacagcctgggcagatgggctggggcttagcaccacccaccaaatgttcttttccagaaggtgaaagagaaagggcctgaacaaccttacaccaaatattcagtagcttcatccaaaggatgtacagaatttttagcattgtgctcaacagaatgtgtccctaccatgtgtccccttctcccctggcccccagctctccccacctgggcagggggtcttgctttaacctcctccctccccccagcaggggagagttcaagggaaggcctgcggacaacttttcatcccctgttcctccctcttttcccctttgaagggtgggctaggccattttgccaagttctagctctcacaagtccctcctcaaccctgtcaccctcctctgctctggaactgactccctccccagcctatgggaaggtggaaatttcaggcaagaggggatgaagacattcagttgagggcattcagttgtctttttccatcctgtctgtttccctgaaaaaaaaaaaaattcatattccagtgcctatccgtgggatccttcacgttctttgacattaaccagaaaccaaaaagagaactcacctcgcttttcccaccctgtgcccctctggtactggcgaatgcctctccctccccccacatgcacgcacgcacacaccccagtggtggggttcctcgagatggcatccccatcagggtccatgtggtggggacagtgccacagcctgtggtccccatctgagagggcgcggtggtggccaccactcccacaagacctccacaactcttggctggaccctgtgtttgaccagccccggacacgtctccactgacgacggacagaggagagacaccactgggagccaccctgccctcctgctattgtggaggccaacaaagttttgaaccgaaaaccaaaaaaacagaaacaaacaaacaataaatttaaactagaaaaaaaatttatatatatatataaacatatatatatatatatatatataaaagggaaagaagatgaggactcttcaagaataagatggaaccgcgaggcggagccaagcccctgcaccggtggtccaggcccttgttccccaaggcggatggaaggacggatgcttctttctcttcacaaatacctcatggacgttgtctttgggaaagccggagggggcggctggggcagggcctgtccctcggccagggcagatggaagcgggtgggcggggctgagagagggtatcagggacaggggtgaagagccccaaactcccctcccaaatcaactgaaaaagctttaaaaaaagacaggaaaaaaaggagtaagaaagcaaaaagaacagatgaaggaaaacttaacaacttttgggtggtttgattcctcctttgatttctttttcggttctcttttgtctgacctctctcctcccctccttcctctctcctcccctccttcctctctcctctcctccttcctgtctcctctctctccctttgctctcctctcttctctctcaatcttgttctttctgtgtctctcctcaaaccaaagtgttgcagtgaaggacacgagccattgaaatcagggtggggcctgacagccgtagtgtggcccctgccccttgttgggcaggagcagagagagaggagagccctgagaccgcagggctttggcctgggcagcttccactttctgccggacactctgaggagaggcagatggagctccaggcctcagcgttctcttttttccttgtctcccttctcccacccgggaaatgaaactgttgggctgggcgacggaggcagcagagactcggccattgcaggggcctctgggtgccttgtccgggcagtggtgaagtagccgcccctcccaccccggcacgatggggcctggcacctcgtctacccaacctcaccggaatgtaagcatctccgctgaacgactccctgcccttaccctacctctgagtttgtccatgtttatttcctgaagagagaagggactggcaagagggcttgggccccagcccaagggtggagagggggccaagggctcctgaccaaataggaaggacatttgagcagagcaaaatgaaaggaattacaaccaaaaaccccctccgagaagacaggcagcatggaaggcatggtggagatgactcaaacaaaaactatgattctagaccaaaaaggaa

SEQ ID NO: 301064 - DNA, 4552 bp, Homo sapiens
cgtcaacatgagttgggcctggggcagatgaggctggctggcggggcgggcagcatggttcactccagcatgggggctccagaaataagaatgtctaagcccctggaggccgagaagcaaggtctggactccccatcagagcacacagacaccgaaagaaatggaccagacactaatcatcagaacccccaaaataagacctccccattctccgtgtccccaactggccccagtacaaaggtgggcattctctctggcctccacttaacattctggggtcccggaccctgcctctctcccccccagatcaaggctgaagaccccagtggcgattcagccccagcagcacccctgccccctcagccggcccagcctcatctgccccaggcccaactcatgttgacgggcagccagctagctggggacatacagcagctcctccagctccagcagctggtgcttgtgccaggccaccacctccagccacctgctcagttcctgctaccgcaggcccagcagagccagccaggcctgctaccgacaccaaatctattccagctacctcagcaaacccagggagctcttctgacctcccagccccgggccgggcttcccacacagccccccaaatgcttggagccaccatcccaccccgaggagcccagtgatctggaggagctggagcaattcgcccgcaccttcaagcaacgccgcatcaagctgggcttcacgcagggtgatgtgggcctggccatgggcaagctctacggcaacgacttcagccagacgaccatttcccgcttcgaggccctcaacctgagcttcaagaacatgtgcaaactcaagcccctcctggagaagtggctcaacgatgcagagactatgtctgtggactcaagcctgcccagccccaaccagctgagcagccccagcctgggtttcgacggcctgcccggccggagacgcaagaagaggaccagcatcgagacaaacgtccgcttcgccttagagaagagttttctagcgaaccagaagcctacctcagaggagatcctgctgatcgccgagcagctgcacatggagaaggaagtgatccgcgtctggttctgcaaccggcgccagaaggagaaacgcatcaacccctgcagtgcggcccccatgctgcccagcccagggaagccggccagctacagcccccatatggtcacaccccaagggggcgcggggaccttaccgttgtcccaagcttccagcagtctgagcacaacagttactaccttatcctcagctgtggggacgctccaccccagccggacagctggagggggtgggggcgggggcggggctgcgccccccctcaattccatcccctctgtcactcccccacccccggccaccaccaacagcacaaaccccagccctcaaggcagccactcggctatcggcttgtcaggcctgaaccccagcacgggccctggcctctggtggaaccctgccccttaccagccttgatggcagcgggaatctggtgctgggggcagccggtgcagccccggggagccctggcctggtgacctcgccgctcttcttgaatcatgctgggctgcccctgctcagcaccccgcctggtgtgggcctggtctcagcagcggctgcggctgtggcagcctccatctccagcaagtctcctggcctctcctcctcatcctcttcatcctcatcctcctcctcctccacttgcagcgagacggcagcacagacccctggaggtccaggggggcccgaggcagggtccaaacctgagtgagggccagccatgcctcccctcccattcctctggtccctgccttggtcccttgcctgggaagagggcgaggaggccagtggtggggacgcagagggtcctcagagcaggagtgacaagggaggaaagaccaaaaaaacaaccaaccaaaaaaaaaaaaaaaaaggaaagaaactaaccaacaaaagagaaaaccaaaaataatcacaacagaaaccagctgccccaaaggaaccagaggtgaaaaacaaacaaaaaaaaaccaaaaacaaaccaaaaaaaaaaaaaacccacaaaatcaaacaaaccaaaaaaccagtcgcgagccagacctcagcgtgctcaccctcactgctacgacgccaaataaaaaccccagccaggggcggagaagcctccagcaggtcagacctcatgccaccgagccctggctgtgggaccaacccccaaccctgcctcccccgtgggggctacagaaggaaaaagagaagatgccagcttcctaatcccagcccccagccctgggccagcgaagacagggcacagcctgggcagatgggctggggcttagcaccacccaccaaatgttcttttccagaaggtgaaagagaaagggcctgaacaaccttacaccaaatattcagtagcttcatccaaaggatgtacagaatttttagcattgtgctcaacagaatgtgtccctaccatgtgtccccttctcccctggcccccagctctccccacctgggcagggggtcttgctttaacctcctccctccccccagcaggggagagttcaagggaaggcctgcggacaacttttcatcccctgttcctccctcttttcccctttgaagggtgggctaggccattttgccaagttctagctctcacaagtccctcctcaaccctgtcaccctcctctgctctggaactgactccctccccagcctatgggaaggtggaaatttcaggcaagaggggatgaagacattcagttgagggcattcagttgtctttttccatcctgtctgtttccctgaaaaaaaaaaaaattcatattccagtgcctatccgtgggatccttcacgttctttgacattaaccagaaaccaaaaagagaactcacctcgcttttcccaccctgtgcccctctggtactggcgaatgcctctccctccccccacatgcacgcacgcacacaccccagtggtggggttcctcgagatggcatccccatcagggtccatgtggtggggacagtgccacagcctgtggtccccatctgagagggcgcggtggtggccaccactcccacaagacctccacaactcttggctggaccctgtgtttgaccagccccggacacgtctccactgacgacggacagaggagagacaccactgggagccaccctgccctcctgctattgtggaggccaacaaagttttgaaccgaaaaccaaaaaaacagaaacaaacaaacaataaatttaaactagaaaaaaaatttatatatatatataaacatatatatatatatatatatataaaagggaaagaagatgaggactcttcaagaataagatggaaccgcgaggcggagccaagcccctgcaccggtggtccaggcccttgttccccaaggcggatggaaggacggatgcttctttctcttcacaaatacctcatggacgttgtctttgggaaagccggagggggcggctggggcagggcctgtccctcggccagggcagatggaagcgggtgggcggggctgagagagggtatcagggacaggggtgaagagccccaaactcccctcccaaatcaactgaaaaagctttaaaaaaagacaggaaaaaaaggagtaagaaagcaaaaagaacagatgaaggaaaacttaacaacttttgggtggtttgattcctcctttgatttctttttcggttctcttttgtctgacctctctcctcccctccttcctctctcctcccctccttcctctctcctctcctccttcctgtctcctctctctccctttgctctcctctcttctctctcaatcttgttctttctgtgtctctcctcaaaccaaagtgttgcagtgaaggacacgagccattgaaatcagggtggggcctgacagccgtagtgtggcccctgccccttgttgggcaggagcagagagagaggagagccctgagaccgcagggctttggcctgggcagcttccactttctgccggacactctgaggagaggcagatggagctccaggcctcagcgttctcttttttccttgtctcccttctcccacccgggaaatgaaactgttgggctgggcgacggaggcagcagagactcggccattgcaggggcctctgggtgccttgtccgggcagtggtgaagtagccgcccctcccaccccggcacgatggggcctggcacctcgtctacccaacctcaccggaatgtaagcatctccgctgaacgactccctgcccttaccctacctctgagtttgtccatgtttatttcctgaagagagaagggactggcaagagggcttgggccccagcccaagggtggagagggggccaagggctcctgaccaaataggaaggacatttgagcagagcaaaatgaaaggaattacaaccaaaaaccccctccgagaagacaggcagcatggaaggcatggtggagatgactcaaacaaaaactatgattctagaccaaaaaggaa

SEQ ID NO: 301065 - DNA, 4700 bp, Homo sapiens
ctggggcccccagagagggtggggagatgacacagttgttcccccagccctggcggggcgggcagcatggttcactccagcatgggggctccagaaataagaatgtctaagcccctggaggccgagaagcaaggtctggactccccatcagagcacacagacaccgaaagaaatggaccagacactaatcatcagaacccccaaaataagacctccccattctccgtgtccccaactggccccagtacaaagatcaaggctgaagaccccagtggcgattcagccccagcagcacccctgccccctcagccggcccagcctcatctgccccaggcccaactcatgttgacgggcagccagctagctggggacatacagcagctcctccagctccagcagctggtgcttgtgccaggccaccacctccagccacctgctcagttcctgctaccgcaggcccagcagagccagccaggcctgctaccgacaccaaatctattccagctacctcagcaaacccagggagctcttctgacctcccagccccgggccgggcttcccacacagccccccaaatgcttggagccaccatcccaccccgaggagcccagtgatctggaggagctggagcaattcgcccgcaccttcaagcaacgccgcatcaagctgggcttcacgcagggtgatgtgggcctggccatgggcaagctctacggcaacgacttcagccagacgaccatttcccgcttcgaggccctcaacctgagcttcaagaacatgtgcaaactcaagcccctcctggagaagtggctcaacgatgcagagactatgtctgtggactcaagcctgcccagccccaaccagctgagcagccccagcctgggtttcgacggcctgcccggccggagacgcaagaagaggaccagcatcgagacaaacgtccgcttcgccttagagaagagttttctagcgaaccagaagcctacctcagaggagatcctgctgatcgccgagcagctgcacatggagaaggaagtgatccgcgtctggttctgcaaccggcgccagaaggagaaacgcatcaacccctgcagtgcggcccccatgctgcccagcccagggaagccggccagctacagcccccatatggtcacaccccaagggggcgcggggaccttaccgttgtcccaagcttccagcagtctgagcacaacagttactaccttatcctcagctgtggggacgctccaccccagccggacagctggagggggtgggggcgggggcggggctgcgccccccctcaattccatcccctctgtcactcccccacccccggccaccaccaacagcacaaaccccagccctcaaggcagccactcggctatcggcttgtcaggcctgaaccccagcacggggtaagtgggtgcacgtgggaagctgtggggagaagcagggtcgctgctgcttctagggtggggagcggcaccccagttatgttggcaggtccctgcccctgctaatgcctctgctttgcctcttgcagaagcacaatggtggggttgagctccgggctgagtccagccctcatgagcaacaaccctttggccactatccaagccctggcctctggtggaaccctgccccttaccagccttgatggcagcgggaatctggtgctgggggcagccggtgcagccccggggagccctggcctggtgacctcgccgctcttcttgaatcatgctgggctgcccctgctcagcaccccgcctggtgtgggcctggtctcagcagcggctgcggctgtggcagcctccatctccagcaagtctcctggcctctcctcctcatcctcttcatcctcatcctcctcctcctccacttgcagcgagacggcagcacagacccctggaggtccaggggggcccgaggcagggtccaaacctgagtgagggccagccatgcctcccctcccattcctctggtccctgccttggtcccttgcctgggaagagggcgaggaggccagtggtggggacgcagagggtcctcagagcaggagtgacaagggaggaaagaccaaaaaaacaaccaaccaaaaaaaaaaaaaaaaaggaaagaaactaaccaacaaaagagaaaaccaaaaataatcacaacagaaaccagctgccccaaaggaaccagaggtgaaaaacaaacaaaaaaaaaccaaaaacaaaccaaaaaaaaaaaaaacccacaaaatcaaacaaaccaaaaaaccagtcgcgagccagacctcagcgtgctcaccctcactgctacgacgccaaataaaaaccccagccaggggcggagaagcctccagcaggtcagacctcatgccaccgagccctggctgtgggaccaacccccaaccctgcctcccccgtgggggctacagaaggaaaaagagaagatgccagcttcctaatcccagcccccagccctgggccagcgaagacagggcacagcctgggcagatgggctggggcttagcaccacccaccaaatgttcttttccagaaggtgaaagagaaagggcctgaacaaccttacaccaaatattcagtagcttcatccaaaggatgtacagaatttttagcattgtgctcaacagaatgtgtccctaccatgtgtccccttctcccctggcccccagctctccccacctgggcagggggtcttgctttaacctcctccctccccccagcaggggagagttcaagggaaggcctgcggacaacttttcatcccctgttcctccctcttttcccctttgaagggtgggctaggccattttgccaagttctagctctcacaagtccctcctcaaccctgtcaccctcctctgctctggaactgactccctccccagcctatgggaaggtggaaatttcaggcaagaggggatgaagacattcagttgagggcattcagttgtctttttccatcctgtctgtttccctgaaaaaaaaaaaaattcatattccagtgcctatccgtgggatccttcacgttctttgacattaaccagaaaccaaaaagagaactcacctcgcttttcccaccctgtgcccctctggtactggcgaatgcctctccctccccccacatgcacgcacgcacacaccccagtggtggggttcctcgagatggcatccccatcagggtccatgtggtggggacagtgccacagcctgtggtccccatctgagagggcgcggtggtggccaccactcccacaagacctccacaactcttggctggaccctgtgtttgaccagccccggacacgtctccactgacgacggacagaggagagacaccactgggagccaccctgccctcctgctattgtggaggccaacaaagttttgaaccgaaaaccaaaaaaacagaaacaaacaaacaataaatttaaactagaaaaaaaatttatatatatatataaacatatatatatatatatatatataaaagggaaagaagatgaggactcttcaagaataagatggaaccgcgaggcggagccaagcccctgcaccggtggtccaggcccttgttccccaaggcggatggaaggacggatgcttctttctcttcacaaatacctcatggacgttgtctttgggaaagccggagggggcggctggggcagggcctgtccctcggccagggcagatggaagcgggtgggcggggctgagagagggtatcagggacaggggtgaagagccccaaactcccctcccaaatcaactgaaaaagctttaaaaaaagacaggaaaaaaaggagtaagaaagcaaaaagaacagatgaaggaaaacttaacaacttttgggtggtttgattcctcctttgatttctttttcggttctcttttgtctgacctctctcctcccctccttcctctctcctcccctccttcctctctcctctcctccttcctgtctcctctctctccctttgctctcctctcttctctctcaatcttgttctttctgtgtctctcctcaaaccaaagtgttgcagtgaaggacacgagccattgaaatcagggtggggcctgacagccgtagtgtggcccctgccccttgttgggcaggagcagagagagaggagagccctgagaccgcagggctttggcctgggcagcttccactttctgccggacactctgaggagaggcagatggagctccaggcctcagcgttctcttttttccttgtctcccttctcccacccgggaaatgaaactgttgggctgggcgacggaggcagcagagactcggccattgcaggggcctctgggtgccttgtccgggcagtggtgaagtagccgcccctcccaccccggcacgatggggcctggcacctcgtctacccaacctcaccggaatgtaagcatctccgctgaacgactccctgcccttaccctacctctgagtttgtccatgtttatttcctgaagagagaagggactggcaagagggcttgggccccagcccaagggtggagagggggccaagggctcctgaccaaataggaaggacatttgagcagagcaaaatgaaaggaattacaaccaaaaaccccctccgagaagacaggcagcatggaaggcatggtggagatgactcaaacaaaaactatgattctagaccaaaaaggaa

SEQ ID NO: 301066 - DNA, 3197 bp, Homo sapiens
gatgggggtctgtaggaccgatggggagatggggggcactctgggcaggatgctggaaggcaaaggtctcccctggcccggcatgcccttagcccagcctctctctctccccgccagccctggcctctggtggaaccctgccccttaccagccttgatggcagcgggaatctggtgctgggggcagccggtgcagccccggggagccctggcctggtgacctcgccgctcttcttgaatcatgctgggctgcccctgctcagcaccccgcctggtgtgggcctggtctcagcagcggctgcggctgtggcagcctccatctccagcaagtctcctggcctctcctcctcatcctcttcatcctcatcctcctcctcctccacttgcagcgagacggcagcacagacccctggaggtccaggggggcccgaggcagggtccaaacctgagtgagggccagccatgcctcccctcccattcctctggtccctgccttggtcccttgcctgggaagagggcgaggaggccagtggtggggacgcagagggtcctcagagcaggagtgacaagggaggaaagaccaaaaaaacaaccaaccaaaaaaaaaaaaaaaaaggaaagaaactaaccaacaaaagagaaaaccaaaaataatcacaacagaaaccagctgccccaaaggaaccagaggtgaaaaacaaacaaaaaaaaaccaaaaacaaaccaaaaaaaaaaaaaacccacaaaatcaaacaaaccaaaaaaccagtcgcgagccagacctcagcgtgctcaccctcactgctacgacgccaaataaaaaccccagccaggggcggagaagcctccagcaggtcagacctcatgccaccgagccctggctgtgggaccaacccccaaccctgcctcccccgtgggggctacagaaggaaaaagagaagatgccagcttcctaatcccagcccccagccctgggccagcgaagacagggcacagcctgggcagatgggctggggcttagcaccacccaccaaatgttcttttccagaaggtgaaagagaaagggcctgaacaaccttacaccaaatattcagtagcttcatccaaaggatgtacagaatttttagcattgtgctcaacagaatgtgtccctaccatgtgtccccttctcccctggcccccagctctccccacctgggcagggggtcttgctttaacctcctccctccccccagcaggggagagttcaagggaaggcctgcggacaacttttcatcccctgttcctccctcttttcccctttgaagggtgggctaggccattttgccaagttctagctctcacaagtccctcctcaaccctgtcaccctcctctgctctggaactgactccctccccagcctatgggaaggtggaaatttcaggcaagaggggatgaagacattcagttgagggcattcagttgtctttttccatcctgtctgtttccctgaaaaaaaaaaaaattcatattccagtgcctatccgtgggatccttcacgttctttgacattaaccagaaaccaaaaagagaactcacctcgcttttcccaccctgtgcccctctggtactggcgaatgcctctccctccccccacatgcacgcacgcacacaccccagtggtggggttcctcgagatggcatccccatcagggtccatgtggtggggacagtgccacagcctgtggtccccatctgagagggcgcggtggtggccaccactcccacaagacctccacaactcttggctggaccctgtgtttgaccagccccggacacgtctccactgacgacggacagaggagagacaccactgggagccaccctgccctcctgctattgtggaggccaacaaagttttgaaccgaaaaccaaaaaaacagaaacaaacaaacaataaatttaaactagaaaaaaaatttatatatatatataaacatatatatatatatatatatataaaagggaaagaagatgaggactcttcaagaataagatggaaccgcgaggcggagccaagcccctgcaccggtggtccaggcccttgttccccaaggcggatggaaggacggatgcttctttctcttcacaaatacctcatggacgttgtctttgggaaagccggagggggcggctggggcagggcctgtccctcggccagggcagatggaagcgggtgggcggggctgagagagggtatcagggacaggggtgaagagccccaaactcccctcccaaatcaactgaaaaagctttaaaaaaagacaggaaaaaaaggagtaagaaagcaaaaagaacagatgaaggaaaacttaacaacttttgggtggtttgattcctcctttgatttctttttcggttctcttttgtctgacctctctcctcccctccttcctctctcctcccctccttcctctctcctctcctccttcctgtctcctctctctccctttgctctcctctcttctctctcaatcttgttctttctgtgtctctcctcaaaccaaagtgttgcagtgaaggacacgagccattgaaatcagggtggggcctgacagccgtagtgtggcccctgccccttgttgggcaggagcagagagagaggagagccctgagaccgcagggctttggcctgggcagcttccactttctgccggacactctgaggagaggcagatggagctccaggcctcagcgttctcttttttccttgtctcccttctcccacccgggaaatgaaactgttgggctgggcgacggaggcagcagagactcggccattgcaggggcctctgggtgccttgtccgggcagtggtgaagtagccgcccctcccaccccggcacgatggggcctggcacctcgtctacccaacctcaccggaatgtaagcatctccgctgaacgactccctgcccttaccctacctctgagtttgtccatgtttatttcctgaagagagaagggactggcaagagggcttgggccccagcccaagggtggagagggggccaagggctcctgaccaaataggaaggacatttgagcagagcaaaatgaaaggaattacaaccaaaaaccccctccgagaagacaggcagcatggaaggcatggtggagatgactcaaacaaaaactatgattctagaccaaaaaggaa

SEQ ID NO: 301067 - DNA, 2922 bp, Homo sapiens
tggagacgcgtatcaggagagggtgggataatgacagccccaattttcagtaggggtaaagaggtagccacctcatcctcttcatcctcatcctcctcctcctccacttgcagcgagacggcagcacagacccctggaggtccaggggggcccgaggcagggtccaaacctgagtgagggccagccatgcctcccctcccattcctctggtccctgccttggtcccttgcctgggaagagggcgaggaggccagtggtggggacgcagagggtcctcagagcaggagtgacaagggaggaaagaccaaaaaaacaaccaaccaaaaaaaaaaaaaaaaaggaaagaaactaaccaacaaaagagaaaaccaaaaataatcacaacagaaaccagctgccccaaaggaaccagaggtgaaaaacaaacaaaaaaaaaccaaaaacaaaccaaaaaaaaaaaaaacccacaaaatcaaacaaaccaaaaaaccagtcgcgagccagacctcagcgtgctcaccctcactgctacgacgccaaataaaaaccccagccaggggcggagaagcctccagcaggtcagacctcatgccaccgagccctggctgtgggaccaacccccaaccctgcctcccccgtgggggctacagaaggaaaaagagaagatgccagcttcctaatcccagcccccagccctgggccagcgaagacagggcacagcctgggcagatgggctggggcttagcaccacccaccaaatgttcttttccagaaggtgaaagagaaagggcctgaacaaccttacaccaaatattcagtagcttcatccaaaggatgtacagaatttttagcattgtgctcaacagaatgtgtccctaccatgtgtccccttctcccctggcccccagctctccccacctgggcagggggtcttgctttaacctcctccctccccccagcaggggagagttcaagggaaggcctgcggacaacttttcatcccctgttcctccctcttttcccctttgaagggtgggctaggccattttgccaagttctagctctcacaagtccctcctcaaccctgtcaccctcctctgctctggaactgactccctccccagcctatgggaaggtggaaatttcaggcaagaggggatgaagacattcagttgagggcattcagttgtctttttccatcctgtctgtttccctgaaaaaaaaaaaaattcatattccagtgcctatccgtgggatccttcacgttctttgacattaaccagaaaccaaaaagagaactcacctcgcttttcccaccctgtgcccctctggtactggcgaatgcctctccctccccccacatgcacgcacgcacacaccccagtggtggggttcctcgagatggcatccccatcagggtccatgtggtggggacagtgccacagcctgtggtccccatctgagagggcgcggtggtggccaccactcccacaagacctccacaactcttggctggaccctgtgtttgaccagccccggacacgtctccactgacgacggacagaggagagacaccactgggagccaccctgccctcctgctattgtggaggccaacaaagttttgaaccgaaaaccaaaaaaacagaaacaaacaaacaataaatttaaactagaaaaaaaatttatatatatatataaacatatatatatatatatatatataaaagggaaagaagatgaggactcttcaagaataagatggaaccgcgaggcggagccaagcccctgcaccggtggtccaggcccttgttccccaaggcggatggaaggacggatgcttctttctcttcacaaatacctcatggacgttgtctttgggaaagccggagggggcggctggggcagggcctgtccctcggccagggcagatggaagcgggtgggcggggctgagagagggtatcagggacaggggtgaagagccccaaactcccctcccaaatcaactgaaaaagctttaaaaaaagacaggaaaaaaaggagtaagaaagcaaaaagaacagatgaaggaaaacttaacaacttttgggtggtttgattcctcctttgatttctttttcggttctcttttgtctgacctctctcctcccctccttcctctctcctcccctccttcctctctcctctcctccttcctgtctcctctctctccctttgctctcctctcttctctctcaatcttgttctttctgtgtctctcctcaaaccaaagtgttgcagtgaaggacacgagccattgaaatcagggtggggcctgacagccgtagtgtggcccctgccccttgttgggcaggagcagagagagaggagagccctgagaccgcagggctttggcctgggcagcttccactttctgccggacactctgaggagaggcagatggagctccaggcctcagcgttctcttttttccttgtctcccttctcccacccgggaaatgaaactgttgggctgggcgacggaggcagcagagactcggccattgcaggggcctctgggtgccttgtccgggcagtggtgaagtagccgcccctcccaccccggcacgatggggcctggcacctcgtctacccaacctcaccggaatgtaagcatctccgctgaacgactccctgcccttaccctacctctgagtttgtccatgtttatttcctgaagagagaagggactggcaagagggcttgggccccagcccaagggtggagagggggccaagggctcctgaccaaataggaaggacatttgagcagagcaaaatgaaaggaattacaaccaaaaaccccctccgagaagacaggcagcatggaaggcatggtggagatgactcaaacaaaaactatgattctagaccaaaaaggaa

SEQ ID NO: 301068 - DNA, 1364 bp, Homo sapiens
ctggggcccccagagagggtggggagatgacacagttgttcccccagccctggcggggcgggcagcatggttcactccagcatgggggctccagaaataagaatgtctaagcccctggaggccgagaagcaaggtctggactccccatcagagcacacagacaccgaaagaaatggaccagacactaatcatcagaacccccaaaataagacctccccattctccgtgtccccaactggccccagtacaaagatcaaggctgaagaccccagtggcgattcagccccagcagcacccctgccccctcagccggcccagcctcatctgccccaggcccaactcatgttgacgggcagccagctagctggggacatacagcagctcctccagctccagcagctggtgcttgtgccaggccaccacctccagccacctgctcagttcctgctaccgcaggcccagcagagccagccaggcctgctaccgacaccaaatctattccagctacctcagcaaacccagggagctcttctgacctcccagccccgggccgggcttcccacacagccccccaaatgcttggagccaccatcccaccccgaggagcccagtgatctggaggagctggagcaattcgcccgcaccttcaagcaacgccgcatcaagctgggcttcacgcagggtgatgtgggcctggccatgggcaagctctacggcaacgacttcagccagacgaccatttcccgcttcgaggccctcaacctgagcttcaagaacatgtgcaaactcaagcccctcctggagaagtggctcaacgatgcagagactatgtctgtggactcaagcctgcccagccccaaccagctgagcagccccagcctgggtttcgacggcctgcccggccggagacgcaagaagaggaccagcatcgagacaaacgtccgcttcgccttagagaagagttttctagcgaaccagaagcctacctcagaggagatcctgctgatcgccgagcagctgcacatggagaaggaagtgatccgcgtctggttctgcaaccggcgccagaaggagaaacgcatcaacccctgcatgtgggtgggggaatgggagagacagtgggaagagggtaggactcacccctcctctgcaggagcaactcagctttaatctgcttcacgatttcatatgagaaaagcatgggcctggtaaaaggtgaggcacttgagttttgtgcctggcctctgtcatttttaagctgtgtgaattcaagcacttattttatccttctaagcctcagtttttattaaattattatgaatgtgtaaaacataaaaagatataaatacatgtatgtaagagtg

SEQ ID NO: 301069 - DNA, 647 bp, Homo sapiens
  misc_feature (1)..(1): n is a, c, g, or t
nccaggctggtacaggccggagttttgggatcgggcagcatggttcactccagcatgggggctccagaaataagaatgtctaagcccctggaggccgagaagcaaggtctggactccccatcagagcacacagacaccgaaagaaatggaccagacactaatcatcagaacccccaaaataagacctccccattctccgtgtccccaactggccccagtacaaagatcaaggctgaagaccccagtggcgattcagccccagcagcacccctgccccctcagccggcccagcctcatctgccccaggcccaactcatgttgacgggcagccagctagctggggacatacagcagctcctccagctccagcagctggtgcttgtgccaggccaccacctccagccacctgctcagttcctgctaccgcaggcccagcagagccagccaggcctgctaccgacaccaaatctattccagctacctcagcaaacccagggagctcttctgacctcccagccccgggccgggcttcccacacaggtgagactgtccattgagtgcaccaggccaggccagcagcaaggcctgctgaaagctgggtaaacgggggtgggggatgagtgagagtctcctttccatttgaccca

SEQ ID NO: 301070 - DNA, 3529 bp, Homo sapiens
cgtcaacatgagttgggcctggggcagatgaggctggctggcggggcgggcagcatggttcactccagcatgggggctccagaaataagaatgtctaagcccctggaggccgagaagcaaggtctggactccccatcagagcacacagacaccgaaagaaatggaccagacactaatcatcagaacccccaaaataagacctccccattctccgtgtccccaactggccccagtacaaagatcaaggctgaagaccccagtggcgattcagccccagcagcacccctgccccctcagccggcccagcctcatctgccccaggcccaactcatgttgacgggcagccagctagctggggacatacagcagctcctccagctccagcagctggtgcttgtgccaggccaccacctccagccacctgctcagttcctgctaccgcaggcccagcagagccagccaggcctgctaccgacaccaaatctattccagctacctcagcaaacccagggagctcttctgacctcccagccccgggccgggcttcccacacagccccccaaatgcttggagccaccatcccaccccgaggagcccagtgatctggaggagctggagcaattcgcccgcaccttcaagcaacgccgcatcaagctgggcttcacgcagggtgatgtgggcctggccatgggcaagctctacggcaacgacttcagccagacgaccatttcccgcttcgaggccctcaacctgagcttcaagaacatgtgcaaactcaagcccctcctggagaagtggctcaacgatgcagagactatgtctgtggactcaagcctgcccagccccaaccagctgagcagccccagcctgggtttcgacggcctgcccggccggagacgcaagaagaggaccagcatcgagacaaacgtccgcttcgccttagagaagagttttctagcgaaccagaagcctacctcagaggagatcctgctgatcgccgagcagctgcacatggagaaggaagtgatccgcgtctggttctgcaaccggcgccagaaggagaaacgcatcaacccctgcagtgcggcccccatgctgcccagcccagggaagccggccagctacagcccccatatggtcacaccccaagggggcgcggggaccttaccgttgtcccaagcttccagcagtctgagcacaacagttactaccttatcctcagctgtggggacgctccaccccagccggacagctggagggggtgggggcgggggcggggctgcgccccccctcaattccatcccctctgtcactcccccacccccggccaccaccaacagcacaaaccccagccctcaaggcagccactcggctatcggcttgtcaggcctgaaccccagcacgggccctggcctctggtggaaccctgccccttaccagccttgatggcagcgggaatctggtgctgggggcagccggtgcagccccggggagccctggcctggtgacctcgccgctcttcttgaatcatgctgggctgcccctgctcagcaccccgcctggtgtgggcctggtctcagcagcggctgcggctgtggcagcctccatctccagcaagtctcctggcctctcctcctcatcctcttcatcctcatcctcctcctcctccacttgcagcgagacggcagcacagacccctggaggtccaggggggcccgaggcagggtccaaacctgagtgagggccagccatgcctcccctcccattcctctggtccctgccttggtcccttgcctgggaagagggcgaggaggccagtggtggggacgcagagggtcctcagagcaggagtgacaagggaggaaagaccaaaaaaacaaccaaccaaaaaaaaaaaaaaaaaggaaagaaactaaccaacaaaagagaaaaccaaaaataatcacaacagaaaccagctgccccaaaggaaccagaggtgaaaaacaaacaaaaaaaaaccaaaaacaaaccaaaaaaaaaaaaaacccacaaaatcaaacaaaccaaaaaaccagtcgcgagccagacctcagcgtgctcaccctcactgctacgacgccaaataaaaaccccagccaggggcggagaagcctccagcaggtcagacctcatgccaccgagccctggctgtgggaccaacccccaaccctgcctcccccgtgggggctacagaaggaaaaagagaagatgccagcttcctaatcccagcccccagccctgggccagcgaagacagggcacagcctgggcagatgggctggggcttagcaccacccaccaaatgttcttttccagaaggtgaaagagaaagggcctgaacaaccttacaccaaatattcagtagcttcatccaaaggatgtacagaatttttagcattgtgctcaacagaatgtgtccctaccatgtgtccccttctcccctggcccccagctctccccacctgggcagggggtcttgctttaacctcctccctccccccagcaggggagagttcaagggaaggcctgcggacaacttttcatcccctgttcctccctcttttcccctttgaagggtgggctaggccattttgccaagttctagctctcacaagtccctcctcaaccctgtcaccctcctctgctctggaactgactccctccccagcctatgggaaggtggaaatttcaggcaagaggggatgaagacattcagttgagggcattcagttgtctttttccatcctgtctgtttccctgaaaaaaaaaaaaattcatattccagtgcctatccgtgggatccttcacgttctttgacattaaccagaaaccaaaaagagaactcacctcgcttttcccaccctgtgcccctctggtactggcgaatgcctctccctccccccacatgcacgcacgcacacaccccagtggtggggttcctcgagatggcatccccatcagggtccatgtggtggggacagtgccacagcctgtggtccccatctgagagggcgcggtggtggccaccactcccacaagacctccacaactcttggctggaccctgtgtttgaccagccccggacacgtctccactgacgacggacagaggagagacaccactgggagccaccctgccctcctgctattgtggaggccaacaaagttttgaaccgaaaaccaaaaaaacagaaacaaacaaacaataaatttaaactagaaaaaaaatttatatatatatataaacatatatatatatatatatatataaaagggaaagaagatgaggactcttcaagaataagatggaaccgcgaggcggagccaagcccctgcaccggtggtccaggcccttgttccccaaggcggatggaaggacggatgcttctttctcttcacaaatacctcatggacgttgtctttgggaaggtggaaatttcaggcaagaggggatgaagacattcagttgagggcattcagttgtctttttccatcctgtctgtttccctg

SEQ ID NO: 301071 - DNA, 4362 bp, Homo sapiens
ctggggcccccagagagggtggggagatgacacagttgttcccccagccctggcggggcgggcagcatggttcactccagcatgggggctccagaaataagaatgtctaagcccctggaggccgagaagcaaggtctggactccccatcagagcacacagacaccgaaagaaatggaccagacactaatcatcagaacccccaaaataagacctccccattctccgtgtccccaactggccccagtacaaagatcaaggctgaagaccccagtggcgattcagccccagcagcacccctgccccctcagccggcccagcctcatctgccccaggcccaactcatgttgacgggcagccagctagctggggacatacagcagctcctccagctccagcagctggtgcttgtgccaggccaccacctccagccacctgctcagttcctgctaccgcaggcccagcagagccagccaggcctgctaccgacaccaaatctattccagctacctcagcaaacccagggagctcttctgacctcccagccccgggccgggcttcccacacagccccccaaatgcttggagccaccatcccaccccgaggagcccagtgatctggaggagctggagcaattcgcccgcaccttcaagcaacgccgcatcaagctgggcttcacgcagggtgatgtgggcctggccatgggcaagctctacggcaacgacttcagccagacgaccatttcccgcttcgaggccctcaacctgagcttcaagaacatgtgcaaactcaagcccctcctggagaagtggctcaacgatgcagagactatgtctgtggactcaagcctgcccagccccaaccagctgagcagccccagcctgggtttcgacggcctgcccggccggagacgcaagaagaggaccagcatcgagacaaacgtccgcttcgccttagagaagagttttctagcgaaccagaagcctacctcagaggagatcctgctgatcgccgagcagctgcacatggagaaggaagtgatccgcgtctggttctgcaaccggcgccagaaggagaaacgcatcaacccctgcagtgcggcccccatgctgcccagcccagggaagccggccagctacagcccccatatggtcacaccccaagggggcgcggggaccttaccgttgtcccaagcttccagcagtctgagcacaacagcacaaaccccagccctcaaggcagccactcggctatcggcttgtcaggcctgaaccccagcacgggccctggcctctggtggaaccctgccccttaccagccttgatggcagcgggaatctggtgctgggggcagccggtgcagccccggggagccctggcctggtgacctcgccgctcttcttgaatcatgctgggctgcccctgctcagcaccccgcctggtgtgggcctggtctcagcagcggctgcggctgtggcagcctccatctccagcaagtctcctggcctctcctcctcatcctcttcatcctcatcctcctcctcctccacttgcagcgagacggcagcacagacccctggaggtccaggggggcccgaggcagggtccaaacctgagtgagggccagccatgcctcccctcccattcctctggtccctgccttggtcccttgcctgggaagagggcgaggaggccagtggtggggacgcagagggtcctcagagcaggagtgacaagggaggaaagaccaaaaaaacaaccaaccaaaaaaaaaaaaaaaaaggaaagaaactaaccaacaaaagagaaaaccaaaaataatcacaacagaaaccagctgccccaaaggaaccagaggtgaaaaacaaacaaaaaaaaaccaaaaacaaaccaaaaaaaaaaaaaacccacaaaatcaaacaaaccaaaaaaccagtcgcgagccagacctcagcgtgctcaccctcactgctacgacgccaaataaaaaccccagccaggggcggagaagcctccagcaggtcagacctcatgccaccgagccctggctgtgggaccaacccccaaccctgcctcccccgtgggggctacagaaggaaaaagagaagatgccagcttcctaatcccagcccccagccctgggccagcgaagacagggcacagcctgggcagatgggctggggcttagcaccacccaccaaatgttcttttccagaaggtgaaagagaaagggcctgaacaaccttacaccaaatattcagtagcttcatccaaaggatgtacagaatttttagcattgtgctcaacagaatgtgtccctaccatgtgtccccttctcccctggcccccagctctccccacctgggcagggggtcttgctttaacctcctccctccccccagcaggggagagttcaagggaaggcctgcggacaacttttcatcccctgttcctccctcttttcccctttgaagggtgggctaggccattttgccaagttctagctctcacaagtccctcctcaaccctgtcaccctcctctgctctggaactgactccctccccagcctatgggaaggtggaaatttcaggcaagaggggatgaagacattcagttgagggcattcagttgtctttttccatcctgtctgtttccctgaaaaaaaaaaaaattcatattccagtgcctatccgtgggatccttcacgttctttgacattaaccagaaaccaaaaagagaactcacctcgcttttcccaccctgtgcccctctggtactggcgaatgcctctccctccccccacatgcacgcacgcacacaccccagtggtggggttcctcgagatggcatccccatcagggtccatgtggtggggacagtgccacagcctgtggtccccatctgagagggcgcggtggtggccaccactcccacaagacctccacaactcttggctggaccctgtgtttgaccagccccggacacgtctccactgacgacggacagaggagagacaccactgggagccaccctgccctcctgctattgtggaggccaacaaagttttgaaccgaaaaccaaaaaaacagaaacaaacaaacaataaatttaaactagaaaaaaaatttatatatatatataaacatatatatatatatatatatataaaagggaaagaagatgaggactcttcaagaataagatggaaccgcgaggcggagccaagcccctgcaccggtggtccaggcccttgttccccaaggcggatggaaggacggatgcttctttctcttcacaaatacctcatggacgttgtctttgggaaagccggagggggcggctggggcagggcctgtccctcggccagggcagatggaagcgggtgggcggggctgagagagggtatcagggacaggggtgaagagccccaaactcccctcccaaatcaactgaaaaagctttaaaaaaagacaggaaaaaaaggagtaagaaagcaaaaagaacagatgaaggaaaacttaacaacttttgggtggtttgattcctcctttgatttctttttcggttctcttttgtctgacctctctcctcccctccttcctctctcctcccctccttcctctctcctctcctccttcctgtctcctctctctccctttgctctcctctcttctctctcaatcttgttctttctgtgtctctcctcaaaccaaagtgttgcagtgaaggacacgagccattgaaatcagggtggggcctgacagccgtagtgtggcccctgccccttgttgggcaggagcagagagagaggagagccctgagaccgcagggctttggcctgggcagcttccactttctgccggacactctgaggagaggcagatggagctccaggcctcagcgttctcttttttccttgtctcccttctcccacccgggaaatgaaactgttgggctgggcgacggaggcagcagagactcggccattgcaggggcctctgggtgccttgtccgggcagtggtgaagtagccgcccctcccaccccggcacgatggggcctggcacctcgtctacccaacctcaccggaatgtaagcatctccgctgaacgactccctgcccttaccctacctctgagtttgtccatgtttatttcctgaagagagaagggactggcaagagggcttgggccccagcccaagggtggagagggggccaagggctcctgaccaaataggaaggacatttgagcagagcaaaatgaaaggaattacaaccaaaaaccccctccgagaagacaggcagcatggaaggcatggtggagatgactcaaacaaaaactatgattctagaccaaaaaggaa

SEQ ID NO: 301072 - DNA, 4370 bp, Homo sapiens
ctggggcccccagagagggtggggagatgacacagttgttcccccagccctggcggggcgggcagcatggttcactccagcatgggggctccagaaataagaatgtctaagcccctggaggccgagaagcaaggtctggactccccatcagagcacacagacaccgaaagaaatggaccagacactaatcatcagaacccccaaaataagacctccccattctccgtgtccccaactggccccagtacaaagatcaaggctgaagaccccagtggcgattcagccccagcagcacccctgccccctcagccggcccagcctcatctgccccaggcccaactcatgttgacgggcagccagctagctggggacatacagcagctcctccagctccagcagctggtgcttgtgccaggccaccacctccagccacctgctcagttcctgctaccgcaggcccagcagagccagccaggcctgctaccgacaccaaatctattccagctacctcagcaaacccagggagctcttctgacctcccagccccgggccgggcttcccacacagccccccaaatgcttggagccaccatcccaccccgaggagcccagtgatctggaggagctggagcaattcgcccgcaccttcaagcaacgccgcatcaagctgggcttcacgcagggtgatgtgggcctggccatgggcaagctctacggcaacgacttcagccagacgaccatttcccgcttcgaggccctcaacctgagcttcaagaacatgtgcaaactcaagcccctcctggagaagtggctcaacgatgcagagactatgtctgtggactcaagcctgcccagccccaaccagctgagcagccccagcctgggtttcgacggcctgcccggccggagacgcaagaagaggaccagcatcgagacaaacgtccgcttcgccttagagaagagttttctagcgaaccagaagcctacctcagaggagatcctgctgatcgccgagcagctgcacatggagaaggaagtgatccgcgtctggttctgcaaccggcgccagaaggagaaacgcatcaacccctgcagtgcggcccccatgctgcccagcccagggaagccggccagctacagcccccatatggtcacaccccaagggggcgcggggaccttaccgttgtcccaagcttccagcagtctgagcacaacagaagcacaatggtggggttgagctccgggctgagtccagccctcatgagcaacaaccctttggccactatccaagccctggcctctggtggaaccctgccccttaccagccttgatggcagcgggaatctggtgctgggggcagccggtgcagccccggggagccctggcctggtgacctcgccgctcttcttgaatcatgctgggctgcccctgctcagcaccccgcctggtgtgggcctggtctcagcagcggctgcggctgtggcagcctccatctccagcaagtctcctggcctctcctcctcatcctcttcatcctcatcctcctcctcctccacttgcagcgagacggcagcacagacccctggaggtccaggggggcccgaggcagggtccaaacctgagtgagggccagccatgcctcccctcccattcctctggtccctgccttggtcccttgcctgggaagagggcgaggaggccagtggtggggacgcagagggtcctcagagcaggagtgacaagggaggaaagaccaaaaaaacaaccaaccaaaaaaaaaaaaaaaaaggaaagaaactaaccaacaaaagagaaaaccaaaaataatcacaacagaaaccagctgccccaaaggaaccagaggtgaaaaacaaacaaaaaaaaaccaaaaacaaaccaaaaaaaaaaaaaacccacaaaatcaaacaaaccaaaaaaccagtcgcgagccagacctcagcgtgctcaccctcactgctacgacgccaaataaaaaccccagccaggggcggagaagcctccagcaggtcagacctcatgccaccgagccctggctgtgggaccaacccccaaccctgcctcccccgtgggggctacagaaggaaaaagagaagatgccagcttcctaatcccagcccccagccctgggccagcgaagacagggcacagcctgggcagatgggctggggcttagcaccacccaccaaatgttcttttccagaaggtgaaagagaaagggcctgaacaaccttacaccaaatattcagtagcttcatccaaaggatgtacagaatttttagcattgtgctcaacagaatgtgtccctaccatgtgtccccttctcccctggcccccagctctccccacctgggcagggggtcttgctttaacctcctccctccccccagcaggggagagttcaagggaaggcctgcggacaacttttcatcccctgttcctccctcttttcccctttgaagggtgggctaggccattttgccaagttctagctctcacaagtccctcctcaaccctgtcaccctcctctgctctggaactgactccctccccagcctatgggaaggtggaaatttcaggcaagaggggatgaagacattcagttgagggcattcagttgtctttttccatcctgtctgtttccctgaaaaaaaaaaaaattcatattccagtgcctatccgtgggatccttcacgttctttgacattaaccagaaaccaaaaagagaactcacctcgcttttcccaccctgtgcccctctggtactggcgaatgcctctccctccccccacatgcacgcacgcacacaccccagtggtggggttcctcgagatggcatccccatcagggtccatgtggtggggacagtgccacagcctgtggtccccatctgagagggcgcggtggtggccaccactcccacaagacctccacaactcttggctggaccctgtgtttgaccagccccggacacgtctccactgacgacggacagaggagagacaccactgggagccaccctgccctcctgctattgtggaggccaacaaagttttgaaccgaaaaccaaaaaaacagaaacaaacaaacaataaatttaaactagaaaaaaaatttatatatatatataaacatatatatatatatatatatataaaagggaaagaagatgaggactcttcaagaataagatggaaccgcgaggcggagccaagcccctgcaccggtggtccaggcccttgttccccaaggcggatggaaggacggatgcttctttctcttcacaaatacctcatggacgttgtctttgggaaagccggagggggcggctggggcagggcctgtccctcggccagggcagatggaagcgggtgggcggggctgagagagggtatcagggacaggggtgaagagccccaaactcccctcccaaatcaactgaaaaagctttaaaaaaagacaggaaaaaaaggagtaagaaagcaaaaagaacagatgaaggaaaacttaacaacttttgggtggtttgattcctcctttgatttctttttcggttctcttttgtctgacctctctcctcccctccttcctctctcctcccctccttcctctctcctctcctccttcctgtctcctctctctccctttgctctcctctcttctctctcaatcttgttctttctgtgtctctcctcaaaccaaagtgttgcagtgaaggacacgagccattgaaatcagggtggggcctgacagccgtagtgtggcccctgccccttgttgggcaggagcagagagagaggagagccctgagaccgcagggctttggcctgggcagcttccactttctgccggacactctgaggagaggcagatggagctccaggcctcagcgttctcttttttccttgtctcccttctcccacccgggaaatgaaactgttgggctgggcgacggaggcagcagagactcggccattgcaggggcctctgggtgccttgtccgggcagtggtgaagtagccgcccctcccaccccggcacgatggggcctggcacctcgtctacccaacctcaccggaatgtaagcatctccgctgaacgactccctgcccttaccctacctctgagtttgtccatgtttatttcctgaagagagaagggactggcaagagggcttgggccccagcccaagggtggagagggggccaagggctcctgaccaaataggaaggacatttgagcagagcaaaatgaaaggaattacaaccaaaaaccccctccgagaagacaggcagcatggaaggcatggtggagatgactcaaacaaaaactatgattctagaccaaaaaggaa

SEQ ID NO: 301073 - DNA, 1600 bp, Homo sapiens
ctggggcccccagagagggtggggagatgacacagttgttcccccagccctggcggggcgggcagcatggttcactccagcatgggggctccagaaataagaatgtctaagcccctggaggccgagaagcaaggtctggactccccatcagagcacacagacaccgaaagaaatggaccagacactaatcatcagaacccccaaaataagacctccccattctccgtgtccccaactggccccagtacaaagatcaaggctgaagaccccagtggcgattcagccccagcagcacccctgccccctcagccggcccagcctcatctgccccaggcccaactcatgttgacgggcagccagctagctggggacatacagcagctcctccagctccagcagctggtgcttgtgccaggccaccacctccagccacctgctcagttcctgctaccgcaggcccagcagagccagccaggcctgctaccgacaccaaatctattccagctacctcagcaaacccagggagctcttctgacctcccagccccgggccgggcttcccacacagccccccaaatgcttggagccaccatcccaccccgaggagcccagtgatctggaggagctggagcaattcgcccgcaccttcaagcaacgccgcatcaagctgggcttcacgcagggtgatgtgggcctggccatgggcaagctctacggcaacgacttcagccagacgaccatttcccgcttcgaggccctcaacctgagcttcaagaacatgtgcaaactcaagcccctcctggagaagtggctcaacgatgcagagactatgtctgtggactcaagcctgcccagccccaaccagctgagcagccccagcctgggtttcgacggcctgcccggccggagacgcaagaagaggaccagcatcgagacaaacgtccgcttcgccttagagaagagttttctagcgaaccagaagcctacctcagaggagatcctgctgatcgccgagcagctgcacatggagaaggaagtgatccgcgtctggttctgcaaccggcgccagaaggagaaacgcatcaacccctgcagtgcggcccccatgctgcccagcccagggaagccggccagctacagcccccatatggtcacaccccaagggggcgcggggaccttaccgttgtcccaagcttccagcagtctgagcacaacaggtcagggagggcagaaaatggtgaggggggactgggaggatgtggcacagctggagcctgaggttcccaagtggctctgggtgtccatgggcctcaagactgggcctggggagtgtgggtgggggaatgggagagacagtgggaagagggtaggactcacccctcctctgcaggagcaactcagctttaatctgcttcacgatttcatatgagaaaagcatgggcctggtaaaaggtgaggcacttgagttttgtgcctggcctctgtcatttttaagctgtgtgaattcaagcacttattttatccttctaagcctcagtttttattaaattattatgaatgtgtaaaacataaaaagatataaatacatgtatgtaagagtg

SEQ ID NO: 301074 - DNA, 5194 bp, Homo sapiens
  misc_feature (2)..(3): n is a, c, g, or t
gnngaagatccaaggtgcgcgcgtcggcgtccgaggcggttggtgtcggagaatttgttaagcgggactccaggcaattatttccagtcagagaaggaaaccagtgcctggcattctcaccatctttctacctaccatgatcaagtgcttgtcagttgaagtacaagccaaattgcgttctggtttggccataagctccttgggccaatgtgttgaggaacttgccctcaacagtattgatgctgaagcaaaatgtgtggctgtcagggtgaatatggaaaccttccaagttcaagtgatagacaatggatttgggatggggagtgatgatgtagagaaagtgggaaatcgttatttcaccagtaaatgccactcggtacaggacttggagaatccaaggttttatggtttccgaggagaggccttggcaaatattgctgacatggccagtgctgtggaaatttcgtccaagaaaaacaggacaatgaaaacttttgtgaaactgtttcagagtggaaaagccctgaaagcttgtgaagctgatgtgactagagcaagcgctgggactactgtaacagtgtataacctattttaccagcttcctgtaaggaggaaatgcatggaccctagactggagtttgagaaggttaggcagagaatagaagctctctcactcatgcacccttccatttctttctctttgagaaatgatgtttctggttccatggttcttcagctccctaaaaccaaagacgtatgttcccgattttgtcaaatttatggattgggaaagtcccaaaagctaagagaaataagttttaaatataaagagtttgagcttagtggctatatcagctctgaagcacattacaacaagaatatgcagtttttgtttgtgaacaaaagactagttttaaggacaaagctacataaactcattgactttttattaaggaaagaaagtattatatgcaagccaaagaatggtcccaccagtaggcaaatgaattcaagtcttcggcaccggtctaccccagaactctatggcatatatgtaattaatgtgcagtgccaattctgtgagtatgatgtgtgcatggagccagccaaaactctgattgaatttcagaactgggacactctcttgttttgcattcaggaaggagtgaaaatgtttttaaagcaagaaaaattatttgtggaattatcaggtgaggatattaaggaatttagtgaagataatggttttagtttatttgatgctactcttcagaagcgtgtgacttccgatgagaggagcaatttccaggaagcatgtaataatattttagattcctatgagatgtttaatttgcagtcaaaagctgtgaaaagaaaaactactgcagaaaacgtaaacacacagagttctagggattcagaagctaccagaaaaaatacaaatgatgcatttttgtacatttatgaatcaggtggtccaggccatagcaaaatgacagagccatctttacaaaacaaagacagctcttgctcagaatcaaagatgttagaacaagagacaattgtagcatcagaagctggagaaaatgagaaacataaaaaatctttcctggaacatagctctttagaaaatccgtgtggaaccagtttagaaatgtttttaagcccttttcagacaccatgtcactttgaggagagtgggcaggatctagaaatatggaaagaaagtactactgttaatggcatggctgccaacatcttgaaaaataatagaattcagaatcaaccaaagagatttaaagatgctactgaagtgggatgccagcctctgccttttgcaacaacattatggggagtacatagtgctcagacagagaaagagaaaaaaaaagaatctagcaattgtggaagaagaaatgtttttagttatgggcgagttaaattatgttccactggctttataactcatgtagtacaaaatgaaaaaactaaatcaactgaaacagaacattcatttaaaaattatgttagacctggtcccacacgtgcccaagaaacatttggaaatagaacacgtcattcagttgaaactccagacatcaaagatttagccagcactttaagtaaagaatctggtcaattgcccaacaaaaaaaattgcagaacgaatataagttatgggctagagaatgaacctacagcaacttatacaatgttttctgcttttcaggaaggtagcaaaaaatcacaaacagattgcatattatctgatacatccccctctttcccctggtatagacacgtttccaatgatagtaggaaaacagataaattaattggtttctccaaaccaatcgtccgtaagaagctaagcttgagttcacagctaggatctttagagaagtttaagaggcaatatgggaaggttgaaaatcctctggatacagaagtagaggaaagtaatggagtcactaccaatctcagtcttcaagttgaacctgacattctgctgaaggacaagaaccgcttagagaactctgatgtttgtaaaatcactactatggagcatagtgattcagatagtagttgtcaaccagcaagccacatccttgactcagagaagtttccattctccaaggatgaagattgtttagaacaacagatgcctagtttgagagaaagtcctatgaccctgaaggagttatctctctttaatagaaaacctttggaccttgagaagtcatctgaatcactagcctctaaattatccagactgaagggttccgaaagagaaactcaaacaatggggatgatgagtcgttttaatgaacttccaaattcagattccagtaggaaagacagcaagttgtgcagtgtgttaacacaagatttttgtatgttatttaacaacaagcatgaaaaaacagagaatggtgtcatcccaacatcagattctgccacacaggataattcctttaataaaaatagtaaaacacattctaacagcaatacaacagagaactgtgtgatatcagaaactcctttggtattgccctataataattctaaagttaccggtaaagattcagatgttcttatcagagcctcagaacaacagataggaagtcttgactctcccagtggaatgttaatgaatccggtagaagatgccacaggtgaccaaaatggaatttgttttcagagtgaggaatctaaagcaagagcttgttctgaaactgaagagtcaaacacgtgttgttcagattggcagcggcatttcgatgtagccctgggaagaatggtttatgtcaacaaaatgactggactcagcacattcattgccccaactgaggacattcaggctgcttgtactaaagacctgacaactgtggctgtggatgttgtacttgagaatgggtctcagtacaggtgtcaaccttttagaagcgaccttgttcttcctttccttccgagagctcgagcagagaggactgtgatgagacaggataacagagatactgtggatgatactgttagtagcgaatcgcttcagtctttgttctcagaatgggacaatccagtatttgcccgttatccagaggttgctgttgatgtaagcagtggccaggctgagagcttagcagttaaaattcacaacatcttgtatccctatcgtttcaccaaaggaatgattcattcaatgcaggttctccagcaagtagataacaagtttattgcctgtttgatgagcactaagactgaagagaatggcgaggcagattcctacgagaagcaacaggcacaaggctctggtcggaaaaaattactgtcttctactctaattcctccgctagagataacagtgacagaggaacaaaggagactcttatggtgttaccacaaaaatctggaagatctgggccttgaatttgtatttccagacactagtgattctctggtccttgtgggaaaagtaccactatgttttgtggaaagagaagccaatgaacttcggagaggaagatctactgtgaccaagagtattgtggaggaatttatccgagaacaactggagctactccagaccaccggaggcatccaagggacattgccactgactgtccagaaggtgttggcatcccaagcctgccatggggccattaagtttaatgatggcctgagcttacaggaaagttgccgccttattgaagctctgtcctcatgccagctgccattccagtgtgctcacgggagaccttctatgctgccgttagctgacatagaccacttggaacaggaaaaacagattaaacccaacctcactaaacttcgcaaaatggcccaggcctggcgtctctttggaaaagcagagtgtgatacaaggcagagcctgcagcagtccatgcctccctgtgagccaccatgagaacagaatcactggtctaaaaggaacaaagggatgttcactgtatgcctctgagcagagagcagcagcagcaggtaccagcacggccctgactgaatcagcccagtgtccctgagcagcttagacagcagggctctctgtatcagtctttcttgagcagatgattcccctagttgagtagccagatgaaattcaagcctaaagacaattcattcatttgcatccatgggcacagaaggttgctatatagtatctaccttttgctacttatttaatgataaaatttaatgacagtttgattggttgcttggtttgttatttgaagggtgtgatttttgtttttgtacagttttttttcaagcttcacatttgcgtgtatctaattcagctgatgctcaagtccaaggggtagtctgccttcccaggctgcccccagggtttctgcactggtcccctcttttcccttcagtcttcttcacttccctatgctgctgcttcatgtgctacatctcagacttaaagagtttctctactacagtgaaaacattctctagggtctttcatcaggcctttagttattttagggataaaaactattgataaaaaggacaaggatagaacagagaaaatttaaagtcctgttccgggttttttgttatgttttctttaaaaactcagagactgatgttcaatatcccaaaccagtaaaatggtgaaaatactatgagcttgttttttaaaatatgattttttttggtactttataaa

SEQ ID NO: 301075 - DNA, 612 bp, Homo sapiens
aaaagccagctggtaatgtttattgcaactggggtgctatacaattagtaagatgatgcaatgagaatttctacttttgtatttcctgaccagcctgctcaaagtggcttttatatcaattgaatgattttcctcattttttaatacaggaaaccaattcgtgctcatggaagaaaagttcctttgccagcagccttgaagtgaatcttacaggagcaatgaaagtattgcattcattagcgtctgccccagagaaggttcagagaaaacttcacttgttttcaaggggatccttgtagatttacgtaattggaatcctgaagaacaggccctactgtctaaaaaatggcttttattcttctaaatacatataaacggatgttttatagatgggaagacatgaccttagaaaggagagagttttcagaggatttgccaggctgtcaggggctctgcctccaggcccagtgtggcagtgtggcctcagggcctccgcctccctgcttgagggctgcatggaggccaactgtcctgggagttgtaaaaatcttttaaggccagaccaatttgagggattttaaaaagtgtctcagtgcctcttatgatttcaga

SEQ ID NO: 301076 - DNA, 4797 bp, Homo sapiens
  misc_feature (2)..(3): n is a, c, g, or t
gnngaagatccaaggtgcgcgcgtcggcgtccgaggcggttggtgtcggagaatttgttaagcgggactccaggcaattatttccagtcagagaaggaaaccagtgcctggcattctcaccatctttctacctaccatgatcaagtgcttgtcagttgaagtacaagccaaattgcgttctggtttggccataagctccttgggccaatgtgttgaggaacttgccctcaacagtattgatgctgaagcaaaatgtgtggctgtcagggtgaatatggaaaccttccaagttcaagtgatagacaatggatttgggatggggagtgatgatgtagagaaagtgggaaatcgttatttcaccagtaaatgccactcggtacaggacttggagaatccaaggttttatggtttccgaggagaggccttggcaaatattgctgacatggccagtgctgtggaaatttcgtccaagaaaaacaggacaatgaaaacttttgtgaaactgtttcagagtggaaaagccctgaaagcttgtgaagctgatgtgactagagcaagcgctgggactactgtaacagtgtataacctattttaccagcttcctgtaaggaggaaatgcatggaccctagactggagtttgagaaggttaggcagagaatagaagctctctcactcatgcacccttccatttctttctctttgagaaatgatgtttctggttccatggttcttcagctccctaaaaccaaagacgtatgttcccgattttgtcaaatttatggattgggaaagtcccaaaagctaagagaaataagttttaaatataaagagtttgagcttagtggctatatcagctctgaagcacattacaacaagaatatgcagtttttgtttgtgaacaaaagactagttttaaggacaaagctacataaactcattgactttttattaaggaaagaaagtattatatgcaagccaaagaatggtcccaccagtaggcaaatgaattcaagtcttcggcaccggtctaccccagaactctatggcatatatgtaattaatgtgcagtgccaattctgtgagtatgatgtgtgcatggagccagccaaaactctgattgaatttcagaactgggacactctcttgttttgcattcaggaaggagtgaaaatgtttttaaagcaagaaaaattatttgtggaattatcaggtgaggatattaaggaatttagtgaagataatggttttagtttatttgatgctactcttcagaagcgtgtgacttccgatgagaggagcaatttccaggaagcatgtaataatattttagattcctatgagatgtttaatttgcagtcaaaagctgtgaaaagaaaaactactgcagaaaacgtaaacacacagagttctagggattcagaagctaccagaaaaaatacaaatgatgcatttttgtacatttatgaatcaggtggtccaggccatagcaaaatgacagagccatctttacaaaacaaagacagctcttgctcagaatcaaagatgttagaacaagagacaattgtagcatcagaagctggagaaaatgagaaacataaaaaatctttcctggaacatagctctttagaaaatccgtgtggaaccagtttagaaatgtttttaagcccttttcagacaccatgtcactttgaggagagtgggcaggatctagaaatatggaaagaaagtactactgttaatggcatggctgccaacatcttgaaaaataatagaattcagaatcaaccaaagagatttaaagatgctactgaagtgggatgccagcctctgccttttgcaacaacattatggggagtacatagtgctcagacagagaaagagaaaaaaaaagaatctagcaattgtggaagaagaaatgtttttagttatgggcgagttaaattatgttccactggctttataactcatgtagtacaaaatgaaaaaactaaatcaactgaaacagaacattcatttaaaaattatgttagacctggtcccacacgtgcccaagaaacatttggaaatagaacacgtcattcagttgaaactccagacatcaaagatttagccagcactttaagtaaagaatctggtcaattgcccaacaaaaaaaattgcagaacgaatataagttatgggctagagaatgaacctacagcaacttatacaatgttttctgcttttcaggaaggtagcaaaaaatcacaaacagattgcatattatctgatacatccccctctttcccctggtatagacacgtttccaatgatagtaggaaaacagataaattaattggtttctccaaaccaatcgtccgtaagaagctaagcttgagttcacagctaggatctttagagaagtttaagaggcaatatgggaaggttgaaaatcctctggatacagaagtagaggaaagtaatggagtcactaccaatctcagtcttcaagttgaacctgacattctgctgaaggacaagaaccgcttagagaactctgatgtttgtaaaatcactactatggagcatagtgattcagatagtagttgtcaaccagcaagccacatccttgactcagagaagtttccattctccaaggatgaagattgtttagaacaacagatgcctagtttgagagaaagtcctatgaccctgaaggagttatctctctttaatagaaaacctttggaccttgagaagtcatctgaatcactagcctctaaattatccagactgaagggttccgaaagagaaactcaaacaatggggatgatgagtcgttttaatgaacttccaaattcagattccagtaggaaagacagcaagttgtgcagtgtgttaacacaagatttttgtatgttatttaacaacaagcatgaaaaaacagagaatggtgtcatcccaacatcagattctgccacacaggataattcctttaataaaaatagtaaaacacattctaacagcaatacaacagagaactgtgtgatatcagaaactcctttggtattgccctataataattctaaagttaccggtaaagattcagatgttcttatcagagcctcagaacaacagataggaagtcttgactctcccagtggaatgttaatgaatccggtagaagatgccacaggtgaccaaaatggaatttgttttcagagtgaggaatctaaagcaagagcttgttctgaaactgaagagtcaaacacgtgttgttcagattggcagcggcatttcgatgtagccctgggaagaatggtttatgtcaacaaaatgactggactcagcacattcattgccccaactgaggacattcaggctgcttgtactaaagacctgacaactgtggctgtggatgttgtacttgagaatgggtctcagtacaggtgtcaaccttttagaagcgaccttgttcttcctttccttccgagagctcgagcagagaggactgtgatgagacaggataacagagatactgtggatgatactgttagtagcgaatcgcttcagtctttgttctcagaatgggacaatccagtatttgcccgttatccagaggttgctgttgatgtaagcagtggccaggctgagagcttagcagttaaaattcacaacatcttgtatccctatcgtttcaccaaaggaatgattcattcaatgcaggttctccagcaagtagataacaagtttattgcctgtttgatgagcactaagactgaagagaatggcgaggcaggtgggaacctgctcgtgctggtggatcagcacgctgcccatgagcgtatacgtctggagcagcttatcattgattcctacgagaagcaacaggcacaaggctctggtcggaaaaaattactgtcttctactctaattcctccgctagagataacagtgacagaggaacaaaggagactcttatggtgttaccacaaaaatctggaagatctgggccttgaatttgtatttccagacactagtgattctctggtccttgtgggaaaagtaccactatgttttgtggaaagagaagccaatgaacttcggagaggaagatctactgtgaccaagagtattgtggaggaatttatccgagaacaactggagctactccagaccaccggaggcatccaagggacattgccactgactgtccagaaggtgttggcatcccaagcctgccatggggccattaagtttaatgatggcctgagcttacaggaaagttgccgccttattgaagctctgtcctcatgccagctgccattccagtgtgctcacgggagaccttctatgctgccgttagctgacatagaccacttggaacaggaaaaacagattaaacccaacctcactaaacttcgcaaaatggcccaggcctggcgtctctttggaaaagcagagtgtgatacaaggcagagcctgcagcagtccatgcctccctgtgagccaccatgagaacagaatcactggtctaaaaggaacaaagggatgttcactgtatgcctctgagcagagagcagcagcagcaggtaccagcacggccctgactgaatcagcccagtgtccctgagcagcttagacagcagggctctctgtatcagtctttcttgagcagatgattcccctagttgagtagccagatgaaattcaagcctaaagacaattcattcatttgcatccatgggcacagaaggttgctatatagtatctaccttttgctacttatttaatgataaaatttaatgacagtttga

SEQ ID NO: 301077 - DNA, 5266 bp, Homo sapiens
  misc_feature (2)..(3): n is a, c, g, or t
gnngaagatccaaggtgcgcgcgtcggcgtccgaggcggttggtgtcggagaatttgttaagcgggactccaggcaattatttccagtcagagaaggaaaccagtgcctggcattctcaccatctttctacctaccatgatcaagtgcttgtcagttgaagtacaagccaaattgcgttctggtttggccataagctccttgggccaatgtgttgaggaacttgccctcaacagtattgatgctgaagcaaaatgtgtggctgtcagggtgaatatggaaaccttccaagttcaagtgatagacaatggatttgggatggggagtgatgatgtagagaaagtgggaaatcgttatttcaccagtaaatgccactcggtacaggacttggagaatccaaggttttatggtttccgaggagaggccttggcaaatattgctgacatggccagtgctgtggaaatttcgtccaagaaaaacaggacaatgaaaacttttgtgaaactgtttcagagtggaaaagccctgaaagcttgtgaagctgatgtgactagagcaagcgctgggactactgtaacagtgtataacctattttaccagcttcctgtaaggaggaaatgcatggaccctagactggagtttgagaaggttaggcagagaatagaagctctctcactcatgcacccttccatttctttctctttgagaaatgatgtttctggttccatggttcttcagctccctaaaaccaaagacgtatgttcccgattttgtcaaatttatggattgggaaagtcccaaaagctaagagaaataagttttaaatataaagagtttgagcttagtggctatatcagctctgaagcacattacaacaagaatatgcagtttttgtttgtgaacaaaagactagttttaaggacaaagctacataaactcattgactttttattaaggaaagaaagtattatatgcaagccaaagaatggtcccaccagtaggcaaatgaattcaagtcttcggcaccggtctaccccagaactctatggcatatatgtaattaatgtgcagtgccaattctgtgagtatgatgtgtgcatggagccagccaaaactctgattgaatttcagaactgggacactctcttgttttgcattcaggaaggagtgaaaatgtttttaaagcaagaaaaattatttgtggaattatcaggtgaggatattaaggaatttagtgaagataatggttttagtttatttgatgctactcttcagaagcgtgtgacttccgatgagaggagcaatttccaggaagcatgtaataatattttagattcctatgagatgtttaatttgcagtcaaaagctgtgaaaagaaaaactactgcagaaaacgtaaacacacagagttctagggattcagaagctaccagaaaaaatacaaatgatgcatttttgtacatttatgaatcaggtggtccaggccatagcaaaatgacagagccatctttacaaaacaaagacagctcttgctcagaatcaaagatgttagaacaagagacaattgtagcatcagaagctggagaaaatgagaaacataaaaaatctttcctggaacatagctctttagaaaatccgtgtggaaccagtttagaaatgtttttaagcccttttcagacaccatgtcactttgaggagagtgggcaggatctagaaatatggaaagaaagtactactgttaatggcatggctgccaacatcttgaaaaataatagaattcagaatcaaccaaagagatttaaagatgctactgaagtgggatgccagcctctgccttttgcaacaacattatggggagtacatagtgctcagacagagaaagagaaaaaaaaagaatctagcaattgtggaagaagaaatgtttttagttatgggcgagttaaattatgttccactggctttataactcatgtagtacaaaatgaaaaaactaaatcaactgaaacagaacattcatttaaaaattatgttagacctggtcccacacgtgcccaagaaacatttggaaatagaacacgtcattcagttgaaactccagacatcaaagatttagccagcactttaagtaaagaatctggtcaattgcccaacaaaaaaaattgcagaacgaatataagttatgggctagagaatgaacctacagcaacttatacaatgttttctgcttttcaggaaggtagcaaaaaatcacaaacagattgcatattatctgatacatccccctctttcccctggtatagacacgtttccaatgatagtaggaaaacagataaattaattggtttctccaaaccaatcgtccgtaagaagctaagcttgagttcacagctaggatctttagagaagtttaagaggcaatatgggaaggttgaaaatcctctggatacagaagtagaggaaagtaatggagtcactaccaatctcagtcttcaagttgaacctgacattctgctgaaggacaagaaccgcttagagaactctgatgtttgtaaaatcactactatggagcatagtgattcagatagtagttgtcaaccagcaagccacatccttgactcagagaagtttccattctccaaggatgaagattgtttagaacaacagatgcctagtttgagagaaagtcctatgaccctgaaggagttatctctctttaatagaaaacctttggaccttgagaagtcatctgaatcactagcctctaaattatccagactgaagggttccgaaagagaaactcaaacaatggggatgatgagtcgttttaatgaacttccaaattcagattccagtaggaaagacagcaagttgtgcagtgtgttaacacaagatttttgtatgttatttaacaacaagcatgaaaaaacagagaatggtgtcatcccaacatcagattctgccacacaggataattcctttaataaaaatagtaaaacacattctaacagcaatacaacagagaactgtgtgatatcagaaactcctttggtattgccctataataattctaaagttaccggtaaagattcagatgttcttatcagagcctcagaacaacagataggaagtcttgactctcccagtggaatgttaatgaatccggtagaagatgccacaggtgaccaaaatggaatttgttttcagagtgaggaatctaaagcaagagcttgttctgaaactgaagagtcaaacacgtgttgttcagattggcagcggcatttcgatgtagccctgggaagaatggtttatgtcaacaaaatgactggactcagcacattcattgccccaactgaggacattcaggctgcttgtactaaagacctgacaactgtggctgtggatgttgtacttgagaatgggtctcagtacaggtgtcaaccttttagaagcgaccttgttcttcctttccttccgagagctcgagcagagaggactgtgatgagacaggataacagagatactgtggatgatactgttagtagcgaatcgcttcagtctttgttctcagaatgggacaatccagtatttgcccgttatccagaggttgctgttgatgtaagcagtggccaggctgagagcttagcagttaaaattcacaacatcttgtatccctatcgtttcaccaaaggaatgattcattcaatgcaggttctccagcaagtagataacaagtttattgcctgtttgatgagcactaagactgaagagaatggcgaggcaggtgggaacctgctcgtgctggtggatcagcacgctgcccatgagcgtatacgtctggagcagcttatcattgattcctacgagaagcaacaggcacaaggctctggtcggaaaaaattactgtcttctactctaattcctccgctagagataacagtgacagaggaacaaaggagactcttatggtgttaccacaaaaatctggaagatctgggccttgaatttgtatttccagacactagtgattctctggtccttgtgggaaaagtaccactatgttttgtggaaagagaagccaatgaacttcggagaggaagatctactgtgaccaagagtattgtggaggaatttatccgagaacaactggagctactccagaccaccggaggcatccaagggacattgccactgactgtccagaaggtgttggcatcccaagcctgccatggggccattaagtttaatgatggcctgagcttacaggaaagttgccgccttattgaagctctgtcctcatgccagctgccattccagtgtgctcacgggagaccttctatgctgccgttagctgacatagaccacttggaacaggaaaaacagattaaacccaacctcactaaacttcgcaaaatggcccaggcctggcgtctctttggaaaagcagagtgtgatacaaggcagagcctgcagcagtccatgcctccctgtgagccaccatgagaacagaatcactggtctaaaaggaacaaagggatgttcactgtatgcctctgagcagagagcagcagcagcaggtaccagcacggccctgactgaatcagcccagtgtccctgagcagcttagacagcagggctctctgtatcagtctttcttgagcagatgattcccctagttgagtagccagatgaaattcaagcctaaagacaattcattcatttgcatccatgggcacagaaggttgctatatagtatctaccttttgctacttatttaatgataaaatttaatgacagtttgattggttgcttggtttgttatttgaagggtgtgatttttgtttttgtacagttttttttcaagcttcacatttgcgtgtatctaattcagctgatgctcaagtccaaggggtagtctgccttcccaggctgcccccagggtttctgcactggtcccctcttttcccttcagtcttcttcacttccctatgctgctgcttcatgtgctacatctcagacttaaagagtttctctactacagtgaaaacattctctagggtctttcatcaggcctttagttattttagggataaaaactattgataaaaaggacaaggatagaacagagaaaatttaaagtcctgttccgggttttttgttatgttttctttaaaaactcagagactgatgttcaatatcccaaaccagtaaaatggtgaaaatactatgagcttgttttttaaaatatgattttttttggtactttataaa

SEQ ID NO: 301078 - DNA, 5034 bp, Homo sapiens
  misc_feature (2)..(3): n is a, c, g, or t
gnngaagatccaaggtgcgcgcgtcggcgtccgaggcggttggtgtcggagaatttgttaagcgggactccaggcaattatttccagtcagagaaggaaaccagtgcctggcattctcaccatctttctacctaccatgatcaagtgcttgtcagttgaagtacaagccaaattgcgttctggtttggccataagctccttgggccaatgtgttgaggaacttgccctcaacagtattgatgctgaagcaaaatgtgtggctgtcagggtgaatatggaaaccttccaagttcaagtgatagacaatggatttgggatggggagtgatgatgtagagaaagtgggaaatcgttatttcaccagtaaatgccactcggtacaggacttggagaatccaaggttttatggtttccgaggagaggccttggcaaatattgctgacatggccagtgctgtggaaatttcgtccaagaaaaacaggacaatgaaaacttttgtgaaactgtttcagagtggaaaagccctgaaagcttgtgaagctgatgtgactagagcaagcgctgggactactgtaacagtgtataacctattttaccagcttcctgtaaggaggaaatgcatggaccctagactggagtttgagaaggttaggcagagaatagaagctctctcactcatgcacccttccatttctttctctttgagaaatgatgtttctggttccatggttcttcagctccctaaaaccaaagacgtatgttcccgattttgtcaaatttatggattgggaaagtcccaaaagctaagagaaataagttttaaatataaagagtttgagcttagtggctatatcagctctgaagcacattacaacaagaatatgcagtttttgtttgtgaacaaaagactagttttaaggacaaagctacataaactcattgactttttattaaggaaagaaagtattatatgcaagccaaagaatggtcccaccagtaggcaaatgaattcaagtcttcggcaccggtctaccccagaactctatggcatatatgtaattaatgtgcagtgccaattctgtgagtatgatgtgtgcatggagccagccaaaactctgattgaatttcagaactgggacactctcttgttttgcattcaggaaggagtgaaaatgtttttaaagcaagaaaaattatttgtggaattatcaggtgaggatattaaggaatttagtgaagataatggttttagtttatttgatgctactcttcagaagcgtgtgacttccgatgagaggagcaatttccaggaagcatgtaataatattttagattcctatgagatgtttaatttgcagtcaaaagctgtgaaaagaaaaactactgcagaaaacgtaaacacacagagttctagggattcagaagctaccagaaaaaatacaaatgatgcatttttgtacatttatgaatcaggtggtccaggccatagcaaaatgacagagccatctttacaaaacaaagacagctcttgctcagaatcaaagatgttagaacaagagacaattgtagcatcagaagctggagaaaatgagaaacataaaaaatctttcctggaacatagctctttagaaaatccgtgtggaaccagtttagaaatgtttttaagcccttttcagacaccatgtcactttgaggagagtgggcaggatctagaaatatggaaagaaagtactactgttaatggcatggctgccaacatcttgaaaaataatagaattcagaatcaaccaaagagatttaaagatgctactgaagtgggatgccagcctctgccttttgcaacaacattatggggagtacatagtgctcagacagagaaagagaaaaaaaaagaatctagcaattgtggaagaagaaatgtttttagttatgggcgagttaaattatgttccactggctttataactcatgtagtacaaaatgaaaaaactaaatcaactgaaacagaacattcatttaaaaattatgttagacctggtcccacacgtgcccaagaaacatttggaaatagaacacgtcattcagttgaaactccagacatcaaagatttagccagcactttaagtaaagaatctggtcaattgcccaacaaaaaaaattgcagaacgaatataagttatgggctagagaatgaacctacagcaacttatacaatgttttctgcttttcaggaaggtagcaaaaaatcacaaacagattgcatattatctgatacatccccctctttcccctggtatagacacgtttccaatgatagtaggaaaacagataaattaattggtttctccaaaccaatcgtccgtaagaagctaagcttgagttcacagctaggatctttagagaagtttaagaggcaatatgggaaggttgaaaatcctctggatacagaagtagaggaaagtaatggagtcactaccaatctcagtcttcaagttgaacctgacattctgctgaaggacaagaaccgcttagagaactctgatgtttgtaaaatcactactatggagcatagtgattcagatagtagttgtcaaccagcaagccacatccttgactcagagaagtttccattctccaaggatgaagattgtttagaacaacagatgcctagtttgagagaaagtcctatgaccctgaaggagttatctctctttaatagaaaacctttggaccttgagaagtcatctgaatcactagcctctaaattatccagactgaagggttccgaaagagaaactcaaacaatggggatgatgagtcgttttaatgaacttccaaattcagattccagtaggaaagacagcaagttgtgcagtgtgttaacacaagatttttgtatgttatttaacaacaagcatgaaaaaacagagaatggtgtcatcccaacatcagattctgccacacaggataattcctttaataaaaatagtaaaacacattctaacagcaatacaacagagaactgtgtgatatcagaaactcctttggtattgccctataataattctaaagttaccggtaaagattcagatgttcttatcagagcctcagaacaacagataggaagtcttgactctcccagtggaatgttaatgaatccggtagaagatgccacaggtgaccaaaatggaatttgttttcagagtgaggaatctaaagcaagagcttgttctgaaactgaagagtcaaacacgtgttgttcagattggcagcggcatttcgatgtagccctgggaagaatggtttatgtcaacaaaatgactggactcagcacattcattgccccaactgaggacattcaggctgcttgtactaaagacctgacaactgtggctgtggatgttgtacttgagaatgggtctcagtacaggtgtcaaccttttagaagcgaccttgttcttcctttccttccgagagctcgagcagagaggactgtgatgagacaggataacagagatactgtggatgatactgttagtagcgaatcgcttcagtctttgttctcagaatgggacaatccagtatttgcccgttatccagaggttgctgttgatgtaagcagtggccaggctgagagcttagcagttaaaattcacaacatcttgtatccctatcgtttcaccaaaggaatgattcattcaatgcaggttctccagcaagtagataacaagtttattgcctgtttgatgagcactaagactgaagagaatggcgaggcaggtgggaacctgctcgtgctggtggatcagcacgctgcccatgagcgtatacgtctggagcagcttatcattgattcctacgagaagcaacaggcacaaggctctggtcggaaaaaattactgtcttctactctaattcctccgctagagataacagtgacagaggaacaaaggagactcttatggtgttaccacaaaaatctggaagatctgggccttgaatttgtatttccagacactagtgattctctggtccttgtgggaaaagtaccactatgttttgtggaaagagaagccaatgaacttcggagaggaagatctactgtgaccaagagtattgtggaggaatttatccgagaacaactggagctactccagaccaccggaggcatccaagggacattgccactgactgtccagaaggtgttggcatcccaagcctgccatggggccattaagtttaatgatggcctgagcttacaggaaagttgccgccttattgaagctctgtcctcatgccagctgccattccagtgtgctcacgggagaccttctatgctgccgttagctgacatagaccacttggaacaggaaaaacagattaaacccaacctcactaaacttcgcaaaatggcccaggcctggcgtctctttggaaaagcagagtgtgatacaaggcagagcctgcagcagtccatgcctccctgtgagccaccatgagaacagaatcactggtctaaaaggaacaaagggatgttcactgtatgcctctgagcagagagcagcagcagcagaaaccaattcgtgctcatggaagaaaagttcctttgccagcagccttgaagtgaatcttacaggagcaatgaaagtattgcattcattagcgtctgccccagagaaggttcagagaaaacttcacttgttttcaaggggatccttgtagatttacgtaattggaatcctgaagaacaggccctactgtctaaaaaatggcttttattcttctaaatacatataaacggatgttttatagatgggaagacatgaccttagaaaggagagagttttcagaggatttgccaggctgtcaggggctctgcctccaggcccagtgtggcagtgtggcctcagggcctccgcctccctgcttgagggctgcatggaggccaactgtcctgggagttgtaaaaatcttttaaggccagaccaatttgagggattttaaaaagtgtctcagtgcctcttatgatttcaga

SEQ ID NO: 301079 - DNA, 4967 bp, Homo sapiens
  misc_feature (2)..(3): n is a, c, g, or t
gnngaagatccaaggtgcgcgcgtcggcgtccgaggcggttggtgtcggagaatttgttaagcgggactccaggcaattatttccagtcagagaaggaaaccagtgcctggcattctcaccatctttctacctaccatgatcaagtgcttgtcagttgaagtacaagccaaattgcgttctggtttggccataagctccttgggccaatgtgttgaggaacttgccctcaacagtattgatgctgaagcaaaatgtgtggctgtcagggtgaatatggaaaccttccaagttcaagtgatagacaatggatttgggatggggagtgatgatgtagagaaagtgggaaatcgttatttcaccagtaaatgccactcggtacaggacttggagaatccaaggttttatggtttccgaggagaggccttggcaaatattgctgacatggccagtgctgtggaaatttcgtccaagaaaaacaggacaatgaaaacttttgtgaaactgtttcagagtggaaaagccctgaaagcttgtgaagctgatgtgactagagcaagcgctgggactactgtaacagtgtataacctattttaccagcttcctgtaaggaggaaatgcatggaccctagactggagtttgagaaggttaggcagagaatagaagctctctcactcatgcacccttccatttctttctctttgagaaatgatgtttctggttccatggttcttcagctccctaaaaccaaagacgtatgttcccgattttgtcaaatttatggattgggaaagtcccaaaagctaagagaaataagttttaaatataaagagtttgagcttagtggctatatcagctctgaagcacattacaacaagaatatgcagtttttgtttgtgaacaaaagactagttttaaggacaaagctacataaactcattgactttttattaaggaaagaaagtattatatgcaagccaaagaatggtcccaccagtaggcaaatgaattcaagtcttcggcaccggtctaccccagaactctatggcatatatgtaattaatgtgcagtgccaattctgtgagtatgatgtgtgcatggagccagccaaaactctgattgaatttcagaactgggacactctcttgttttgcattcaggaaggagtgaaaatgtttttaaagcaagaaaaattatttgtggaattatcaggtgaggatattaaggaatttagtgaagataatggttttagtttatttgatgctactcttcagaagcgtgtgacttccgatgagaggagcaatttccaggaagcatgtaataatattttagattcctatgagatgtttaatttgcagtcaaaagctgtgaaaagaaaaactactgcagaaaacgtaaacacacagagttctagggattcagaagctaccagaaaaaatacaaatgatgcatttttgtacatttatgaatcaggtggtccaggccatagcaaaatgacagagccatctttacaaaacaaagacagctcttgctcagaatcaaagatgttagaacaagagacaattgtagcatcagaagctggagaaaatgagaaacataaaaaatctttcctggaacatagctctttagaaaatccgtgtggaaccagtttagaaatgtttttaagcccttttcagacaccatgtcactttgaggagagtgggcaggatctagaaatatggaaagaaagtactactgttaatggcatggctgccaacatcttgaaaaataatagaattcagaatcaaccaaagagatttaaagatgctactgaagtgggatgccagcctctgccttttgcaacaacattatggggagtacatagtgctcagacagagaaagagaaaaaaaaagaatctagcaattgtggaagaagaaatgtttttagttatgggcgagttaaattatgttccactggctttataactcatgtagtacaaaatgaaaaaactaaatcaactgaaacagaacattcatttaaaaattatgttagacctggtcccacacgtgcccaagaaacatttggaaatagaacacgtcattcagttgaaactccagacatcaaagatttagccagcactttaagtaaagaatctggtcaattgcccaacaaaaaaaattgcagaacgaatataagttatgggctagagaatgaacctacagcaacttatacaatgttttctgcttttcaggaaggtagcaaaaaatcacaaacagattgcatattatctgatacatccccctctttcccctggtatagacacgtttccaatgatagtaggaaaacagataaattaattggtttctccaaaccaatcgtccgtaagaagctaagcttgagttcacagctaggatctttagagaagtttaagaggcaatatgggaaggttgaaaatcctctggatacagaagtagaggaaagtaatggagtcactaccaatctcagtcttcaagttgaacctgacattctgctgaaggacaagaaccgcttagagaactctgatgtttgtaaaatcactactatggagcatagtgattcagatagtagttgtcaaccagcaagccacatccttgactcagagaagtttccattctccaaggatgaagattgtttagaacaacagatgcctagtttgagagaaagtcctatgaccctgaaggagttatctctctttaatagaaaacctttggaccttgagaagtcatctgaatcactagcctctaaattatccagactgaagggttccgaaagagaaactcaaacaatggggatgatgagtcgttttaatgaacttccaaattcagattccagtaggaaagacagcaagttgtgcagtgtgttaacacaagatttttgtatgttatttaacaacaagcatgaaaaaacagagaatggtgtcatcccaacatcagattctgccacacaggataattcctttaataaaaatagtaaaacacattctaacagcaatacaacagagaactgtgtgatatcagaaactcctttggtattgccctataataattctaaagttaccggtaaagattcagatgttcttatcagagcctcagaacaacagataggaagtcttgactctcccagtggaatgttaatgaatccggtagaagatgccacaggtgaccaaaatggaatttgttttcagagtgaggaatctaaagcaagagcttgttctgaaactgaagagtcaaacacgtgttgttcagattggcagcggcatttcgatgtagccctgggaagaatggtttatgtcaacaaaatgactggactcagcacattcattgccccaactgaggacattcaggctgcttgtactaaagacctgacaactgtggctgtggatgttgtacttgagaatgggtctcagtacaggtgtcaaccttttagaagcgaccttgttcttcctttccttccgagagctcgagcagagaggactgtgatgagacaggataacagagatactgtggatgatactgttagtagcgaatcgcttcagtctttgttctcagaatgggacaatccagtatttgcccgttatccagaggttgctgttgatgtaagcagtggccaggctgagagcttagcagttaaaattcacaacatcttgtatccctatcgtttcaccaaaggaatgattcattcaatgcaggttctccagcaagtagataacaagtttattgcctgtttgatgagcactaagactgaagagaatggcgaggcaggtgggaacctgctcgtgctggtggatcagcacgctgcccatgagcgtatacgtctggagcagcttatcattgattcctacgagaagcaacaggcacaaggctctggtcggaaaaaattactgtcttctactctaattcctccgctagagataacagtgacagaggaacaaaggagactcttatggtgttaccacaaaaatctggaagatctgggccttgaatttgtatttccagacactagtgattctctggtccttgtgggaaaagtaccactatgttttgtggaaagagaagccaatgaacttcggagaggaagatctactgtgaccaagagtattgtggaggaatttatccgagaacaactggagctactccagaccaccggaggcatccaagggacattgccactgactgtccagaaggtgttggcatcccaagcctgccatggggccattaagtttaatgatggcctgagcttacaggaaagttgccgccttattgaagctctgtcctcatgccagctgccattccagtgtgctcacgggagaccttctatgctgccgttagctgacatagaccacttggaacaggaaaaacagattaaacccaacctcactaaacttcgcaaaatggcccaggcctggcgtctctttggaaaagcagagtgtgatacaaggcagagcctgcagcagtccatgcctccctgtgagccaccatgagaacagaatcactggtctaaaaggaacaaagggatgttcactgtatgcctctgagcagagagcagcagcagcacaatgaaagtattgcattcattagcgtctgccccagagaaggttcagagaaaacttcacttgttttcaaggggatccttgtagatttacgtaattggaatcctgaagaacaggccctactgtctaaaaaatggcttttattcttctaaatacatataaacggatgttttatagatgggaagacatgaccttagaaaggagagagttttcagaggatttgccaggctgtcaggggctctgcctccaggcccagtgtggcagtgtggcctcagggcctccgcctccctgcttgagggctgcatggaggccaactgtcctgggagttgtaaaaatcttttaaggccagaccaatttgagggattttaaaaagtgtctcagtgcctcttatgatttcaga

SEQ ID NO: 301080 - DNA, 4643 bp, Homo sapiens
  misc_feature (2)..(3): n is a, c, g, or t
gnngaagatccaaggtgcgcgcgtcggcgtccgaggcggttggtgtcggagaatttgttaagcgggactccaggcaattatttccagtcagagaaggaaaccagtgcctggcattctcaccatctttctacctaccatgatcaagtgcttgtcagttgaagtacaagccaaattgcgttctggtttggccataagctccttgggccaatgtgttgaggaacttgccctcaacagtattgatgctgaagcaaaatgtgtggctgtcagggtgaatatggaaaccttccaagttcaagtgatagacaatggatttgggatggggagtgatgatgtagagaaagtgggaaatcgttatttcaccagtaaatgccactcggtacaggacttggagaatccaaggttttatggtttccgaggagaggccttggcaaatattgctgacatggccagtgctgtggaaatttcgtccaagaaaaacaggacaatgaaaacttttgtgaaactgtttcagagtggaaaagccctgaaagcttgtgaagctgatgtgactagagcaagcgctgggactactgtaacagtgtataacctattttaccagcttcctgtaaggaggaaatgcatggaccctagactggagtttgagaaggttaggcagagaatagaagctctctcactcatgcacccttccatttctttctctttgagaaatgatgtttctggttccatggttcttcagctccctaaaaccaaagacgtatgttcccgattttgtcaaatttatggattgggaaagtcccaaaagctaagagaaataagttttaaatataaagagtttgagcttagtggctatatcagctctgaagcacattacaacaagaatatgcagtttttgtttgtgaacaaaagactagttttaaggacaaagctacataaactcattgactttttattaaggaaagaaagtattatatgcaagccaaagaatggtcccaccagtaggcaaatgaattcaagtcttcggcaccggtctaccccagaactctatggcatatatgtaattaatgtgcagtgccaattctgtgagtatgatgtgtgcatggagccagccaaaactctgattgaatttcagaactgggacactctcttgttttgcattcaggaaggagtgaaaatgtttttaaagcaagaaaaattatttgtggaattatcaggtgaggatattaaggaatttagtgaagataatggttttagtttatttgatgctactcttcagaagcgtgtgacttccgatgagaggagcaatttccaggaagcatgtaataatattttagattcctatgagatgtttaatttgcagtcaaaagctgtgaaaagaaaaactactgcagaaaacgtaaacacacagagttctagggattcagaactggagaaaatgagaaacataaaaaatctttcctggaacatagctctttagaaaatccgtgtggaaccagtttagaaatgtttttaagcccttttcagacaccatgtcactttgaggagagtgggcaggatctagaaatatggaaagaaagtactactgttaatggcatggctgccaacatcttgaaaaataatagaattcagaatcaaccaaagagatttaaagatgctactgaagtgggatgccagcctctgccttttgcaacaacattatggggagtacatagtgctcagacagagaaagagaaaaaaaaagaatctagcaattgtggaagaagaaatgtttttagttatgggcgagttaaattatgttccactggctttataactcatgtagtacaaaatgaaaaaactaaatcaactgaaacagaacattcatttaaaaattatgttagacctggtcccacacgtgcccaagaaacatttggaaatagaacacgtcattcagttgaaactccagacatcaaagatttagccagcactttaagtaaagaatctggtcaattgcccaacaaaaaaaattgcagaacgaatataagttatgggctagagaatgaacctacagcaacttatacaatgttttctgcttttcaggaaggtagcaaaaaatcacaaacagattgcatattatctgatacatccccctctttcccctggtatagacacgtttccaatgatagtaggaaaacagataaattaattggtttctccaaaccaatcgtccgtaagaagctaagcttgagttcacagctaggatctttagagaagtttaagaggcaatatgggaaggttgaaaatcctctggatacagaagtagaggaaagtaatggagtcactaccaatctcagtcttcaagttgaacctgacattctgctgaaggacaagaaccgcttagagaactctgatgtttgtaaaatcactactatggagcatagtgattcagatagtagttgtcaaccagcaagccacatccttgactcagagaagtttccattctccaaggatgaagattgtttagaacaacagatgcctagtttgagagaaagtcctatgaccctgaaggagttatctctctttaatagaaaacctttggaccttgagaagtcatctgaatcactagcctctaaattatccagactgaagggttccgaaagagaaactcaaacaatggggatgatgagtcgttttaatgaacttccaaattcagattccagtaggaaagacagcaagttgtgcagtgtgttaacacaagatttttgtatgttatttaacaacaagcatgaaaaaacagagaatggtgtcatcccaacatcagattctgccacacaggataattcctttaataaaaatagtaaaacacattctaacagcaatacaacagagaactgtgtgatatcagaaactcctttggtattgccctataataattctaaagttaccggtaaagattcagatgttcttatcagagcctcagaacaacagataggaagtcttgactctcccagtggaatgttaatgaatccggtagaagatgccacaggtgaccaaaatggaatttgttttcagagtgaggaatctaaagcaagagcttgttctgaaactgaagagtcaaacacgtgttgttcagattggcagcggcatttcgatgtagccctgggaagaatggtttatgtcaacaaaatgactggactcagcacattcattgccccaactgaggacattcaggctgcttgtactaaagacctgacaactgtggctgtggatgttgtacttgagaatgggtctcagtacaggtgtcaaccttttagaagcgaccttgttcttcctttccttccgagagctcgagcagagaggactgtgatgagacaggataacagagatactgtggatgatactgttagtagcgaatcgcttcagtctttgttctcagaatgggacaatccagtatttgcccgttatccagaggttgctgttgatgtaagcagtggccaggctgagagcttagcagttaaaattcacaacatcttgtatccctatcgtttcaccaaaggaatgattcattcaatgcaggttctccagcaagtagataacaagtttattgcctgtttgatgagcactaagactgaagagaatggcgaggcaggtgggaacctgctcgtgctggtggatcagcacgctgcccatgagcgtatacgtctggagcagcttatcattgattcctacgagaagcaacaggcacaaggctctggtcggaaaaaattactgtcttctactctaattcctccgctagagataacagtgacagaggaacaaaggagactcttatggtgttaccacaaaaatctggaagatctgggccttgaatttgtatttccagacactagtgattctctggtccttgtgggaaaagtaccactatgttttgtggaaagagaagccaatgaacttcggagaggaagatctactgtgaccaagagtattgtggaggaatttatccgagaacaactggagctactccagaccaccggaggcatccaagggacattgccactgactgtccagaaggtgttggcatcccaagcctgccatggggccattaagtttaatgatggcctgagcttacaggaaagttgccgccttattgaagctctgtcctcatgccagctgccattccagtgtgctcacgggagaccttctatgctgccgttagctgacatagaccacttggaacaggaaaaacagattaaacccaacctcactaaacttcgcaaaatggcccaggcctggcgtctctttggaaaagcagagtgtgatacaaggcagagcctgcagcagtccatgcctccctgtgagccaccatgagaacagaatcactggtctaaaaggaacaaagggatgttcactgtatgcctctgagcagagagcagcagcagcaggtaccagcacggccctgactgaatcagcccagtgtccctgagcagcttagacagcagggctctctgtatcagtctttcttgagcagatgattcccctagttgagtagccagatgaaattcaagcctaaagacaattcattcatttgcatccatgggcacagaaggttgctatatagtatctaccttttgctacttatttaatgataaaatttaatgacagtttga

SEQ ID NO: 301081 - DNA, 1518 bp, Homo sapiens
agtaatgtcaaagagttaggcaaggacctaaggagtgcttcatggactagaatggcaatgatattactactgttttcacttttccttataaaatgacggcctaagagttgggaaagatatagtaaaaacagtgttagaaaaacttacctctacaggccctgcaccatttgagaatagtactaattctctccagagactgggagaccctgctcaaggaaagggaagccttctggagccataagactgtgtggtcaacccacatatgttcctggtaatccacattattcacctctgtcatcaaaacaacatttattaactacaggaacattggcttgttcatctgaatgtaagatgcaagtcttatatttcttattttgaaaaatactaccaaaattgttaataggctgaatatttattagtttgactttaaaaatggaaatccaaaatctaaaactgaacattaaacattctgctttgcattagaatgattatctcaaggccgtgctttatttttatctgaatctagaagacttcccttcctactcttaacccattcatctttctgccaatagattcctacgagaagcaacaggcacaaggctctggtcggaaaaaattactgtcttctactctaattcctccgctagagataacagtgacagaggaacaaaggagactcttatggtgttaccacaaaaatctggaagatctgggccttgaatttgtatttccagacactagtgattctctggtccttgtgggaaaagtaccactatgttttgtggaaagagaagccaatgaacttcggagaggaagatctactgtgaccaagagtattgtggaggaatttatccgagaacaactggagctactccagaccaccggaggcatccaagggacattgccactgactgtccagaaggtgttggcatcccaagcctgccatggggccattaagtttaatgatggcctgagcttacaggaaagttgccgccttattgaagctctgtcctcatgccagctgccattccagtgtgctcacgggagaccttctatgctgccgttagctgacatagaccacttggaacaggaaaaacagattaaacccaacctcactaaacttcgcaaaatggcccaggcctggcgtctctttggaaaagcagagtgtgatacaaggcagagcctgcagcagtccatgcctccctgtgagccaccatgagaacagaatcactggtctaaaaggaacaaagggatgttcactgtatgcctctgagcagagagcagcagcagcaggtaccagcacggccctgactgaatcagcccagtgtccctgagcagcttagacagcagggctctctgtatcagtctttcttgagcagatgattcccctagttgagtagccagatgaaattcaagcctaaagacaattcattcatttgcatccatgggcacagaaggttgctatatagtatctaccttttgctacttatttaatgataaaatttaatgacagtttga

SEQ ID NO: 301082 - DNA, 732 bp, Homo sapiens
aactctttcaggaactttggctacacacagaagaagagagatggggtgagagctaaaggaatttatccgagaacaactggagctactccagaccaccggaggcatccaagggacattgccactgactgtccagaaggtgttggcatcccaagcctgccatggggccattaagtttaatgatggcctgagcttacaggaaagttgccgccttattgaagctctgtcctcatgccagctgccattccagtgtgctcacgggagaccttctatgctgccgttagctgacatagaccacttggaacaggaaaaacagattaaacccaacctcactaaacttcgcaaaatggcccaggcctggcgtctctttggaaaagcagagtgtgatacaaggcagagcctgcagcagtccatgcctccctgtgagccaccatgagaacagaatcactggtctaaaaggaacaaagggatgttcactgtatgcctctgagcagagagcagcagcagcaggtaccagcacggccctgactgaatcagcccagtgtccctgagcagcttagacagcagggctctctgtatcagtctttcttgagcagatgattcccctagttgagtagccagatgaaattcaagcctaaagacaattcattcatttgcatccatgggcacagaaggttgctatatagtatctaccttttgctacttatttaatgataaaatttaatgacagtttga

SEQ ID NO: 301083 - DNA, 2944 bp, Homo sapiens
agcggaggctgagcggctacctgaatggggagggggcagacggcgctgagcgcggcggcggcgggagcggcgtcgagtgtctccgtgcgcccgtctgtggccaagcagccagcagcctagcagccagtcagcttgccgccggcggccaagcagccaaccatgctcaacttcggtgcctctctccagcagactgcggaggaaagaatggaaatgatttctgaaaggccaaaagagagtatgtattcctggaacaaaactgcagagaaaagtgattttgaagctgtagaagcacttatgtcaatgagctgcagttggaagtctgattttaagaaatacgttgaaaacagacctgttacaccagtatctgatttgtcagaggaagagaatctgcttccgggaacacctgattttcatacaatcccagcattttgtttgactccaccttacagtccttctgactttgaaccctctcaagtgtcaaatctgatggcaccagcgccatctactgtacacttcaagtcactctcagatactgccaaacctcacattgccgcacctttcaaagaggaagaaaagagcccagtatctgcccccaaactccccaaagctcaggcaacaagtgtgattcgtcatacagctgatgcccagctatgtaaccaccagacctgcccaatgaaagcagccagcatcctcaactatcagaacaattcttttagaagaagaacccacctaaatgttgaggctgcaagaaagaacataccatgtgccgctgtgtcaccaaacagatccaaatgtgagagaaacacagtggcagatgttgatgagaaagcaagtgctgcactttatgacttttctgtgccttcctcagagacggtcatctgcaggtctcagccagcccctgtgtccccacaacagaagtcagtgttggtctctccacctgcagtatctgcagggggagtgccacctatgccggtcatctgccagatggttccccttcctgccaacaaccctgttgtgacaacagtcgttcccagcactcctcccagccagccaccagccgtttgcccccctgttgtgttcatgggcacacaagtccccaaaggcgctgtcatgtttgtggtaccccagcccgttgtgcagagttcaaagcctccggtggtgagcccgaatggcaccagactctctcccattgcccctgctcctgggttttccccttcagcagcaaaagtcactcctcagattgattcatcaaggataaggagtcacatctgtagccacccaggatgtggcaagacatactttaaaagttcccatctgaaggcccacacgaggacgcacacaggagaaaagcctttcagctgtagctggaaaggttgtgaaaggaggtttgcccgttctgatgaactgtccagacacaggcgaacccacacgggtgagaagaaatttgcgtgccccatgtgtgaccggcggttcatgaggagtgaccatttgaccaagcatgcccggcgccatctatcagccaagaagctaccaaactggcagatggaagtgagcaagctaaatgacattgctctacctccaacccctgctcccacacagtgacagaccggaaagtgaagagtcagaactaactttggtctcagcgggagccagtggtgatgtaaaaatgcttccactgcaagtctgtggccccacaacgtgggcttaaagcagaagccccacagcctggcacgaaggccccgcctgggttaggtgactaaaagggcttcggccacaggcaggtcacagaaaggcaggtttcatttcttatcacataagagagatgagaaagcttttattcctttgaatattttttgaaggtttcagatgaggtcaacacaggtagcacagattttgaatctgtgtgcatatttgttactttacttttgctgtttatacttgagaccaacttttcaatgtgattcttctaaagcactggtttcaagaatatggaggctggaaggaaataaacattacggtacagacatggagatgtaaaatgagtttgtattattacaaatattgtcatctttttctagagttatcttctttattattcctagtctttccagtcaacatcgtggatgtagtgattaaatatatctagaactatcatttttacactattgtgaatatttggaattgaacgactgtatattgctaagagggcccaaagaattggaatcctccttaatttaattgctttgaagcatagctacaatttgtttttgcatttttgttttgaaagtttaacaaatgactgtatctaggcatttcattatgctttgaactttagtttgcctgcagtttcttgtgtagatttgaaaattgtataccaatgtgttttctgtagactctaagatacactgcactttgtttagaaaaaaaactgaagatgaaatatatattgtaaagaagggatattaagaatcttagataacttcttgaaaaagatggcttatgtcatcagtaaagtacctttatgttatgaggatataatgtgtgctttattgaattagaaaattagtgaccattattcacaggtggacaaatgttgtcctgttaatttataggcgttttttggggatgtggaggtagttgggtagaaaaattattagaacattcacttttgttaacagtatttctcttttattctgttatatagtggatgatatacacagtggcaaaacaaaagtacattgcttaaaatatatagtgaaaaatgtcactatatcttcccatttaacattgtttttgtatattgggtgtagatttctgacatcaaaacttggacccttggaaaacaaaagttttaattaaaaaaaatccttgtgacttacaatttgcacaatatttcttttgttgtactttatatcttgtttacaataaagaattccctttggta

SEQ ID NO: 301084 - DNA, 3289 bp, Homo sapiens
gtgcgagcggcgaggaatgttcccagtgactcacccgtgagcctcattgaggttagggcggccccatccgtcggtctccgccagctaggatctcccccgccgtccgcccccgcccctcgtctgcctcccccgcccgcgcctccgcccgcgcttccctttcctgcctcgcgccccactccctttcctcccctccctgtttcccttcctgtccttcccagctcacgctctctttccctgccgcctgcctttcttttttcctttttttgcattggcgtcttggggctgttacacacacgcgcgctgtccattgcagcttacataaaggcgggcgcgattatgcaattatattgttagcgatatttcaagagcaatggctcgttttcttaggatttcaacacgaaggcatcatgcatttttgaaaaactagtattgagaataataccttgcaacgtaaagaatgttttttggtatttttacacaatctctactttgaccaaacgagtctggacagttttcttttaatggaaaataggagaaatggaggaaagaatggaaatgatttctgaaaggccaaaagagagtatgtattcctggaacaaaactgcagagaaaagtgattttgaagctgtagaagcacttatgtcaatgagctgcagttggaagtctgattttaagaaatacgttgaaaacagacctgttacaccagtatctgatttgtcagaggaagagaatctgcttccgggaacacctgattttcatacaatcccagcattttgtttgactccaccttacagtccttctgactttgaaccctctcaagtgtcaaatctgatggcaccagcgccatctactgtacacttcaagtcactctcagatactgccaaacctcacattgccgcacctttcaaagaggaagaaaagagcccagtatctgcccccaaactccccaaagctcaggcaacaagtgtgattcgtcatacagctgatgcccagctatgtaaccaccagacctgcccaatgaaagcagccagcatcctcaactatcagaacaattcttttagaagaagaacccacctaaatgttgaggctgcaagaaagaacataccatgtgccgctgtgtcaccaaacagatccaaatgtgagagaaacacagtggcagatgttgatgagaaagcaagtgctgcactttatgacttttctgtgccttcctcagagacggtcatctgcaggtctcagccagcccctgtgtccccacaacagaagtcagtgttggtctctccacctgcagtatctgcagggggagtgccacctatgccggtcatctgccagatggttccccttcctgccaacaaccctgttgtgacaacagtcgttcccagcactcctcccagccagccaccagccgtttgcccccctgttgtgttcatgggcacacaagtccccaaaggcgctgtcatgtttgtggtaccccagcccgttgtgcagagttcaaagcctccggtggtgagcccgaatggcaccagactctctcccattgcccctgctcctgggttttccccttcagcagcaaaagtcactcctcagattgattcatcaaggataaggagtcacatctgtagccacccaggatgtggcaagacatactttaaaagttcccatctgaaggcccacacgaggacgcacacaggagaaaagcctttcagctgtagctggaaaggttgtgaaaggaggtttgcccgttctgatgaactgtccagacacaggcgaacccacacgggtgagaagaaatttgcgtgccccatgtgtgaccggcggttcatgaggagtgaccatttgaccaagcatgcccggcgccatctatcagccaagaagctaccaaactggcagatggaagtgagcaagctaaatgacattgctctacctccaacccctgctcccacacagtgacagaccggaaagtgaagagtcagaactaactttggtctcagcgggagccagtggtgatgtaaaaatgcttccactgcaagtctgtggccccacaacgtgggcttaaagcagaagccccacagcctggcacgaaggccccgcctgggttaggtgactaaaagggcttcggccacaggcaggtcacagaaaggcaggtttcatttcttatcacataagagagatgagaaagcttttattcctttgaatattttttgaaggtttcagatgaggtcaacacaggtagcacagattttgaatctgtgtgcatatttgttactttacttttgctgtttatacttgagaccaacttttcaatgtgattcttctaaagcactggtttcaagaatatggaggctggaaggaaataaacattacggtacagacatggagatgtaaaatgagtttgtattattacaaatattgtcatctttttctagagttatcttctttattattcctagtctttccagtcaacatcgtggatgtagtgattaaatatatctagaactatcatttttacactattgtgaatatttggaattgaacgactgtatattgctaagagggcccaaagaattggaatcctccttaatttaattgctttgaagcatagctacaatttgtttttgcatttttgttttgaaagtttaacaaatgactgtatctaggcatttcattatgctttgaactttagtttgcctgcagtttcttgtgtagatttgaaaattgtataccaatgtgttttctgtagactctaagatacactgcactttgtttagaaaaaaaactgaagatgaaatatatattgtaaagaagggatattaagaatcttagataacttcttgaaaaagatggcttatgtcatcagtaaagtacctttatgttatgaggatataatgtgtgctttattgaattagaaaattagtgaccattattcacaggtggacaaatgttgtcctgttaatttataggcgttttttggggatgtggaggtagttgggtagaaaaattattagaacattcacttttgttaacagtatttctcttttattctgttatatagtggatgatatacacagtggcaaaacaaaagtacattgcttaaaatatatagtgaaaaatgtcactatatcttcccatttaacattgtttttgtatattgggtgtagatttctgacatcaaaacttggacccttggaaaacaaaagttttaattaaaaaaaatccttgtgacttacaatttgcacaatatttcttttgttgtactttatatcttgtttacaataaagaattccctttggta

SEQ ID NO: 301085 - DNA, 2964 bp, Homo sapiens
  misc_feature (2947)..(2947): n is a, c, g, or t
agcggaggctgagcggctacctgaatggggagggggcagacggcgctgagcgcggcggcggcgggagcggcgtcgagtgtctccgtgcgcccgtctgtggccaagcagccagcagcctagcagccagtcagcttgccgccggcggccaagcagccaaccatgctcaacttcggtgcctctctccagcagactgcggaggaaagaatggaaatgatttctgaaaggccaaaagagagtatgtattcctggaacaaaactgcagagaaaagtgattttgaagctgtagaagcacttatgtcaatgagctgcagttggaagtctgattttaagaaatacgttgaaaacagacctgttacaccagtatctgatttgtcagaggaagagaatctgcttccgggaacacctgattttcatacaatcccagcattttgtttgactccaccttacagtccttctgactttgaaccctctcaagtgtcaaatctgatggcaccagcgccatctactgtacacttcaagtcactctcagatactgccaaacctcacattgccgcacctttcaaagaggaagaaaagagcccagtatctgcccccaaactccccaaagctcaggcaacaagtgtgattcgtcatacagctgatgcccagctatgtaaccaccagacctgcccaatgaaagcagccagcatcctcaactatcagaacaattcttttagaagaagaacccacctaaatgttgaggctgcaagaaagaacataccatgtgccgctgtgtcaccaaacagatccaaatgtgagagaaacacagtggcagatgttgatgagaaagcaagtgctgcactttatgacttttctgtgccttcctcagagacggtcatctgcaggtctcagccagcccctgtgtccccacaacagaagtcagtgttggtctctccacctgcagtatctgcagggggagtgccacctatgccggtcatctgccagatggttccccttcctgccaacaaccctgttgtgacaacagtcgttcccagcactcctcccagccagccaccagccgtttgcccccctgttgtgttcatgggcacacaagtccccaaaggcgctgtcatgtttgtggtaccccagcccgttgtgcagagttcaaagcctccggtggtgagcccgaatggcaccagactctctcccattgcccctgctcctgggttttccccttcagcagcaaaagtcactcctcagattgattcatcaaggataaggagtcacatctgtagccacccaggatgtggcaagacatactttaaaagttcccatctgaaggcccacacgaggacgcacacaggagaaaagcctttcagctgtagctggaaaggttgtgaaaggaggtttgcccgttctgatgaactgtccagacacaggcgaacccacacgggtgagaagaaatttgcgtgccccatgtgtgaccggcggttcatgaggagtgaccatttgaccaagcatgcccggcgccatctatcagccaagaagctaccaaactggcagatggaagtgagcaagctaaatgacattgctctacctccaacccctgctcccacacagtgacagaccggaaagtgaagagtcagaactaactttggtctcagcgggagccagtggtgatgtaaaaatgcttccactgcaagtctgtggccccacaacgtgggcttaaagcagaagccccacagcctggcacgaaggccccgcctgggttaggtgactaaaagggcttcggccacaggcaggtcacagaaaggcaggtttcatttcttatcacataagagagatgagaaagcttttattcctttgaatattttttgaaggtttcagatgaggtcaacacaggtagcacagattttgaatctgtgtgcatatttgttactttacttttgctgtttatacttgagaccaacttttcaatgtgattcttctaaagcactggtttcaagaatatggaggctggaaggaaataaacattacggtacagacatggagatgtaaaatgagtttgtattattacaaatattgtcatctttttctagagttatcttctttattattcctagtctttccagtcaacatcgtggatgtagtgattaaatatatctagaactatcatttttacactattgtgaatatttggaattgaacgactgtatattgctaagagggcccaaagaattggaatcctccttaatttaattgctttgaagcatagctacaatttgtttttgcatttttgttttgaaagtttaacaaatgactgtatctaggcatttcattatgctttgaactttagtttgcctgcagtttcttgtgtagatttgaaaattgtataccaatgtgttttctgtagactctaagatacactgcactttgtttagaaaaaaaactgaagatgaaatatatattgtaaagaagggatattaagaatcttagataacttcttgaaaaagatggcttatgtcatcagtaaagtacctttatgttatgaggatataatgtgtgctttattgaattagaaaattagtgaccattattcacaggtggacaaatgttgtcctgttaatttataggcgttttttggggatgtggaggtagttgggtagaaaaattattagaacattcacttttgttaacagtatttctcttttattctgttatatagtggatgatatacacagtggcaaaacaaaagtacattgcttaaaatatatagtgaaaaatgtcactatatcttcccatttaacattgtttttgtatattgggtgtagatttctgacatcaaaacttggacccttggaaaacaaaagttttaattaaaaaaaatccttgtgacttacaatttgcacaatatttcttttgttgtactttatatcttgtttacaataaagaattccctttggtaacnacaacaacaaacaacaa

SEQ ID NO: 301086 - DNA, 2890 bp, Homo sapiens
agcggaggctgagcggctacctgaatggggagggggcagacggcgctgagcgcggcggcggcgggagcggcgtcgagtgtctccgtgcgcccgtctgtggccaagcagccagcagcctagcagccagtcagcttgccgccggcggccaagcagccaaccatgctcaacttcggtgcctctctccagcagactgcggaggaaagaatggaaatgatttctgaaaggccaaaagagagtatgtattcctggaacaaaactgcagagaaaagtgattttgaagctgtagaagcacttatgtcaatgagctgcagttggaagtctgattttaagaaatacgttgaaaacagacctgttacaccagtatctgatttgtcagaggaagagaatctgcttccgggaacacctgattttcatacaatcccagcattttgtttgactccaccttacagtccttctgactttgaaccctctcaagtgtcaaatctgatggcaccagcgccatctactgtacacttcaagtcactctcagatactgccaaacctcacattgccgcacctttcaaagaggaagaaaagagcccagtatctgcccccaaactccccaaagctcaggcaacaagtgtgattcgtcatacagctgatgcccagctatgtaaccaccagacctgcccaatgaaagcagccagcatcctcaactatcagaacaattcttttagaagaagaacccacctaaatgttgaggctgcaagaaagaacataccatgtgccgctgtgtcaccaaacagatccaaatgtgagagaaacacagtggcagatgttgatgagaaagcaagtgctgcactttatgacttttctgtgccttcctcagagacggtcatctgcaggtctcagccagcccctgtgtccccacaacagaagtcagtgttggtctctccacctgcagtatctgcagggggagtgccacctatgccggtcatctgccagatggttccccttcctgccaacaaccctgttgtgacaacagtcgttcccagcactcctcccagccagccaccagccgtttgcccccctgttgtgttcatgggcacacaagtccccaaaggcgctgtcatgtttgtggtaccccagcccgttgtgcagagttcaaagcctccggtggtgagcccgaatggcaccagactctctcccattgcccctgctcctgggttttccccttcagcagcaaaagtcactcctcagattgattcatcaaggataaggagtcacatctgtagccacccaggatgtggcaagacatactttaaaagttcccatctgaaggcccacacgaggacgcacacaggagaaaagcctttcagctgtagctggaaaggttgtgaaaggaggtttgcccgttctgatgaactgtccagacacaggcgaacccacacgggtgagaagaaatttgcgtgccccatgtgtgaccggcggttcatgaggagtgaccatttgaccaagcatgcccggcgccatctatcagccaagaagctaccaaactggcagatggaagtgagcaagctaaatgacattgctctacctccaacccctgctcccacacagtgacagaccggaaagtgaagagtcagaactaactttggtctcagcgggagccagtggtgatgtaaaaatgcttccactgcaagtctgtggccccacaacgtgggcttaaagcagaagccccacagcctggcacgaaggccccgcctgggttaggtgacacataagagagatgagaaagcttttattcctttgaatattttttgaaggtttcagatgaggtcaacacaggtagcacagattttgaatctgtgtgcatatttgttactttacttttgctgtttatacttgagaccaacttttcaatgtgattcttctaaagcactggtttcaagaatatggaggctggaaggaaataaacattacggtacagacatggagatgtaaaatgagtttgtattattacaaatattgtcatctttttctagagttatcttctttattattcctagtctttccagtcaacatcgtggatgtagtgattaaatatatctagaactatcatttttacactattgtgaatatttggaattgaacgactgtatattgctaagagggcccaaagaattggaatcctccttaatttaattgctttgaagcatagctacaatttgtttttgcatttttgttttgaaagtttaacaaatgactgtatctaggcatttcattatgctttgaactttagtttgcctgcagtttcttgtgtagatttgaaaattgtataccaatgtgttttctgtagactctaagatacactgcactttgtttagaaaaaaaactgaagatgaaatatatattgtaaagaagggatattaagaatcttagataacttcttgaaaaagatggcttatgtcatcagtaaagtacctttatgttatgaggatataatgtgtgctttattgaattagaaaattagtgaccattattcacaggtggacaaatgttgtcctgttaatttataggcgttttttggggatgtggaggtagttgggtagaaaaattattagaacattcacttttgttaacagtatttctcttttattctgttatatagtggatgatatacacagtggcaaaacaaaagtacattgcttaaaatatatagtgaaaaatgtcactatatcttcccatttaacattgtttttgtatattgggtgtagatttctgacatcaaaacttggacccttggaaaacaaaagttttaattaaaaaaaatccttgtgacttacaatttgcacaatatttcttttgttgtactttatatcttgtttacaataaagaattccctttggta

SEQ ID NO: 301087 - DNA, 2533 bp, Homo sapiens
agcggaggctgagcggctacctgaatggggagggggcagacggcgctgagcgcggcggcggcgggagcggcgtcgagtgtctccgtgcgcccgtctgtggccaagcagccagcagcctagcagccagtcagcttgccgccggcggccaagcagccaaccatgctcaacttcggtgcctctctccagcagactgcggaggaaagaatggaaatgatttctgaaaggccaaaagagagtatgtattcctggaacaaaactgcagagaaaagtgattttgaagctgtagaagcacttatgtcaatgagctgcagttggaagtctgattttaagaaatacgttgaaaacagacctgttacaccagtatctgatttgtcagaggaagagaatctgcttccgggaacacctgattttcatacaatcccagcattttgtttgactccaccttacagtccttctgactttgaaccctctcaagtgtcaaatctgatggcaccagcgccatctactgtacacttcaagtcactctcagatactgccaaacctcacattgccgcacctttcaaagaggaagaaaagagcccagtatctgcccccaaactccccaaagctcaggcaacaagtgtgattcgtcatacagctgatgcccagctatgtaaccaccagacctgcccaatgaaagcagccagcatcctcaactatcagaacaattcttttagaagaagaacccacctaaatgttgaggctgcaagaaagaacataccatgtgccgctgtgtcaccaaacagatccaaatgtgagagaaacacagtggcagatgttgatgagaaagcaagtgctgcactttatgacttttctgtgccttcctcagagacggtcatctgcaggtctcagccagcccctgtgtccccacaacagaagtcagtgttggtctctccacctgcagtatctgcagggggagtgccacctatgccggtcatctgccagatggttccccttcctgccaacaaccctgttgtgacaacagtcgttcccagcactcctcccagccagccaccagccgtttgcccccctgttgtgttcatgggcacacaagtccccaaaggcgctgtcatgtttgtggtaccccagcccgttgtgcagagttcaaagcctccggtggtgagcccgaatggcaccagactctctcccattgcccctgctcctgggttttccccttcagcagcaaaagtcactcctcagattgattcatcaaggataaggagtcacatctgtagccacccaggatgtggcaagacatactttaaaagttcccatctgaaggcccacacgaggacgcacacaggagaaaagcctttcagctgtagctggaaaggttgtgaaaggaggtttgcccgttctgatgaactgtccagacacaggcgaacccacacgggtgagaagaaatttgcgtgccccatgtgtgaccggcggttcatgaggagtgaccatttgaccaagcatgcccggcgccatctatcagccaagaagctaccaaactggcagatggaagtgagcaagctaaatgacattgctctacctccaacccctgctcccacacagtgacagaccggaaagtgaagagtcagaactaactttggtctcagcgggagccagtggtgatgtaaaaatgcttccactgcaagtctgtggccccacaacgtgggcttaaagcagaagccccacagcctggcacgaaggccccgcctgggttaggtgactaaaagggcttcggccacaggcaggtcacagaaaggcaggtttcatttcttatcacataagagagatgagaaagcttttattcctttgaatattttttgaaggtttcagatgaggtcaacacaggtagcacagattttgaatctgtgtgcatatttgttactttacttttgctgtttatacttgagaccaacttttcaatgtgattcttctaaagcactggtttcaagaatatggaggctggaaggaaataaacattacggtacagacatggagatgtaaaatgagtttgtattattacaaatattgtcatctttttctagagttatcttctttattattcctagtctttccagtcaacatcgtggatgtagtgattaaatatatctagaactatcatttttacactattgtgaatatttggaattgaacgactgtatattgctaagagggcccaaagaattggaatcctccttaatttaattgctttgaagcatagctacaatttgtttttgcatttttgttttgaaagtttaacaaatgactgtatctaggcatttcattatgctttgaactttagtttgcctgcagtttcttgtgtagatttgaaaattgtataccaatgtgttttctgtagactctaagatacactgcactttgtttagaaaaaaaactgaagatgaaatatatattgtaaagaagggatattaagaatcttagataacttcttgaaaaagatggcttatgtcatcagtaaagtacctttatgttatgagga

SEQ ID NO: 301088 - DNA, 1941 bp, Homo sapiens
cacgcatcagaagtcacacacaaaaaaaggatgactacttacataaataaataaataaatgtgactcacattttagcggtttgtttcttcatcctagtcattgataccatcatagaagattcttactacaggcttatctttgatagtgatgtcagtgactgaggcagagatccttcccaggttccccagtcatattccaaagtctactgtgggctatggagcaaaacacagcactttgttatctccagctggttagggcacagcatgctctggattttattcctttcctttttattctctctcttttgccatgaatgcgtcctcgacggacgcattcaggagaaaagcctttcagctgtagctggaaaggttgtgaaaggaggtttgcccgttctgatgaactgtccagacacaggcgaacccacacgggtgagaagaaatttgcgtgccccatgtgtgaccggcggttcatgaggagtgaccatttgaccaagcatgcccggcgccatctatcagccaagaagctaccaaactggcagatggaagtgagcaagctaaatgacattgctctacctccaacccctgctcccacacagtgacagaccggaaagtgaagagtcagaactaactttggtctcagcgggagccagtggtgatgtaaaaatgcttccactgcaagtctgtggccccacaacgtgggcttaaagcagaagccccacagcctggcacgaaggccccgcctgggttaggtgactaaaagggcttcggccacaggcaggtcacagaaaggcaggtttcatttcttatcacataagagagatgagaaagcttttattcctttgaatattttttgaaggtttcagatgaggtcaacacaggtagcacagattttgaatctgtgtgcatatttgttactttacttttgctgtttatacttgagaccaacttttcaatgtgattcttctaaagcactggtttcaagaatatggaggctggaaggaaataaacattacggtacagacatggagatgtaaaatgagtttgtattattacaaatattgtcatctttttctagagttatcttctttattattcctagtctttccagtcaacatcgtggatgtagtgattaaatatatctagaactatcatttttacactattgtgaatatttggaattgaacgactgtatattgctaagagggcccaaagaattggaatcctccttaatttaattgctttgaagcatagctacaatttgtttttgcatttttgttttgaaagtttaacaaatgactgtatctaggcatttcattatgctttgaactttagtttgcctgcagtttcttgtgtagatttgaaaattgtataccaatgtgttttctgtagactctaagatacactgcactttgtttagaaaaaaaactgaagatgaaatatatattgtaaagaagggatattaagaatcttagataacttcttgaaaaagatggcttatgtcatcagtaaagtacctttatgttatgaggatataatgtgtgctttattgaattagaaaattagtgaccattattcacaggtggacaaatgttgtcctgttaatttataggcgttttttggggatgtggaggtagttgggtagaaaaattattagaacattcacttttgttaacagtatttctcttttattctgttatatagtggatgatatacacagtggcaaaacaaaagtacattgcttaaaatatatagtgaaaaatgtcactatatcttcccatttaacattgtttttgtatattgggtgtagatttctgacatcaaaacttggacccttggaaaacaaaagttttaattaaaaaaaatccttgtgacttacaatttgcacaatatttcttttgttgtactttatatcttgtttacaataaagaattccctttggta

SEQ ID NO: 301089 - DNA, 1675 bp, Homo sapiens
  misc_feature (1638)..(1638): n is a, c, g, or t
  misc_feature (1666)..(1666): n is a, c, g, or t
agcggaggctgagcggctacctgaatggggagggggcagacggcgctgagcgcggcggcggcgggagcggcgtcgagtgtctccgtgcgcccgtctgtggccaagcagccagcagcctagcagccagtcagcttgccgccggcggccaagcagccaaccatgctcaacttcggtgcctctctccagcagactgcggaggaaagaatggaaatgatttctgaaaggccaaaagagagtatgtattcctggaacaaaactgcagagaaaagtgattttgaagctgtagaagcacttatgtcaatgagctgcagttggaagtctgattttaagaaatacgttgaaaacagacctgttacaccagtatctgatttgtcagaggaagagaatctgcttccgggaacacctgattttcatacaatcccagcattttgtttgactccaccttacagtccttctgactttgaaccctctcaagtgtcaaatctgatggcaccagcgccatctactgtacacttcaagtcactctcagatactgccaaacctcacattgccgcacctttcaaagaggaagaaaagagcccagtatctgcccccaaactccccaaagctcaggcaacaagtgtgattcgtcatacagctgatgcccagctatgtaaccaccagacctgcccaatgaaagcagccagcatcctcaactatcagaacaattcttttagaagaagaacccacctaaatgttgaggctgcaagaaagaacataccatgtgccgctgtgtcaccaaacagatccaaatgtgagagaaacacagtggcagatgttgatgagaaagcaagtgctgcactttatgacttttctgtgccttcctcagagacggtcatctgcaggtctcagccagcccctgtgtccccacaacagaagtcagtgttggtctctccacctgcagtatctgcagggggagtgccacctatgccggtcatctgccagatggttccccttcctgccaacaaccctgttgtgacaacagtcgttcccagcactcctcccagccagccaccagccgtttgcccccctgttgtgttcatgggcacacaagtccccaaaggcgctgtcatgtttgtggtaccccagcccgttgtgcagagttcaaagcctccggtggtgagcccgaatggcaccagactctctcccattgcccctgctcctgggttttccccttcagcagcaaaagtcactcctcagattgattcatcaaggataaggagtcacatctgtagccacccaggatgtggcaagacatactttaaaagttcccatctgaaggcccacacgaggacgcacacaggagaaaagcctttcagctgtagctggaaaggttgtgaaaggaggtttgcccgttctgatgaactgtccagacacaggcgaacccacacgggtgagaagaaatttgcgtgccccatgtgtgaccggcggttcatgaggagtgaccatttgaccaagcatgcccggcgccatctatcagccaagaagctaccaaactggcagatggaagtgagcaagctaaatgacattgctctacctccaacccctgcccgccaaactacctttaaaaaaccctagcctccaaattttcagggaggntgatttgagtaataataaaacccctgtntcctgttaa

SEQ ID NO: 301090 - DNA, 389 bp, Homo sapiens
ctttccctgccgcctgcctttcttttttcctttttttgcattggcgtcttggggctgttacacacacgcgcgctgtccattgcagcttacataaaggcgggcgcgattatgcaattatattgttagcgatatttcaagagcaatggctcgttttcttaggatttcaacacgaaggcatcatgcatttttgaaaaactagtattgagaataataccttgcaacgtaaagaatgttttttggtatttttacacaatctctactttgaccaaacgagtctggacagttttcttttaatggaaaataggagaaatggtgagtagtaccatttttttttagcgtagttcaaagaactttactataaaacattaggtagttctacaaataagtgc

SEQ ID NO: 301091 - DNA, 374 bp, Homo sapiens
atgttgtcctgttaatttataggcgttttttggggatgtggaggtagttgggtagaaaaattattagaacattcacttttgttaacagtatttctcttttattctgttatatagtggatgatatacacagtggcaaaacaaaagtacattgcttaaaatatatagtgaaaaatgtcactatatcttcccatttaacattgtttttgtatattgggtgtagatttctgacatcaaaacttggacccttggaaaacaaaagttttaattaaaaaaaatccttgtgacttacaatttgcacaatatttcttttgttgtactttatatcttgtttacaataaagaattccctttggtatatggaatggtcattgcatt

SEQ ID NO: 301092 - DNA, 528 bp, Homo sapiens
cctaatttcttctctgagagtagggatagctaccaggcttctttttcttatgcttgtaagaatatacgacaggattctcctccctttatgctgaatattacctgttttgacatattccaaattttacttttctttccactgtttgaggcaataatttttaaaaaatgatgatgatgattcctgggcccacttaaatatagccgttagttatttttctgccatggcctgttccaagccttcgtgttgttataatccatcctcatctgtgcgtcttgtaaaaagtcatgattttcttcctggctcctttcaacatcatccccctctttctttagaaaataactttacctatttagagttacacacatagaagctacagcatctggaaagtgtcccttcaactccctgaaatttctttactgactacttacctgtgagattcatcttaactctactgaacatggaataattatataacaaaaacagtccaggtctgccaggctattccacaggcagtagctgcaaaagaat

SEQ ID NO: 301093 - DNA, 1832 bp, Homo sapiens
caatcccttaattaaatagcttcccctctacaggcttttgaagtggtagcagttcctcctaactcctgccagaaacagctctcctcaacatgagagctgcacccctcctcctggccagggcagcaagccttagccttggcttcttgtttctgctttttttctggctagaccgaagtgtactagccaaggagttgaagtttgtgactttggtgtttcggcatggagaccgaagtcccattgacacctttcccactgaccccataaaggaatcctcatggccacaaggatttggccaactcacccagctgggcatggagcagcattatgaacttggagagtatataagaaagagatatagaaaattcttgaatgagtcctataaacatgaacaggtttatattcgaagcacagacgttgaccggactttgatgagtgctatgacaaacctggcagccctgtttcccccagaaggtgtcagcatctggaatcctatcctactctggcagcccatcccggtgcacacagttcctctttctgaagatcagttgctatacctgcctttcaggaactgccctcgttttcaagaacttgagagtgagactttgaaatcagaggaattccagaagaggctgcacccttataaggatttatagctaccttgggaaaactttcaggattacatggccaggaccttttggaattggagtaaagtctacgaccctttatattgtggagagtgttcacaatttcactttaccctcctgggccactgaggacaccatgactaagttgagagaatgtgcagaattgtccctcctgtccctctatggaattcacaagcagaaagagaaatctaggctccaagggggtgtcctggtcaatgaaatcctcaatcacatgaagagagcaactcagataccaagctacaaaaaacttatcatgtattctgcgcatgacactactgtgagtggcctacagatggcgctagatgtttacaacggactccttcctccctatgcttcttgccacttgacggaattgtactttgagaagggggagtactttgtggagatgtactaccggaatgagacgcagcacgagccgtatcccctcatgctacctggctgcagccccagctgtcctctggagaggtttgctgagctggttggccctgtgatccctcaagactggtccacggagtgtatgaccacaaacagccatcaagttctaaaggtcatctttgctgttgccttttgcctgatatctgctgtcctaatggtactactgtttatccacattcgccgtggactctgctggcagagagaatcctatgggaacatctgaacagacagctggataagccaggccaacctcctgtgacacagcatctctcagtggtgccgcatctaaaggacaggcttttgccatgtgggcattgccatcctcacaccctgccttttgaatctgcccagagcagggtctgaactcacagtgacccacagactgctgctggatgaacactcaggctacctaggtcttctcataatggagtggtagtgcaggctgcttgttcagctagaaagaggctgttatgcataggatggttgtattctctgccacagttgtccggagagaaataagaagccaaactccaatcagccttttacctgcaaagagtgaagggtgagaaggtggacaaagacatagattagaaaaatactggatattgggggaagttagactagaagtattattatacagggtgattcttacgaaagaagacccaatcataaattataaataaactttttatttagctattaagtaggttt

SEQ ID NO: 301094 - DNA, 502 bp, Homo sapiens
gcggtcgactactactactaaattcgcggccgcgtcgactgcctccaagttcaaaacttattggaatgttgagagtgtggttacgaaatacgttaggaggacaaaaggaatgtgtaagtctttaatgccgatatcttcagaaaacctaagcaaacttacaggtcctgctgaaactgcccactctgcaagaagaaatcatgatatagctttgccatgtggcagatctacatgtctagagaacactgtgctctattaccattatggataaagatgagatggtttctagagatggtttctactggctgccagaatctagagcaaagccatccccgctcctggttggtcacagaatgactgacaaagacatcgattgatatgcttctttgtgttatttccctcccaagtaaatgtttgtccttgggtccattttctatgcttgtaactgtcttctagcagtgagccaaatgtaaaatagtgaataaagtcattattaggaagttca

SEQ ID NO: 301095 - DNA, 561 bp, Homo sapiens
gcggtcgactactactactaaattcgcggccgcgtcgacgtaagggatcacatcctcaaccctgacaccaccaccacccctgctcatcatataaacagtgcctccaagttcaaaacttattggaatgttgagagtgtggttacgaaatacgttaggaggacaaaaggaatgtgtaagtctttaatgccgatatcttcagaaaacctaagcaaacttacaggtcctgctgaaactgcccactctgcaagaagaaatcatgatatagctttgccatgtggcagatctacatgtctagagaacactgtgctctattaccattatggataaagatgagatggtttctagagatggtttctactggctgccagaatctagagcaaagccatccccgctcctggttggtcacagaatgactgacaaagacatcgattgatatgcttctttgtgttatttccctcccaagtaaatgtttgtccttgggtccattttctatgcttgtaactgtcttctagcagtgagccaaatgtaaaatagtgaataaagtcattattaggaagttca

SEQ ID NO: 301096 - DNA, 439 bp, Homo sapiens
gcggtcgactactactactaaattcgcggccgcgtcgacggttacgaaatacgttaggaggacaaaaggaatgtgtaagtctttaatgccgatatcttcagaaaacctaagcaaacttacaggtcctgctgaaactgcccactctgcaagaagaaatcatgatatagctttgccatgtggcagatctacatgtctagagaacactgtgctctattaccattatggataaagatgagatggtttctagagatggtttctactggctgccagaatctagagcaaagccatccccgctcctggttggtcacagaatgactgacaaagacatcgattgatatgcttctttgtgttatttccctcccaagtaaatgtttgtccttgggtccattttctatgcttggtcgacgcggccgcgaatttagtagtagtaggcggccgc

SEQ ID NO: 301097 - DNA, 380 bp, Homo sapiens
gcggtcgactactactactaaattcgcggccgcgtcgacgtcctgctgaaactgcccactctgcaagaagaaatcatgatatagctttgccatgtggcagatctacatgtctagagaacactgtgctctattaccattatggataaagatgagatggtttctagagatggtttctactggctgccagaatctagagcaaagccatccccgctcctggttggtcacagaatgactgacaaagacatcgattgatatgcttctttgtgttatttccctcccaagtaaatgtttgtccttgggtccattttctatgcttgtaactgtcttctagcagtgagccaaatgtaaaatagtgaataaagtcattattaggaagttca

SEQ ID NO: 301098 - DNA, 572 bp, Homo sapiens
gcggtcgactactactactaaattcgcggccgcgtcgaccggaattgtactttgagaagggggagtactttgtggagatgtactaccggaatgagacgcagcacgagccgtatcccctcatgctacctggctgcagccccagctgtcctctggagaggtttgctgagctggttggccctgtgatccctcaagactggtccacggagtgtatgaccacaaacagccatcaaggtcctgctgaaactgcccactctgcaagaagaaatcatgatatagctttgccatgtggcagatctacatgtctagagaacactgtgctctattaccattatggataaagatgagatggtttctagagatggtttctactggctgccagaatctagagcaaagccatccccgctcctggttggtcacagaatgactgacaaagacatcgattgatatgcttctttgtgttatttccctcccaagtaaatgtttgtccttgggtccattttctatgcttgtaactgtcttctagcagtgagccaaatgtaaaatagtgaataaagtcattattaggaagttca

SEQ ID NO: 301099 - DNA, 1269 bp, Homo sapiens
caatcccttaattaaatagcttcccctctacaggcttttgaagtggtagcagttcctcctaactcctgccagaaacagctctcctcaacatgagagctgcacccctcctcctggccagggcagcaagccttagccttggcttcttgtttctgctttttttctggctagaccgaagtgtactagccaaggagttgaagtttgtgactttggtgtttcggcatggagaccgaagtcccattgacacctttcccactgaccccataaaggaatcctcatggccacaaggatttggccaactcacccagctgggcatggagcagcattatgaacttggagagtatataagaaagagatatagaaaattcttgaatgagtcctataaacatgaacaggtttatattcgaagcacagacgttgaccggactttgatgagtgctatgacaaacctggcagccctgtttcccccagaaggtgtcagcatctggaatcctatcctactctggcagcccatcccggtgcacacagttcctctttctgaagatcagtcccatcataggcatgaccatcgcatctctttatggctgaagcttagcctgactgctggacccagacttttgcccagtgacctctggggtaggttactatcctctttgtcctgccagtacccctagaaatttgacttaattgctgcatctagggacttagggatttttcccaaatgctgtgtagaaagtcactggagttaaatctactccaaccatttttctgctgtttcttgaaaagacaggatgattcatttacatctcttttccttcacagaatcatgagggaagtattgtgattaccagtgttaagcatttgtgaatattttattccaaaaagaaaaaaaatcactttaccagccttttctgcagagataaagactggaggtcaggtgcggtggctcatgcctgtaatcccagcactttggaaggctgaggcgggcagatcacctgaggtcaggagttcgagaccagcctggctaacatggtgaaaccccatttctactaaaaatacaaatattagctgggcatggtggtgcacgcctgtaatcccagctactcaggaggctgaggcaggagaatcacttaaacctgggaggtggaggttgcagtgagccaagatcgcaccgttgcactccagcttgggcaacaagagcgaaattccgtctcaaaaataaataaaaaacaaaacaaaacaaagactggatagcagcaccaaaatttagca

SEQ ID NO: 301100 - DNA, 401 bp, Homo sapiens
gcggtcgactactactactaaattcgcggccgcgtcgactgtctagagaacactgtgctctattaccattatggataaagatgagatggtttctagagatggtttctactggctgccagaatctagagcaaagccatccccgctcctggttggtcacagaatgactgacaaagacatcgattgatatgcttctttgtgttatttccctcccaagtaaatgtttgtccttgggtccattttctatgcttgtaactgtcttctagcagtgagccaaatgtaaaatagtgaataaagtcattattaggaagttcaaaagcattgcttttataatgaacttagaaaaacgtatgtgtgtgtgtttaattagaataaaattcctctaggcagatttcaggagctcc

SEQ ID NO: 301101 - DNA, 356 bp, Homo sapiens
gcggtcgactactactactaaattcgcggccgcgtcgacgtcctgctgaaactgcccactctgcaagaagaaatcatgatatagctttgccatgtggcagatctacatgtctagagaacactgtgctctattaccattatggataaagatgagatggtttctagagatggtttctactggctgccagaatctagagcaaagccatccccgctcctggttggtcacagaatgactgacaaagacatcgattgatatgcttctttgtgttatttccctcccaagtaaatgtttgtccttgggtccattttctatgcttggtcgacgcggccgcgaatttagtagtagtaggcggccgc

SEQ ID NO: 301102 - DNA, 419 bp, Homo sapiens
gcggtcgactactactactaaattcgcggccgcgtcgacgtcctgctgaaactgcccactctgcaagaagaaatcatgatatagctttgccatgtggcagatctacatgtctagagaacactgtgctctattaccattatggataaagatgagatggtttctagagatggtttctactggctgccagaatctagagcaaagccatccccgctcctggttggtcacagaatgactgacaaagacatcgattgatatgcttctttgtgttatttccctcccaagtaaatgtttgtccttgggtccattttctatgcttgtaactgtcttctagcagtgagccaaatgtaaaatagtgaataaagtcattattaggaagttcagtcgacgcggccgcgaatttagtagtagtaggcggccgc

SEQ ID NO: 301103 - DNA, 1169 bp, Homo sapiens
ctgggattaaaactaggcctatttcattccagagcaattttcttccctataaaatcatgattctcagacttagctgcatattaggatcacgtggttttttaaaaaaaatcctgatgcccagggcactctccgtaagaaatcggaatgtctgagggtggacccaggcatcagtgtttgaaaaataatctccctcgatgattccagtggggaggcaagtttgagaaccagtactataaactaagctgcctgaatggggctgtttgagagaaactctcaaacgtgtttacacaggttgggaccgaccaagctttctttaatcttttcagaggaatgggtatttttaaagtagcaatagataaatctaactaatcttccaggtgtgaaacttaaggctatatgaaagaaatagtttgggacaaagaatcccttcctaatttccctgcagtcccatcataggcatgaccatcgcatctctttatggctgaagcttagcctgactgctggacccagacttttgcccagtgacctctggggtaggttactatcctctttgtcctgccagtacccctagaaatttgacttaattgctgcatctagggacttagggatttttcccaaatgctgtgtagaaagtcactggagttaaatctactccaaccatttttctgctgtttcttgaaaagacaggatgattcatttacatctcttttccttcacagaatcatgagggaagtattgtgattaccagtgttaagcatttgtgaatattttattccaaaaagaaaaaaaatcactttaccagccttttctgcagagataaagactggaggtcaggtgcggtggctcatgcctgtaatcccagcactttggaaggctgaggcgggcagatcacctgaggtcaggagttcgagaccagcctggctaacatggtgaaaccccatttctactaaaaatacaaatattagctgggcatggtggtgcacgcctgtaatcccagctactcaggaggctgaggcaggagaatcacttaaacctgggaggtggaggttgcagtgagccaagatcgcaccgttgcactccagcttgggcaacaagagcgaaattccgtctcaaaaataaataaaaaacaaaacaaaacaaagactggatagcagcaccaaaatttagca

SEQ ID NO: 301104 - DNA, 692 bp, Homo sapiens
  misc_feature (376)..(377): n is a, c, g, or t
  misc_feature (395)..(395): n is a, c, g, or t
caatcccttaattaaatagcttcccctctacaggcttttgaagtggtagcagttcctcctaactcctgccagaaacagctctcctcaacatgagagctgcacccctcctcctggccagggcagcaagccttagccttggcttcttgtttctgctttttttctggctagaccgaagtgtactagccaaggagttgaagtttgtgactttggtgtttcggcatggagaccgaagtcccattgacacctttcccactgaccccataaaggaatcctcatggccacaaggatttggccaactcacccagctgggcatggagcagcattatgaacttggagagtatataagaaaaaaaaaaaaaaaacaaaaaaaaaacannttgttggggcgcggcctngggcccctggagaaagttttttaaacccattctcggttggggcgcgcgggggccccagttgggtaggggacctgtgggcccaagacggggttcccaaagggaacacccggggccaaaagacaaaggcggggggattctcttacccatttaaaaaaagcggccgggggggacccgggaggggttcttgtggacaaatctccagagagggcggccggggagggccaaacagggggcctatcacccggggagccccaggggagcccaaaataaaaccggccaccggtggggggggacgtc

SEQ ID NO: 301105 - DNA, 288 bp, Homo sapiens
gcggtcgactactactactaaattcgcggccgcgtcgactgtctagagaacactgtgctctattaccattatggataaagatgagatggtttctagagatggtttctactggctgccagaatctagagcaaagccatccccgctcctggttggtcacagaatgactgacaaagacatcgattgatatgcttctttgtgttatttccctcccaagtaaatgtttgtccttgggtccattttctatgcttggtcgacgcggccgcgaatttagtagtagtaggcggccgc

SEQ ID NO: 301106 - DNA, 448 bp, Homo sapiens
caatcccttaattaaatagcttcccctctacaggcttttgaagtggtagcagttcctcctaactcctgccagaaacagctctcctcaacatgagagctgcacccctcctcctggccagggcagcaagccttagccttggcttcttgtttctgctttttttctggctagaccgaagtgtactagccaaggagttgaagtttgtgactttggtaagtagacttttctcattgctttttccttaaaactgtgttcccagcaaagtctgataaggcaagcgtcaggtttcatcttatccttggattgtttcccagagaccaggctctgttcaaactcagaaagtgaataatcaagttttgcaagttcctcttaatgaagacctaacgtgtcctaacaacttttaactttcaaaaacaactgcggtcgaagcataatacaattagtgaaggtt

SEQ ID NO: 301107 - DNA, 3212 bp, Homo sapiens
caatcccttaattaaatagcttcccctctacaggcttttgaagtggtagcagttcctcctaactcctgccagaaacagctctcctcaacatgagagctgcacccctcctcctggccagggcagcaagccttagccttggcttcttgtttctgctttttttctggctagaccgaagtgtactagccaaggagttgaagtttgtgactttggtgtttcggcatggagaccgaagtcccattgacacctttcccactgaccccataaaggaatcctcatggccacaaggatttggccaactcacccagctgggcatggagcagcattatgaacttggagagtatataagaaagagatatagaaaattcttgaatgagtcctataaacatgaacaggtttatattcgaagcacagacgttgaccggactttgatgagtgctatgacaaacctggcagccctgtttcccccagaaggtgtcagcatctggaatcctatcctactctggcagcccatcccggtgcacacagttcctctttctgaagatcagttgctatacctgcctttcaggaactgccctcgttttcaagaacttgagagtgagactttgaaatcagaggaattccagaagaggctgcacccttataaggatttatagctaccttgggaaaactttcaggattacatggccaggaccttttggaattggagtaaagtctacgaccctttatattgtggagagtgttcacaatttcactttaccctcctgggccactgaggacaccatgactaagttgagagaatgtgcagaattgtccctcctgtccctctatggaattcacaagcagaaagagaaatctaggctccaagggggtgtcctggtcaatgaaatcctcaatcacatgaagagagcaactcagataccaagctacaaaaaacttatcatgtattctgcgcatgacactactgtgagtggcctacagatggcgctagatgtttacaacggactccttcctccctatgcttcttgccacttgacggaattgtactttgagaagggggagtactttgtggagatgtactaccggaatgagacgcagcacgagccgtatcccctcatgctacctggctgcagccccagctgtcctctggagaggtttgctgagctggttggccctgtgatccctcaagactggtccacggagtgtatgaccacaaacagccatcaaggtactgaggacagtacagattagtgtgcacagagatctctgtagaaagagtagctgccctttctcagggcagatgatgctttgagaacatactttggccattacccccagctttgaggaaaatgggctttggatgattattttatgttttagggacccccaacctcaggcaattcctacctcttcacctgaccctgcccccacttgccataaaacttagctaagttttgttttgtttttcagcgttaatgtaaaggggcagcagtgccaaaatataatcagagataaagcttaggtcaaagttcatagagttcccatgaactatatgactggccacacaggatcttttgtatttaaggattctgagattttgcttgagcaggattagataaggctgttctttaaatgtctgaaatggaacagatttcaaaaaaaaaccccacaatctagggtgggaacaaggaaggaaagatgtgaataggctgatgggcaaaaaaccaatttacccatcagttccagccttctctcaaggagaggcaaagaaaggagatacagtggagacatctggaaagttttctccactggaaaactgctactatctgttttatatttctgttaaaatatatgaggctacagaactaaaaattaaaacctctttgtgtcccttggtcctggaacatttatgttccttttaaagaaacaaaaatcaaactttacagaaagatttgatgtatgtaatacatatagcagctcttgaagtatatatatcatagcaaataagtcatctgatgagaacaagctatttgggcacaacacatcaggaaagagagcaccacgtgatggagtttctccagaagctccagtgataagagatgttgactctaaagttgatttaaggccaggcatggtggtttacgcctataatcccagcattttgggagtccgaggtgggcagatcacttgagctcaggaggtcaagatcagcctgggcaacatggtgaaaccttgtctctacataaaatacaaaaacttagatgggcatggtggtgtgtgcctatagtcccactacttgtggggctaaggcaggaggatcacttgagccccggaggtcgaggctacagtgagccaagagtgcactactgtactccagccagggcaagagagcgagaccctgtctcaataaataaataaataaataaataaataaataaataaataaaaaacaaagttgattaagaaaggaagtataggccaggcacagtggctcacacctgtaatccttgcattttggaaggctgaggcaggaggatcactttaggcctggtgtgttcaagaccagcctggtcaacatagtgagacactgtctctaccaaaaaaaggaaggaagggacacatatcaaactgaaacaaaattagaaatgtaattatgttctaagtgcctccaagttcaaaacttattggaatgttgagagtgtggttacgaaatacgttaggaggacaaaaggaatgtgtaagtctttaatgccgatatcttcagaaaacctaagcaaacttacaggtcctgctgaaactgcccactctgcaagaagaaatcatgatatagctttgccatgtggcagatctacatgtctagagaacactgtgctctattaccattatggataaagatgagatggtttctagagatggtttctactggctgccagaatctagagcaaagccatccccgctcctggttggtcacagaatgactgacaaagacatcgattgatatgcttctttgtgttatttccctcccaagtaaatgtttgtccttgggtccattttctatgcttgtaactgtcttctagcagtgagccaaatgtaaaatagtgaataaagtcattattaggaagttcaaaagcattgcttttataatgaacttagaaaaacgtatgtgtgtgtgtttaattagaataaaattcctctaggcagatttcaggagctcc

SEQ ID NO: 301108 - DNA, 3502 bp, Homo sapiens
  misc_feature (3186)..(3187): n is a, c, g, or t
  misc_feature (3205)..(3205): n is a, c, g, or t
caatcccttaattaaatagcttcccctctacaggcttttgaagtggtagcagttcctcctaactcctgccagaaacagctctcctcaacatgagagctgcacccctcctcctggccagggcagcaagccttagccttggcttcttgtttctgctttttttctggctagaccgaagtgtactagccaaggagttgaagtttgtgactttggtgtttcggcatggagaccgaagtcccattgacacctttcccactgaccccataaaggaatcctcatggccacaaggatttggccaactcacccagctgggcatggagcagcattatgaacttggagagtatataagaaagagatatagaaaattcttgaatgagtcctataaacatgaacaggtttatattcgaagcacagacgttgaccggactttgatgagtgctatgacaaacctggcagccctgtttcccccagaaggtgtcagcatctggaatcctatcctactctggcagcccatcccggtgcacacagttcctctttctgaagatcagttgctatacctgcctttcaggaactgccctcgttttcaagaacttgagagtgagactttgaaatcagaggaattccagaagaggctgcacccttataaggatttatagctaccttgggaaaactttcaggattacatggccaggaccttttggaattggagtaaagtctacgaccctttatattgtggagagtgttcacaatttcactttaccctcctgggccactgaggacaccatgactaagttgagagaatgtgcagaattgtccctcctgtccctctatggaattcacaagcagaaagagaaatctaggctccaagggggtgtcctggtcaatgaaatcctcaatcacatgaagagagcaactcagataccaagctacaaaaaacttatcatgtattctgcgcatgacactactgtgagtggcctacagatggcgctagatgtttacaacggactccttcctccctatgcttcttgccacttgacggaattgtactttgagaagggggagtactttgtggagatgtactaccggaatgagacgcagcacgagccgtatcccctcatgctacctggctgcagccccagctgtcctctggagaggtttgctgagctggttggccctgtgatccctcaagactggtccacggagtgtatgaccacaaacagccatcaaggtactgaggacagtacagattagtgtgcacagagatctctgtagaaagagtagctgccctttctcagggcagatgatgctttgagaacatactttggccattacccccagctttgaggaaaatgggctttggatgattattttatgttttagggacccccaacctcaggcaattcctacctcttcacctgaccctgcccccacttgccataaaacttagctaagttttgttttgtttttcagcgttaatgtaaaggggcagcagtgccaaaatataatcagagataaagcttaggtcaaagttcatagagttcccatgaactatatgactggccacacaggatcttttgtatttaaggattctgagattttgcttgagcaggattagataaggctgttctttaaatgtctgaaatggaacagatttcaaaaaaaaaccccacaatctagggtgggaacaaggaaggaaagatgtgaataggctgatgggcaaaaaaccaatttacccatcagttccagccttctctcaaggagaggcaaagaaaggagatacagtggagacatctggaaagttttctccactggaaaactgctactatctgttttatatttctgttaaaatatatgaggctacagaactaaaaattaaaacctctttgtgtcccttggtcctggaacatttatgttccttttaaagaaacaaaaatcaaactttacagaaagatttgatgtatgtaatacatatagcagctcttgaagtatatatatcatagcaaataagtcatctgatgagaacaagctatttgggcacaacacatcaggaaagagagcaccacgtgatggagtttctccagaagctccagtgataagagatgttgactctaaagttgatttaaggccaggcatggtggtttacgcctataatcccagcattttgggagtccgaggtgggcagatcacttgagctcaggaggtcaagatcagcctgggcaacatggtgaaaccttgtctctacataaaatacaaaaacttagatgggcatggtggtgtgtgcctatagtcccactacttgtggggctaaggcaggaggatcacttgagccccggaggtcgaggctacagtgagccaagagtgcactactgtactccagccagggcaagagagcgagaccctgtctcaataaataaataaataaataaataaataaataaataaataaaaaacaaagttgattaagaaaggaagtataggccaggcacagtggctcacacctgtaatccttgcattttggaaggctgaggcaggaggatcactttaggcctggtgtgttcaagaccagcctggtcaacatagtgagacactgtctctaccaaaaaaaggaaggaagggacacatatcaaactgaaacaaaattagaaatgtaattatgttctaagtgcctccaagttcaaaacttattggaatgttgagagtgtggttacgaaatacgttaggaggacaaaaggaatgtgtaagtctttaatgccgatatcttcagaaaacctaagcaaacttacaggtcctgctgaaactgcccactctgcaagaagaaatcatgatatagctttgccatgtggcagatctacatgtctagagaacactgtgctctattaccattatggataaagatgagatggtttctagagatggtttctactggctgccagaatctagagcaaagccatccccgctcctggttggtcacagaatgactgacaaagacatcgattgatatgcttctttgtgttatttccctcccaagtaaatgtttgtccttgggtccattttctatgcttgtaactgtcttctagcagtgagccaaatgtaaaatagtgaataaagtcattattaggaagttcaaaagcattgcttttataatgaacttagaaaaacgtaaaaaaaaaaaaaacaaaaaaaaaacannttgttggggcgcggcctngggcccctggagaaagttttttaaacccattctcggttggggcgcgcgggggccccagttgggtaggggacctgtgggcccaagacggggttcccaaagggaacacccggggccaaaagacaaaggcggggggattctcttacccatttaaaaaaagcggccgggggggacccgggaggggttcttgtggacaaatctccagagagggcggccggggagggccaaacagggggcctatcacccggggagccccaggggagcccaaaataaaaccggccaccggtggggggggacgtc

SEQ ID NO: 301109 - DNA, 3123 bp, Homo sapiens
caatcccttaattaaatagcttcccctctacaggcttttgaagtggtagcagttcctcctaactcctgccagaaacagctctcctcaacatgagagctgcacccctcctcctggccagggcagcaagccttagccttggcttcttgtttctgctttttttctggctagaccgaagtgtactagccaaggagttgaagtttgtgactttggtgtttcggcatggagaccgaagtcccattgacacctttcccactgaccccataaaggaatcctcatggccacaaggatttggccaactcacccagctgggcatggagcagcattatgaacttggagagtatataagaaagagatatagaaaattcttgaatgagtcctataaacatgaacaggtttatattcgaagcacagacgttgaccggactttgatgagtgctatgacaaacctggcagccctgtttcccccagaaggtgtcagcatctggaatcctatcctactctggcagcccatcccggtgcacacagttcctctttctgaagatcagttgctatacctgcctttcaggaactgccctcgttttcaagaacttgagagtgagactttgaaatcagaggaattccagaagaggctgcacccttataaggatttatagctaccttgggaaaactttcaggattacatggccaggaccttttggaattggagtaaagtctacgaccctttatattgtggagagtgttcacaatttcactttaccctcctgggccactgaggacaccatgactaagttgagagaatgtgcagaattgtccctcctgtccctctatggaattcacaagcagaaagagaaatctaggctccaagggggtgtcctggtcaatgaaatcctcaatcacatgaagagagcaactcagataccaagctacaaaaaacttatcatgtattctgcgcatgacactactgtgagtggcctacagatggcgctagatgtttacaacggactccttcctccctatgcttcttgccacttgacggaattgtactttgagaagggggagtactttgtggagatgtactaccggaatgagacgcagcacgagccgtatcccctcatgctacctggctgcagccccagctgtcctctggagaggtttgctgagctggttggccctgtgatccctcaagactggtccacggagtgtatgaccacaaacagccatcaaggtactgaggacagtacagattagtgtgcacagagatctctgtagaaagagtagctgccctttctcagggcagatgatgctttgagaacatactttggccattacccccagctttgaggaaaatgggctttggatgattattttatgttttagggacccccaacctcaggcaattcctacctcttcacctgaccctgcccccacttgccataaaacttagctaagttttgttttgtttttcagcgttaatgtaaaggggcagcagtgccaaaatataatcagagataaagcttaggtcaaagttcatagagttcccatgaactatatgactggccacacaggatcttttgtatttaaggattctgagattttgcttgagcaggattagataaggctgttctttaaatgtctgaaatggaacagatttcaaaaaaaaaccccacaatctagggtgggaacaaggaaggaaagatgtgaataggctgatgggcaaaaaaccaatttacccatcagttccagccttctctcaaggagaggcaaagaaaggagatacagtggagacatctggaaagttttctccactggaaaactgctactatctgttttatatttctgttaaaatatatgaggctacagaactaaaaattaaaacctctttgtgtcccttggtcctggaacatttatgttccttttaaagaaacaaaaatcaaactttacagaaagatttgatgtatgtaatacatatagcagctcttgaagtatatatatcatagcaaataagtcatctgatgagaacaagctatttgggcacaacacatcaggaaagagagcaccacgtgatggagtttctccagaagctccagtgataagagatgttgactctaaagttgatttaaggccaggcatggtggtttacgcctataatcccagcattttgggagtccgaggtgggcagatcacttgagctcaggaggtcaagatcagcctgggcaacatggtgaaaccttgtctctacataaaatacaaaaacttagatgggcatggtggtgtgtgcctatagtcccactacttgtggggctaaggcaggaggatcacttgagccccggaggtcgaggctacagtgagccaagagtgcactactgtactccagccagggcaagagagcgagaccctgtctcaataaataaataaataaataaataaataaataaataaataaaaaacaaagttgattaagaaaggaagtataggccaggcacagtggctcacacctgtaatccttgcattttggaaggctgaggcaggaggatcactttaggcctggtgtgttcaagaccagcctggtcaacatagtgagacactgtctctaccaaaaaaaggaaggaagggacacatatcaaactgaaacaaaattagaaatgtaattatgttctaagtgcctccaagttcaaaacttattggaatgttgagagtgtggttacgaaatacgttaggaggacaaaaggaatgtgtaagtctttaatgccgatatcttcagaaaacctaagcaaacttacaggtcctgctgaaactgcccactctgcaagaagaaatcatgatatagctttgccatgtggcagatctacatgtctagagaacactgtgctctattaccattatggataaagatgagatggtttctagagatggtttctactggctgccagaatctagagcaaagccatccccgctcctggttggtcacagaatgactgacaaagacatcgattgatatgcttctttgtgttatttccctcccaagtaaatgtttgtccttgggtccattttctatgcttgtaactgtcttctagcagtgagccaaatgtaaaatagtgaataaagtcattattaggaagttca

SEQ ID NO: 301110 - DNA, 2997 bp, Homo sapiens
caatcccttaattaaatagcttcccctctacaggcttttgaagtggtagcagttcctcctaactcctgccagaaacagctctcctcaacatgagagctgcacccctcctcctggccagggcagcaagccttagccttggcttcttgtttctgctttttttctggctagaccgaagtgtactagccaaggagttgaagtttgtgactttggtgtttcggcatggagaccgaagtcccattgacacctttcccactgaccccataaaggaatcctcatggccacaaggatttggccaactcacccagctgggcatggagcagcattatgaacttggagagtatataagaaagagatatagaaaattcttgaatgagtcctataaacatgaacaggtttatattcgaagcacagacgttgaccggactttgatgagtgctatgacaaacctggcagccctgtttcccccagaaggtgtcagcatctggaatcctatcctactctggcagcccatcccggtgcacacagttcctctttctgaagatcagttgctatacctgcctttcaggaactgccctcgttttcaagaacttgagagtgagactttgaaatcagaggaattccagaagaggctgcacccttataaggatttatagctaccttgggaaaactttcaggattacatggccaggaccttttggaattggagtaaagtctacgaccctttatattgtggagagtgttcacaatttcactttaccctcctgggccactgaggacaccatgactaagttgagagaatgtgcagaattgtccctcctgtccctctatggaattcacaagcagaaagagaaatctaggctccaagggggtgtcctggtcaatgaaatcctcaatcacatgaagagagcaactcagataccaagctacaaaaaacttatcatgtattctgcgcatgacactactgtgagtggcctacagatggcgctagatgtttacaacggactccttcctccctatgcttcttgccacttgacggaattgtactttgagaagggggagtactttgtggagatgtactaccggaatgagacgcagcacgagccgtatcccctcatgctacctggctgcagccccagctgtcctctggagaggtttgctgagctggttggccctgtgatccctcaagactggtccacggagtgtatgaccacaaacagccatcaaggtactgaggacagtacagattagtgtgcacagagatctctgtagaaagagtagctgccctttctcagggcagatgatgctttgagaacatactttggccattacccccagctttgaggaaaatgggctttggatgattattttatgttttagggacccccaacctcaggcaattcctacctcttcacctgaccctgcccccacttgccataaaacttagctaagttttgttttgtttttcagcgttaatgtaaaggggcagcagtgccaaaatataatcagagataaagcttaggtcaaagttcatagagttcccatgaactatatgactggccacacaggatcttttgtatttaaggattctgagattttgcttgagcaggattagataaggctgttctttaaatgtctgaaatggaacagatttcaaaaaaaaaccccacaatctagggtgggaacaaggaaggaaagatgtgaataggctgatgggcaaaaaaccaatttacccatcagttccagccttctctcaaggagaggcaaagaaaggagatacagtggagacatctggaaagttttctccactggaaaactgctactatctgttttatatttctgttaaaatatatgaggctacagaactaaaaattaaaacctctttgtgtcccttggtcctggaacatttatgttccttttaaagaaacaaaaatcaaactttacagaaagatttgatgtatgtaatacatatagcagctcttgaagtatatatatcatagcaaataagtcatctgatgagaacaagctatttgggcacaacacatcaggaaagagagcaccacgtgatggagtttctccagaagctccagtgataagagatgttgactctaaagttgatttaaggccaggcatggtggtttacgcctataatcccagcattttgggagtccgaggtgggcagatcacttgagctcaggaggtcaagatcagcctgggcaacatggtgaaaccttgtctctacataaaatacaaaaacttagatgggcatggtggtgtgtgcctatagtcccactacttgtggggctaaggaggcaggaggatcactttaggcctggtgtgttcaagaccagcctggtcaacatagtgagacactgtctctaccaaaaaaaggaaggaagggacacatatcaaactgaaacaaaattagaaatgtaattatgttctaagtgcctccaagttcaaaacttattggaatgttgagagtgtggttacgaaatacgttaggaggacaaaaggaatgtgtaagtctttaatgccgatatcttcagaaaacctaagcaaacttacaggtcctgctgaaactgcccactctgcaagaagaaatcatgatatagctttgccatgtggcagatctacatgtctagagaacactgtgctctattaccattatggataaagatgagatggtttctagagatggtttctactggctgccagaatctagagcaaagccatccccgctcctggttggtcacagaatgactgacaaagacatcgattgatatgcttctttgtgttatttccctcccaagtaaatgtttgtccttgggtccattttctatgcttgtaactgtcttctagcagtgagccaaatgtaaaatagtgaataaagtcattattaggaagttcaaaagcattgcttttataatgaacttagaaaaacgtatgtgtgtgtgtttaattagaataaaattcctctaggcagatttcaggagctcc

SEQ ID NO: 301111 - DNA, 3099 bp, Homo sapiens
caatcccttaattaaatagcttcccctctacaggcttttgaagtggtagcagttcctcctaactcctgccagaaacagctctcctcaacatgagagctgcacccctcctcctggccagggcagcaagccttagccttggcttcttgtttctgctttttttctggctagaccgaagtgtactagccaaggagttgaagtttgtgactttggtgtttcggcatggagaccgaagtcccattgacacctttcccactgaccccataaaggaatcctcatggccacaaggatttggccaactcacccagctgggcatggagcagcattatgaacttggagagtatataagaaagagatatagaaaattcttgaatgagtcctataaacatgaacaggtttatattcgaagcacagacgttgaccggactttgatgagtgctatgacaaacctggcagccctgtttcccccagaaggtgtcagcatctggaatcctatcctactctggcagcccatcccggtgcacacagttcctctttctgaagatcagttgctatacctgcctttcaggaactgccctcgttttcaagaacttgagagtgagactttgaaatcagaggaattccagaagaggctgcacccttataaggatttatagctaccttgggaaaactttcaggattacatggccaggaccttttggaattggagtaaagtctacgaccctttatattgtggagagtgttcacaatttcactttaccctcctgggccactgaggacaccatgactaagttgagagaatgtgcagaattgtccctcctgtccctctatggaattcacaagcagaaagagaaatctaggctccaagggggtgtcctggtcaatgaaatcctcaatcacatgaagagagcaactcagataccaagctacaaaaaacttatcatgtattctgcgcatgacactactgtgagtggcctacagatggcgctagatgtttacaacggactccttcctccctatgcttcttgccacttgacggaattgtactttgagaagggggagtactttgtggagatgtactaccggaatgagacgcagcacgagccgtatcccctcatgctacctggctgcagccccagctgtcctctggagaggtttgctgagctggttggccctgtgatccctcaagactggtccacggagtgtatgaccacaaacagccatcaaggtactgaggacagtacagattagtgtgcacagagatctctgtagaaagagtagctgccctttctcagggcagatgatgctttgagaacatactttggccattacccccagctttgaggaaaatgggctttggatgattattttatgttttagggacccccaacctcaggcaattcctacctcttcacctgaccctgcccccacttgccataaaacttagctaagttttgttttgtttttcagcgttaatgtaaaggggcagcagtgccaaaatataatcagagataaagcttaggtcaaagttcatagagttcccatgaactatatgactggccacacaggatcttttgtatttaaggattctgagattttgcttgagcaggattagataaggctgttctttaaatgtctgaaatggaacagatttcaaaaaaaaaccccacaatctagggtgggaacaaggaaggaaagatgtgaataggctgatgggcaaaaaaccaatttacccatcagttccagccttctctcaaggagaggcaaagaaaggagatacagtggagacatctggaaagttttctccactggaaaactgctactatctgttttatatttctgttaaaatatatgaggctacagaactaaaaattaaaacctctttgtgtcccttggtcctggaacatttatgttccttttaaagaaacaaaaatcaaactttacagaaagatttgatgtatgtaatacatatagcagctcttgaagtatatatatcatagcaaataagtcatctgatgagaacaagctatttgggcacaacacatcaggaaagagagcaccacgtgatggagtttctccagaagctccagtgataagagatgttgactctaaagttgatttaaggccaggcatggtggtttacgcctataatcccagcattttgggagtccgaggtgggcagatcacttgagctcaggaggtcaagatcagcctgggcaacatggtgaaaccttgtctctacataaaatacaaaaacttagatgggcatggtggtgtgtgcctatagtcccactacttgtggggctaaggcaggaggatcacttgagccccggaggtcgaggctacagtgagccaagagtgcactactgtactccagccagggcaagagagcgagaccctgtctcaataaataaataaataaataaataaataaataaataaataaaaaacaaagttgattaagaaaggaagtataggccaggcacagtggctcacacctgtaatccttgcattttggaaggctgaggcaggaggatcactttaggcctggtgtgttcaagaccagcctggtcaacatagtgagacactgtctctaccaaaaaaaggaaggaagggacacatatcaaactgaaacaaaattagaaatgtaattatgttctaagtgcctccaagttcaaaacttattggaatgttgagagtgtggttacgaaatacgttaggaggacaaaaggaatgtgtaagtctttaatgccgatatcttcagaaaacctaagcaaacttacaggtcctgctgaaactgcccactctgcaagaagaaatcatgatatagctttgccatgtggcagatctacatgtctagagaacactgtgctctattaccattatggataaagatgagatggtttctagagatggtttctactggctgccagaatctagagcaaagccatccccgctcctggttggtcacagaatgactgacaaagacatcgattgatatgcttctttgtgttatttccctcccaagtaaatgtttgtccttgggtccattttctatgcttggtcgacgcggccgcgaatttagtagtagtaggcggccgc

SEQ ID NO: 301112 - DNA, 3466 bp, Homo sapiens
  misc_feature (3150)..(3151): n is a, c, g, or t
  misc_feature (3169)..(3169): n is a, c, g, or t
caatcccttaattaaatagcttcccctctacaggcttttgaagtggtagcagttcctcctaactcctgccagaaacagctctcctcaacatgagagctgcacccctcctcctggccagggcagcaagccttagccttggcttcttgtttctgctttttttctggctagaccgaagtgtactagccaaggagttgaagtttgtgactttggtgtttcggcatggagaccgaagtcccattgacacctttcccactgaccccataaaggaatcctcatggccacaaggatttggccaactcacccagctgggcatggagcagcattatgaacttggagagtatataagaaagagatatagaaaattcttgaatgagtcctataaacatgaacaggtttatattcgaagcacagacgttgaccggactttgatgagtgctatgacaaacctggcagccctgtttcccccagaaggtgtcagcatctggaatcctatcctactctggcagcccatcccggtgcacacagttcctctttctgaagatcagttgctatacctgcctttcaggaactgccctcgttttcaagaacttgagagtgagactttgaaatcagaggaattccagaagaggctgcacccttataaggatttatagctaccttgggaaaactttcaggattacatggccaggaccttttggaattggagtaaagtctacgaccctttatattgtggagagtgttcacaatttcactttaccctcctgggccactgaggacaccatgactaagttgagagaatgtgcagaattgtccctcctgtccctctatggaattcacaagcagaaagagaaatctaggctccaagggggtgtcctggtcaatgaaatcctcaatcacatgaagagagcaactcagataccaagctacaaaaaacttatcatgtattctgcgcatgacactactgtgagtggcctacagatggcgctagatgtttacaacggactccttcctccctatgcttcttgccacttgacggaattgtactttgagaagggggagtactttgtggagatgtactaccggaatgagacgcagcacgagccgtatcccctcatgctacctggctgcagccccagctgtcctctggagaggtttgctgagctggttggccctgtgatccctcaagactggtccacggagtgtatgaccacaaacagccatcaaggtactgaggacagtacagattagtgtgcacagagatctctgtagaaagagtagctgccctttctcagggcagatgatgctttgagaacatactttggccattacccccagctttgaggaaaatgggctttggatgattattttatgttttagggacccccaacctcaggcaattcctacctcttcacctgaccctgcccccacttgccataaaacttagctaagttttgttttgtttttcagcgttaatgtaaaggggcagcagtgccaaaatataatcagagataaagcttaggtcaaagttcatagagttcccatgaactatatgactggccacacaggatcttttgtatttaaggattctgagattttgcttgagcaggattagataaggctgttctttaaatgtctgaaatggaacagatttcaaaaaaaaaccccacaatctagggtgggaacaaggaaggaaagatgtgaataggctgatgggcaaaaaaccaatttacccatcagttccagccttctctcaaggagaggcaaagaaaggagatacagtggagacatctggaaagttttctccactggaaaactgctactatctgttttatatttctgttaaaatatatgaggctacagaactaaaaattaaaacctctttgtgtcccttggtcctggaacatttatgttccttttaaagaaacaaaaatcaaactttacagaaagatttgatgtatgtaatacatatagcagctcttgaagtatatatatcatagcaaataagtcatctgatgagaacaagctatttgggcacaacacatcaggaaagagagcaccacgtgatggagtttctccagaagctccagtgataagagatgttgactctaaagttgatttaaggccaggcatggtggtttacgcctataatcccagcattttgggagtccgaggtgggcagatcacttgagctcaggaggtcaagatcagcctgggcaacatggtgaaaccttgtctctacataaaatacaaaaacttagatgggcatggtggtgtgtgcctatagtcccactacttgtggggctaaggcaggaggatcacttgagccccggaggtcgaggctacagtgagccaagagtgcactactgtactccagccagggcaagagagcgagaccctgtctcaataaataaataaataaataaataaataaataaataaataaaaaacaaagttgattaagaaaggaagtataggccaggcacagtggctcacacctgtaatccttgcattttggaaggctgaggcaggaggatcactttaggcctggtgtgttcaagaccagcctggtcaacatagtgagacactgtctctaccaaaaaaaggaaggaagggacacatatcaaactgaaacaaaattagaaatgtaattatgttctaagtgcctccaagttcaaaacttattggaatgttgagagtgtggttacgaaatacgttaggaggacaaaaggaatgtgtaagtctttaatgccgatatcttcagaaaacctaagcaaacttacaggtcctgctgaaactgcccactctgcaagaagaaatcatgatatagctttgccatgtggcagatctacatgtctagagaacactgtgctctattaccattatggataaagatgagatggtttctagagatggtttctactggctgccagaatctagagcaaagccatccccgctcctggttggtcacagaatgactgacaaagacatcgattgatatgcttctttgtgttatttccctcccaagtaaatgtttgtccttgggtccattttctatgcttgtaactgtcttctagcagtgagccaaatgtaaaatagtgaataaagtcattattaggaagttcaaaaaaaaaaaaaacaaaaaaaaaacannttgttggggcgcggcctngggcccctggagaaagttttttaaacccattctcggttggggcgcgcgggggccccagttgggtaggggacctgtgggcccaagacggggttcccaaagggaacacccggggccaaaagacaaaggcggggggattctcttacccatttaaaaaaagcggccgggggggacccgggaggggttcttgtggacaaatctccagagagggcggccggggagggccaaacagggggcctatcacccggggagccccaggggagcccaaaataaaaccggccaccggtggggggggacgtc

SEQ ID NO: 301113 - DNA, 3189 bp, Homo sapiens
caatcccttaattaaatagcttcccctctacaggcttttgaagtggtagcagttcctcctaactcctgccagaaacagctctcctcaacatgagagctgcacccctcctcctggccagggcagcaagccttagccttggcttcttgtttctgctttttttctggctagaccgaagtgtactagccaaggagttgaagtttgtgactttggtgtttcggcatggagaccgaagtcccattgacacctttcccactgaccccataaaggaatcctcatggccacaaggatttggccaactcacccagctgggcatggagcagcattatgaacttggagagtatataagaaagagatatagaaaattcttgaatgagtcctataaacatgaacaggtttatattcgaagcacagacgttgaccggactttgatgagtgctatgacaaacctggcagccctgtttcccccagaaggtgtcagcatctggaatcctatcctactctggcagcccatcccggtgcacacagttcctctttctgaagatcagttgctatacctgcctttcaggaactgccctcgttttcaagaacttgagagtgagactttgaaatcagaggaattccagaagaggctgcacccttataaggatttatagctaccttgggaaaactttcaggattacatggccaggaccttttggaattggagtaaagtctacgaccctttatattgtggagagtgttcacaatttcactttaccctcctgggccactgaggacaccatgactaagttgagagaatgtgcagaattgtccctcctgtccctctatggaattcacaagcagaaagagaaatctaggctccaagggggtgtcctggtcaatgaaatcctcaatcacatgaagagagcaactcagataccaagctacaaaaaacttatcatgtattctgcgcatgacactactgtgagtggcctacagatggcgctagatgtttacaacggactccttcctccctatgcttcttgccacttgacggaattgtactttgagaagggggagtactttgtggagatgtactaccggaatgagacgcagcacgagccgtatcccctcatgctacctggctgcagccccagctgtcctctggagaggtttgctgagctggttggccctgtgatccctcaagactggtccacggagtgtatgaccacaaacagccatcaaggtactgaggacagtacagattagtgtgcacagagatctctgtagaaagagtagctgccctttctcagggcagatgatgctttgagaacatactttggccattacccccagctttgaggaaaatgggctttggatgattattttatgttttagggacccccaacctcaggcaattcctacctcttcacctgaccctgcccccacttgccataaaacttagctaagttttgttttgtttttcagcgttaatgtaaaggggcagcagtgccaaaatataatcagagataaagcttaggtcaaagttcatagagttcccatgaactatatgactggccacacaggatcttttgtatttaaggattctgagattttgcttgagcaggattagataaggctgttctttaaatgtctgaaatggaacagatttcaaaaaaaaaccccacaatctagggtgggaacaaggaaggaaagatgtgaataggctgatgggcaaaaaaccaatttacccatcagttccagccttctctcaaggagaggcaaagaaaggagatacagtggagacatctggaaagttttctccactggaaaactgctactatctgttttatatttctgttaaaatatatgaggctacagaactaaaaattaaaacctctttgtgtcccttggtcctggaacatttatgttccttttaaagaaacaaaaatcaaactttacagaaagatttgatgtatgtaatacatatagcagctcttgaagtatatatatcatagcaaataagtcatctgatgagaacaagctatttgggcacaacacatcaggaaagagagcaccacgtgatggagtttctccagaagctccagtgataagagatgttgactctaaagttgatttaaggccaggcatggtggtttacgcctataatcccagcattttgggagtccgaggtgggcagatcacttgagctcaggaggtcaagatcagcctgggcaacatggtgaaaccttgtctctacataaaatacaaaaacttagatgggcatggtggtgtgtgcctatagtcccactacttgtggggctaaggcaggaggatcacttgagccccggaggtcgaggctacagtgagccaagagtgcactactgtactccagccagggcaagagagcgagaccctgtctcaataaataaataaataaataaataaataaataaataaataaaaaacaaagttgattaagaaaggaagtataggccaggcacagtggctcacacctgtaatccttgcattttggaaggctgaggcaggaggatcactttaggcctggtgtgttcaagaccagcctggtcaacatagtgagacactgtctctaccaaaaaaaggaaggaagggacacatatcaaactgaaacaaaattagaaatgtaattatgttctaagtgcctccaagttcaaaacttattggaatgttgagagtgtggttacgaaatacgttaggaggacaaaaggaatgtgtaagtctttaatgccgatatcttcagaaaacctaagcaaacttacaggtcctgctgaaactgcccactctgcaagaagaaatcatgatatagctttgccatgtggcagatctacatgtctagagaacactgtgctctattaccattatggataaagatgagatggtttctagagatggtttctactggctgccagaatctagagcaaagccatccccgctcctggttggtcacagaatgactgacaaagacatcgattgatatgcttctttgtgttatttccctcccaagtaaatgtttgtccttgggtccattttctatgcttgtaactgtcttctagcagtgagccaaatgtaaaatagtgaataaagtcattattaggaagttcaaaaagaaataaaaaagtttttcccccaaatggaccgttttagtggagcgggcgcggaatttttatg

SEQ ID NO: 301114 - DNA, 3372 bp, Homo sapiens
caatcccttaattaaatagcttcccctctacaggcttttgaagtggtagcagttcctcctaactcctgccagaaacagctctcctcaacatgagagctgcacccctcctcctggccagggcagcaagccttagccttggcttcttgtttctgctttttttctggctagaccgaagtgtactagccaaggagttgaagtttgtgactttggtgtttcggcatggagaccgaagtcccattgacacctttcccactgaccccataaaggaatcctcatggccacaaggatttggccaactcacccagctgggcatggagcagcattatgaacttggagagtatataagaaagagatatagaaaattcttgaatgagtcctataaacatgaacaggtttatattcgaagcacagacgttgaccggactttgatgagtgctatgacaaacctggcagccctgtttcccccagaaggtgtcagcatctggaatcctatcctactctggcagcccatcccggtgcacacagttcctctttctgaagatcagttgctatacctgcctttcaggaactgccctcgttttcaagaacttgagagtgagactttgaaatcagaggaattccagaagaggctgcacccttataaggatttatagctaccttgggaaaactttcaggattacatggccaggaccttttggaattggagtaaagtctacgaccctttatattgtggagagtgttcacaatttcactttaccctcctgggccactgaggacaccatgactaagttgagagaatgtgcagaattgtccctcctgtccctctatggaattcacaagcagaaagagaaatctaggctccaagggggtgtcctggtcaatgaaatcctcaatcacatgaagagagcaactcagataccaagctacaaaaaacttatcatgtattctgcgcatgacactactgtgagtggcctacagatggcgctagatgtttacaacggactccttcctccctatgcttcttgccacttgacggaattgtactttgagaagggggagtactttgtggagatgtactaccggaatgagacgcagcacgagccgtatcccctcatgctacctggctgcagccccagctgtcctctggagaggtttgctgagctggttggccctgtgatccctcaagactggtccacggagtgtatgaccacaaacagccatcaaggtactgaggacagtacagattagtgtgcacagagatctctgtagaaagagtagctgccctttctcagggcagatgatgctttgagaacatactttggccattacccccagctttgaggaaaatgggctttggatgattattttatgttttagggacccccaacctcaggcaattcctacctcttcacctgaccctgcccccacttgccataaaacttagctaagttttgttttgtttttcagcgttaatgtaaaggggcagcagtgccaaaatataatcagagataaagcttaggtcaaagttcatagagttcccatgaactatatgactggccacacaggatcttttgtatttaaggattctgagattttgcttgagcaggattagataaggctgttctttaaatgtctgaaatggaacagatttcaaaaaaaaaccccacaatctagggtgggaacaaggaaggaaagatgtgaataggctgatgggcaaaaaaccaatttacccatcagttccagccttctctcaaggagaggcaaagaaaggagatacagtggagacatctggaaagttttctccactggaaaactgctactatctgttttatatttctgttaaaatatatgaggctacagaactaaaaattaaaacctctttgtgtcccttggtcctggaacatttatgttccttttaaagaaacaaaaatcaaactttacagaaagatttgatgtatgtaatacatatagcagctcttgaagtatatatatcatagcaaataagtcatctgatgagaacaagctatttgggcacaacacatcaggaaagagagcaccacgtgatggagtttctccagaagctccagtgataagagatgttgactctaaagttgatttaaggccaggcatggtggtttacgcctataatcccagcattttgggagtccgaggtgggcagatcacttgagctcaggaggtcaagatcagcctgggcaacatggtgaaaccttgtctctacataaaatacaaaaacttagatgggcatggtggtgtgtgcctatagtcccactacttgtggggctaaggcaggaggatcacttgagccccggaggtcgaggctacagtgagccaagagtgcactactgtactccagccagggcaagagagcgagaccctgtctcaataaataaataaataaataaataaataaataaataaataaaaaacaaagttgattaagaaaggaagtataggccaggcacagtggctcacacctgtaatccttgcattttggaaggctgaggcaggaggatcactttaggcctggtgtgttcaagaccagcctggtcaacatagtgagacactgtctctaccaaaaaaaggaaggaagggacacatatcaaactgaaacaaaattagaaatgtaattatgttctaagtgcctccaagttcaaaacttattggaatgttgagagtgtggttacgaaatacgttaggaggacaaaaggaatgtgtaagtctttaatgccgatatcttcagaaaacctaagcaaacttacaggtcctgctgaaactgcccactctgcaagaagaaatcatgatatagctttgccatgtggcagatctacatgtctagagaacactgtgctctattaccattatggataaagatgagatggtttctagagatggtttctactggctgccagaatctagagcaaagccatccccgctcctggttggtcacagaatgactgacaaagacatcgattgatatgcttctttgtgttatttccctcccaagtaaatgtttgtccttgggtccattttctatgcttgtaactgtcttctagcagtgagccaaatgtaaaatagtgaataaagtcattattaggaagttcaatagggaagaacacacgcgcagaacaacaaacaaggaaaaacacacaaaaccacacagaaaaaacaaagaagacaaaggcagcaacaagacaacgaccaatgacagaacaggccagaccgcgaacgagaagagaaaaaaaaaaagagcggcccgccaaaaaacaacaaacgacggacggcgaaacaaagagagaacccaaaagagcaagaggagaaaaaaaaacgaagcggagcacaagggagcgacaa

SEQ ID NO: 301115 - DNA, 3397 bp, Homo sapiens
  misc_feature (3397)..(3397): n is a, c, g, or t
caatcccttaattaaatagcttcccctctacaggcttttgaagtggtagcagttcctcctaactcctgccagaaacagctctcctcaacatgagagctgcacccctcctcctggccagggcagcaagccttagccttggcttcttgtttctgctttttttctggctagaccgaagtgtactagccaaggagttgaagtttgtgactttggtgtttcggcatggagaccgaagtcccattgacacctttcccactgaccccataaaggaatcctcatggccacaaggatttggccaactcacccagctgggcatggagcagcattatgaacttggagagtatataagaaagagatatagaaaattcttgaatgagtcctataaacatgaacaggtttatattcgaagcacagacgttgaccggactttgatgagtgctatgacaaacctggcagccctgtttcccccagaaggtgtcagcatctggaatcctatcctactctggcagcccatcccggtgcacacagttcctctttctgaagatcagttgctatacctgcctttcaggaactgccctcgttttcaagaacttgagagtgagactttgaaatcagaggaattccagaagaggctgcacccttataaggatttatagctaccttgggaaaactttcaggattacatggccaggaccttttggaattggagtaaagtctacgaccctttatattgtggagagtgttcacaatttcactttaccctcctgggccactgaggacaccatgactaagttgagagaatgtgcagaattgtccctcctgtccctctatggaattcacaagcagaaagagaaatctaggctccaagggggtgtcctggtcaatgaaatcctcaatcacatgaagagagcaactcagataccaagctacaaaaaacttatcatgtattctgcgcatgacactactgtgagtggcctacagatggcgctagatgtttacaacggactccttcctccctatgcttcttgccacttgacggaattgtactttgagaagggggagtactttgtggagatgtactaccggaatgagacgcagcacgagccgtatcccctcatgctacctggctgcagccccagctgtcctctggagaggtttgctgagctggttggccctgtgatccctcaagactggtccacggagtgtatgaccacaaacagccatcaaggtactgaggacagtacagattagtgtgcacagagatctctgtagaaagagtagctgccctttctcagggcagatgatgctttgagaacatactttggccattacccccagctttgaggaaaatgggctttggatgattattttatgttttagggacccccaacctcaggcaattcctacctcttcacctgaccctgcccccacttgccataaaacttagctaagttttgttttgtttttcagcgttaatgtaaaggggcagcagtgccaaaatataatcagagataaagcttaggtcaaagttcatagagttcccatgaactatatgactggccacacaggatcttttgtatttaaggattctgagattttgcttgagcaggattagataaggctgttctttaaatgtctgaaatggaacagatttcaaaaaaaaaccccacaatctagggtgggaacaaggaaggaaagatgtgaataggctgatgggcaaaaaaccaatttacccatcagttccagccttctctcaaggagaggcaaagaaaggagatacagtggagacatctggaaagttttctccactggaaaactgctactatctgttttatatttctgttaaaatatatgaggctacagaactaaaaattaaaacctctttgtgtcccttggtcctggaacatttatgttccttttaaagaaacaaaaatcaaactttacagaaagatttgatgtatgtaatacatatagcagctcttgaagtatatatatcatagcaaataagtcatctgatgagaacaagctatttgggcacaacacatcaggaaagagagcaccacgtgatggagtttctccagaagctccagtgataagagatgttgactctaaagttgatttaaggccaggcatggtggtttacgcctataatcccagcattttgggagtccgaggtgggcagatcacttgagctcaggaggtcaagatcagcctgggcaacatggtgaaaccttgtctctacataaaatacaaaaacttagatgggcatggtggtgtgtgcctatagtcccactacttgtggggctaaggcaggaggatcacttgagccccggaggtcgaggctacagtgagccaagagtgcactactgtactccagccagggcaagagagcgagaccctgtctcaataaataaataaataaataaataaataaataaataaataaaaaacaaagttgattaagaaaggaagtataggccaggcacagtggctcacacctgtaatccttgcattttggaaggctgaggcaggaggatcactttaggcctggtgtgttcaagaccagcctggtcaacatagtgagacactgtctctaccaaaaaaaggaaggaagggacacatatcaaactgaaacaaaattagaaatgtaattatgttctaagtgcctccaagttcaaaacttattggaatgttgagagtgtggttacgaaatacgttaggaggacaaaaggaatgtgtaagtctttaatgccgatatcttcagaaaacctaagcaaacttacaggtcctgctgaaactgcccactctgcaagaagaaatcatgatatagctttgccatgtggcagatctacatgtctagagaacactgtgctctattaccattatggataaagatgagatggtttctagagatggtttctactggctgccagaatctagagcaaagccatccccgctcctggttggtcacagaatgactgacaaagacatcgattgatatgcttctttgtgttatttccctcccaagtaaatgtttgtccttgggtccattttctatgcttgtaactgtcttctagcagtgagccaaatgtaaaatagtgaataaagtcattattaggaagttcaaaaaccacaacacaaacaaacacaaaaaaaaactggtgtgggcaccgcacagcgaccccgaaaaaaagttttttaaaacccatgttgtgtggggcccgcgggccgccgatgaggttcatgtgacaacatgtgcccaaaacggttcccagaaaaacaccggccctggactagggctgtgctttttcaccaataaaacgccgtggacaccgcgcttttgaacatcccatgtggccgaagcacaggggtctcacacggggcccggaccaataatcgn

SEQ ID NO: 301116 - DNA, 3262 bp, Homo sapiens
acctgtcatcaggcgcgaaccaagtagatcgccgcttcggccaggctgttagtaatcgccggtcgagctgaagtcggcaagggcagggtggtcgagcggttctcatgatcggtccacaccaccgaatcgcccgacaccgcaagccgatgggccagcccatgactccaaccaaaccccaacccacaatccacatccaccgcactggtgcgatacagccgcgtccacgcaaacggcaaaatcccgtccagtgcgccgtcggtgagtatcagcaattcctcgccggtgaccatcgacaccgggcagccgttgctaaccgactacctcatggccacaaggatttggccaactcacccagctgggcatggagcagcattatgaacttggagagtatataagaaagagatatagaaaattcttgaatgagtcctataaacatgaacaggtttatattcgaagcacagacgttgaccggactttgatgagtgctatgacaaacctggcagccctgtttcccccagaaggtgtcagcatctggaatcctatcctactctggcagcccatcccggtgcacacagttcctctttctgaagatcagttgctatacctgcctttcaggaactgccctcgttttcaagaacttgagagtgagactttgaaatcagaggaattccagaagaggctgcacccttataaggatttatagctaccttgggaaaactttcaggattacatggccaggaccttttggaattggagtaaagtctacgaccctttatattgtggagagtgttcacaatttcactttaccctcctgggccactgaggacaccatgactaagttgagagaatgtgcagaattgtccctcctgtccctctatggaattcacaagcagaaagagaaatctaggctccaagggggtgtcctggtcaatgaaatcctcaatcacatgaagagagcaactcagataccaagctacaaaaaacttatcatgtattctgcgcatgacactactgtgagtggcctacagatggcgctagatgtttacaacggactccttcctccctatgcttcttgccacttgacggaattgtactttgagaagggggagtactttgtggagatgtactaccggaatgagacgcagcacgagccgtatcccctcatgctacctggctgcagccccagctgtcctctggagaggtttgctgagctggttggccctgtgatccctcaagactggtccacggagtgtatgaccacaaacagccatcaaggtactgaggacagtacagattagtgtgcacagagatctctgtagaaagagtagctgccctttctcagggcagatgatgctttgagaacatactttggccattacccccagctttgaggaaaatgggctttggatgattattttatgttttagggacccccaacctcaggcaattcctacctcttcacctgaccctgcccccacttgccataaaacttagctaagttttgttttgtttttcagcgttaatgtaaaggggcagcagtgccaaaatataatcagagataaagcttaggtcaaagttcatagagttcccatgaactatatgactggccacacaggatcttttgtatttaaggattctgagattttgcttgagcaggattagataaggctgttctttaaatgtctgaaatggaacagatttcaaaaaaaaaccccacaatctagggtgggaacaaggaaggaaagatgtgaataggctgatgggcaaaaaaccaatttacccatcagttccagccttctctcaaggagaggcaaagaaaggagatacagtggagacatctggaaagttttctccactggaaaactgctactatctgttttatatttctgttaaaatatatgaggctacagaactaaaaattaaaacctctttgtgtcccttggtcctggaacatttatgttccttttaaagaaacaaaaatcaaactttacagaaagatttgatgtatgtaatacatatagcagctcttgaagtatatatatcatagcaaataagtcatctgatgagaacaagctatttgggcacaacacatcaggaaagagagcaccacgtgatggagtttctccagaagctccagtgataagagatgttgactctaaagttgatttaaggccaggcatggtggtttacgcctataatcccagcattttgggagtccgaggtgggcagatcacttgagctcaggaggtcaagatcagcctgggcaacatggtgaaaccttgtctctacataaaatacaaaaacttagatgggcatggtggtgtgtgcctatagtcccactacttgtggggctaaggcaggaggatcacttgagccccggaggtcgaggctacagtgagccaagagtgcactactgtactccagccagggcaagagagcgagaccctgtctcaataaataaataaataaataaataaataaataaataaataaaaaacaaagttgattaagaaaggaagtataggccaggcacagtggctcacacctgtaatccttgcattttggaaggctgaggcaggaggatcactttaggcctggtgtgttcaagaccagcctggtcaacatagtgagacactgtctctaccaaaaaaaggaaggaagggacacatatcaaactgaaacaaaattagaaatgtaattatgttctaagtgcctccaagttcaaaacttattggaatgttgagagtgtggttacgaaatacgttaggaggacaaaaggaatgtgtaagtctttaatgccgatatcttcagaaaacctaagcaaacttacaggtcctgctgaaactgcccactctgcaagaagaaatcatgatatagctttgccatgtggcagatctacatgtctagagaacactgtgctctattaccattatggataaagatgagatggtttctagagatggtttctactggctgccagaatctagagcaaagccatccccgctcctggttggtcacagaatgactgacaaagacatcgattgatatgcttctttgtgttatttccctcccaagtaaatgtttgtccttgggtccattttctatgcttgtaactgtcttctagcagtgagccaaatgtaaaatagtgaataaagtcattattaggaagttcaaaagcattgcttttataatgaacttagaaaaacgtatgtgtgtgtgtttaattagaataaaattcctctaggcagatttcaggagctcc

SEQ ID NO: 301117 - DNA, 3207 bp, Homo sapiens
ccgtatggtgcaacataaatgatccccatactcttaaaactattcctcatcacccgactaaaaatattaaacacaaactagcacctatcgtccctcgaccaaaatatacatggacctagaaccagaaaatgataacatagctctatagggacgtcgacagtcccgtgacataaggctgtttcgagccatggagatcgcggagaggtcccgagtcgacaccgtttcccacatgaccccgataaaggaagtcctcagtggacaccagggatctggccaactcaacccagtctgcgcatggagcagcattcctgaaggctttggacagtattttcgaaacgagatctagagggagttcttgaagtgagtcctagtggaacatgacacagggtttatattcgaagcacagacgttgaccggactttgatgagtgctatgacaaacctggcagccctgtttcccccagaaggtgtcagcatctggaatcctatcctactctggcagcccatcccggtgcacacagttcctctttctgaagatcagttgctatacctgcctttcaggaactgccctcgttttcaagaacttgagagtgagactttgaaatcagaggaattccagaagaggctgcacccttataaggatttatagctaccttgggaaaactttcaggattacatggccaggaccttttggaattggagtaaagtctacgaccctttatattgtggagagtgttcacaatttcactttaccctcctgggccactgaggacaccatgactaagttgagagaatgtgcagaattgtccctcctgtccctctatggaattcacaagcagaaagagaaatctaggctccaagggggtgtcctggtcaatgaaatcctcaatcacatgaagagagcaactcagataccaagctacaaaaaacttatcatgtattctgcgcatgacactactgtgagtggcctacagatggcgctagatgtttacaacggactccttcctccctatgcttcttgccacttgacggaattgtactttgagaagggggagtactttgtggagatgtactaccggaatgagacgcagcacgagccgtatcccctcatgctacctggctgcagccccagctgtcctctggagaggtttgctgagctggttggccctgtgatccctcaagactggtccacggagtgtatgaccacaaacagccatcaaggtactgaggacagtacagattagtgtgcacagagatctctgtagaaagagtagctgccctttctcagggcagatgatgctttgagaacatactttggccattacccccagctttgaggaaaatgggctttggatgattattttatgttttagggacccccaacctcaggcaattcctacctcttcacctgaccctgcccccacttgccataaaacttagctaagttttgttttgtttttcagcgttaatgtaaaggggcagcagtgccaaaatataatcagagataaagcttaggtcaaagttcatagagttcccatgaactatatgactggccacacaggatcttttgtatttaaggattctgagattttgcttgagcaggattagataaggctgttctttaaatgtctgaaatggaacagatttcaaaaaaaaaccccacaatctagggtgggaacaaggaaggaaagatgtgaataggctgatgggcaaaaaaccaatttacccatcagttccagccttctctcaaggagaggcaaagaaaggagatacagtggagacatctggaaagttttctccactggaaaactgctactatctgttttatatttctgttaaaatatatgaggctacagaactaaaaattaaaacctctttgtgtcccttggtcctggaacatttatgttccttttaaagaaacaaaaatcaaactttacagaaagatttgatgtatgtaatacatatagcagctcttgaagtatatatatcatagcaaataagtcatctgatgagaacaagctatttgggcacaacacatcaggaaagagagcaccacgtgatggagtttctccagaagctccagtgataagagatgttgactctaaagttgatttaaggccaggcatggtggtttacgcctataatcccagcattttgggagtccgaggtgggcagatcacttgagctcaggaggtcaagatcagcctgggcaacatggtgaaaccttgtctctacataaaatacaaaaacttagatgggcatggtggtgtgtgcctatagtcccactacttgtggggctaaggcaggaggatcacttgagccccggaggtcgaggctacagtgagccaagagtgcactactgtactccagccagggcaagagagcgagaccctgtctcaataaataaataaataaataaataaataaataaataaataaaaaacaaagttgattaagaaaggaagtataggccaggcacagtggctcacacctgtaatccttgcattttggaaggctgaggcaggaggatcactttaggcctggtgtgttcaagaccagcctggtcaacatagtgagacactgtctctaccaaaaaaaggaaggaagggacacatatcaaactgaaacaaaattagaaatgtaattatgttctaagtgcctccaagttcaaaacttattggaatgttgagagtgtggttacgaaatacgttaggaggacaaaaggaatgtgtaagtctttaatgccgatatcttcagaaaacctaagcaaacttacaggtcctgctgaaactgcccactctgcaagaagaaatcatgatatagctttgccatgtggcagatctacatgtctagagaacactgtgctctattaccattatggataaagatgagatggtttctagagatggtttctactggctgccagaatctagagcaaagccatccccgctcctggttggtcacagaatgactgacaaagacatcgattgatatgcttctttgtgttatttccctcccaagtaaatgtttgtccttgggtccattttctatgcttgtaactgtcttctagcagtgagccaaatgtaaaatagtgaataaagtcattattaggaagttcaaaagcattgcttttataatgaacttagaaaaacgtatgtgtgtgtgtttaattagaataaaattcctctaggcagatttcaggagctcc

SEQ ID NO: 301118 - DNA, 2954 bp, Homo sapiens
caggaacatgtggcagtcagccagcatctatctacattttaaatgtaataataaggaataatcaattcgtgtttgtaaaattctttggaatgacattatcgtaaccaatattactggtgcatttttctgtgaagaacagcggttctcaacaggggcgcatttgcctcacaaggaacatttggcaatgtcgggagatattctgggttatacaagtgggagattaggaatgctactggcatctagtgggcagaggccaggatactgtgaaacatcctataatgcacaggagagctccctacaacaaacaattgtctggcccaaaatatcaataatgctgaagctgagaaacctgtgtaggaatttttctttctctgtttgtgtttcaggatttatagctaccttgggaaaactttcaggattacatggccaggaccttttggaattggagtaaagtctacgaccctttatattgtggagagtgttcacaatttcactttaccctcctgggccactgaggacaccatgactaagttgagagaatgtgcagaattgtccctcctgtccctctatggaattcacaagcagaaagagaaatctaggctccaagggggtgtcctggtcaatgaaatcctcaatcacatgaagagagcaactcagataccaagctacaaaaaacttatcatgtattctgcgcatgacactactgtgagtggcctacagatggcgctagatgtttacaacggactccttcctccctatgcttcttgccacttgacggaattgtactttgagaagggggagtactttgtggagatgtactaccggaatgagacgcagcacgagccgtatcccctcatgctacctggctgcagccccagctgtcctctggagaggtttgctgagctggttggccctgtgatccctcaagactggtccacggagtgtatgaccacaaacagccatcaaggtactgaggacagtacagattagtgtgcacagagatctctgtagaaagagtagctgccctttctcagggcagatgatgctttgagaacatactttggccattacccccagctttgaggaaaatgggctttggatgattattttatgttttagggacccccaacctcaggcaattcctacctcttcacctgaccctgcccccacttgccataaaacttagctaagttttgttttgtttttcagcgttaatgtaaaggggcagcagtgccaaaatataatcagagataaagcttaggtcaaagttcatagagttcccatgaactatatgactggccacacaggatcttttgtatttaaggattctgagattttgcttgagcaggattagataaggctgttctttaaatgtctgaaatggaacagatttcaaaaaaaaaccccacaatctagggtgggaacaaggaaggaaagatgtgaataggctgatgggcaaaaaaccaatttacccatcagttccagccttctctcaaggagaggcaaagaaaggagatacagtggagacatctggaaagttttctccactggaaaactgctactatctgttttatatttctgttaaaatatatgaggctacagaactaaaaattaaaacctctttgtgtcccttggtcctggaacatttatgttccttttaaagaaacaaaaatcaaactttacagaaagatttgatgtatgtaatacatatagcagctcttgaagtatatatatcatagcaaataagtcatctgatgagaacaagctatttgggcacaacacatcaggaaagagagcaccacgtgatggagtttctccagaagctccagtgataagagatgttgactctaaagttgatttaaggccaggcatggtggtttacgcctataatcccagcattttgggagtccgaggtgggcagatcacttgagctcaggaggtcaagatcagcctgggcaacatggtgaaaccttgtctctacataaaatacaaaaacttagatgggcatggtggtgtgtgcctatagtcccactacttgtggggctaaggcaggaggatcacttgagccccggaggtcgaggctacagtgagccaagagtgcactactgtactccagccagggcaagagagcgagaccctgtctcaataaataaataaataaataaataaataaataaataaataaaaaacaaagttgattaagaaaggaagtataggccaggcacagtggctcacacctgtaatccttgcattttggaaggctgaggcaggaggatcactttaggcctggtgtgttcaagaccagcctggtcaacatagtgagacactgtctctaccaaaaaaaggaaggaagggacacatatcaaactgaaacaaaattagaaatgtaattatgttctaagtgcctccaagttcaaaacttattggaatgttgagagtgtggttacgaaatacgttaggaggacaaaaggaatgtgtaagtctttaatgccgatatcttcagaaaacctaagcaaacttacaggtcctgctgaaactgcccactctgcaagaagaaatcatgatatagctttgccatgtggcagatctacatgtctagagaacactgtgctctattaccattatggataaagatgagatggtttctagagatggtttctactggctgccagaatctagagcaaagccatccccgctcctggttggtcacagaatgactgacaaagacatcgattgatatgcttctttgtgttatttccctcccaagtaaatgtttgtccttgggtccattttctatgcttgtaactgtcttctagcagtgagccaaatgtaaaatagtgaataaagtcattattaggaagttcaaaagcattgcttttataatgaacttagaaaaacgtatgtgtgtgtgtttaattagaataaaattcctctaggcagatttcaggagctcc

SEQ ID NO: 301119 - DNA, 2466 bp, Homo sapiens
caatcccttaattaaatagcttcccctctacaggcttttgaagtggtagcagttcctcctaactcctgccagaaacagctctcctcaacatgagagctgcacccctcctcctggccagggcagcaagccttagccttggcttcttgtttctgctttttttctggctagaccgaagtgtactagccaaggagttgaagtttgtgactttggtgtttcggcatggagaccgaagtcccattgacacctttcccagcattttgggagtccgaggtgggcagatcacttgacggaattgtactttgagaagggggagtactttgtggagatgtactaccggaatgagacgcagcacgagccgtatcccctcatgctacctggctgcagccccagctgtcctctggagaggtttgctgagctggttggccctgtgatccctcaagactggtccacggagtgtatgaccacaaacagccatcaaggtactgaggacagtacagattagtgtgcacagagatctctgtagaaagagtagctgccctttctcagggcagatgatgctttgagaacatactttggccattacccccagctttgaggaaaatgggctttggatgattattttatgttttagggacccccaacctcaggcaattcctacctcttcacctgaccctgcccccacttgccataaaacttagctaagttttgttttgtttttcagcgttaatgtaaaggggcagcagtgccaaaatataatcagagataaagcttaggtcaaagttcatagagttcccatgaactatatgactggccacacaggatcttttgtatttaaggattctgagattttgcttgagcaggattagataaggctgttctttaaatgtctgaaatggaacagatttcaaaaaaaaaccccacaatctagggtgggaacaaggaaggaaagatgtgaataggctgatgggcaaaaaaccaatttacccatcagttccagccttctctcaaggagaggcaaagaaaggagatacagtggagacatctggaaagttttctccactggaaaactgctactatctgttttatatttctgttaaaatatatgaggctacagaactaaaaattaaaacctctttgtgtcccttggtcctggaacatttatgttccttttaaagaaacaaaaatcaaactttacagaaagatttgatgtatgtaatacatatagcagctcttgaagtatatatatcatagcaaataagtcatctgatgagaacaagctatttgggcacaacacatcaggaaagagagcaccacgtgatggagtttctccagaagctccagtgataagagatgttgactctaaagttgatttaaggccaggcatggtggtttacgcctataatcccagcattttgggagtccgaggtgggcagatcacttgagctcaggaggtcaagatcagcctgggcaacatggtgaaaccttgtctctacataaaatacaaaaacttagatgggcatggtggtgtgtgcctatagtcccactacttgtggggctaaggcaggaggatcacttgagccccggaggtcgaggctacagtgagccaagagtgcactactgtactccagccagggcaagagagcgagaccctgtctcaataaataaataaataaataaataaataaataaataaataaaaaacaaagttgattaagaaaggaagtataggccaggcacagtggctcacacctgtaatccttgcattttggaaggctgaggcaggaggatcactttaggcctggtgtgttcaagaccagcctggtcaacatagtgagacactgtctctaccaaaaaaaggaaggaagggacacatatcaaactgaaacaaaattagaaatgtaattatgttctaagtgcctccaagttcaaaacttattggaatgttgagagtgtggttacgaaatacgttaggaggacaaaaggaatgtgtaagtctttaatgccgatatcttcagaaaacctaagcaaacttacaggtcctgctgaaactgcccactctgcaagaagaaatcatgatatagctttgccatgtggcagatctacatgtctagagaacactgtgctctattaccattatggataaagatgagatggtttctagagatggtttctactggctgccagaatctagagcaaagccatccccgctcctggttggtcacagaatgactgacaaagacatcgattgatatgcttctttgtgttatttccctcccaagtaaatgtttgtccttgggtccattttctatgcttgtaactgtcttctagcagtgagccaaatgtaaaatagtgaataaagtcattattaggaagttcaaaagcattgcttttataatgaacttagaaaaacgtatgtgtgtgtgtttaattagaataaaattcctctaggcagatttcaggagctcc

SEQ ID NO: 301120 - DNA, 1745 bp, Homo sapiens
gcggtcgactactactactaaattcgcggccgcgtcgacagataaagcttaggtcaaagttcatagagttcccatgaactatatgactggccacacaggatcttttgtatttaaggattctgagattttgcttgagcaggattagataaggctgttctttaaatgtctgaaatggaacagatttcaaaaaaaaaccccacaatctagggtgggaacaaggaaggaaagatgtgaataggctgatgggcaaaaaaccaatttacccatcagttccagccttctctcaaggagaggcaaagaaaggagatacagtggagacatctggaaagttttctccactggaaaactgctactatctgttttatatttctgttaaaatatatgaggctacagaactaaaaattaaaacctctttgtgtcccttggtcctggaacatttatgttccttttaaagaaacaaaaatcaaactttacagaaagatttgatgtatgtaatacatatagcagctcttgaagtatatatatcatagcaaataagtcatctgatgagaacaagctatttgggcacaacacatcaggaaagagagcaccacgtgatggagtttctccagaagctccagtgataagagatgttgactctaaagttgatttaaggccaggcatggtggtttacgcctataatcccagcattttgggagtccgaggtgggcagatcacttgagctcaggaggtcaagatcagcctgggcaacatggtgaaaccttgtctctacataaaatacaaaaacttagatgggcatggtggtgtgtgcctatagtcccactacttgtggggctaaggcaggaggatcacttgagccccggaggtcgaggctacagtgagccaagagtgcactactgtactccagccagggcaagagagcgagaccctgtctcaataaataaataaataaataaataaataaataaataaataaaaaacaaagttgattaagaaaggaagtataggccaggcacagtggctcacacctgtaatccttgcattttggaaggctgaggcaggaggatcactttaggcctggtgtgttcaagaccagcctggtcaacatagtgagacactgtctctaccaaaaaaaggaaggaagggacacatatcaaactgaaacaaaattagaaatgtaattatgttctaagtgcctccaagttcaaaacttattggaatgttgagagtgtggttacgaaatacgttaggaggacaaaaggaatgtgtaagtctttaatgccgatatcttcagaaaacctaagcaaacttacaggtcctgctgaaactgcccactctgcaagaagaaatcatgatatagctttgccatgtggcagatctacatgtctagagaacactgtgctctattaccattatggataaagatgagatggtttctagagatggtttctactggctgccagaatctagagcaaagccatccccgctcctggttggtcacagaatgactgacaaagacatcgattgatatgcttctttgtgttatttccctcccaagtaaatgtttgtccttgggtccattttctatgcttgtaactgtcttctagcagtgagccaaatgtaaaatagtgaataaagtcattattaggaagttcaaaagcattgcttttataatgaacttagaaaaacgtatgtgtgtgtgtttaattagaataaaattcctctaggcagatttcaggagctcc

SEQ ID NO: 301121 - DNA, 2765 bp, Homo sapiens
caatcccttaattaaatagcttcccctctacaggcttttgaagtggtagcagttcctcctaactcctgccagaaacagctctcctcaacatgagagctgcacccctcctcctggccagggcagcaagccttagccttggcttcttgtttctgctttttttctggctagaccgaagtgtactagccaaggagttgaagtttgtgactttggtgtttcggcatggagaccgaagtcccattgacacctttcccactgaccccataaaggaatcctcatggccacaaggatttggccaactcacccagctgggcatggagcagcattatgaacttggagagtatataagaaagagatatagaaaattcttgaatgagtcctataaacatgaacaggtttatattcgaagcacagacgttgaccggactttgatgagtgctatgacaaacctggcagccctgtttcccccagaaggtgtcagcatctggaatcctatcctactctggcagcccatcccggtgcacacagttcctctttctgaagatcagttgctatacctgcctttcaggaactgccctcgttttcaagaacttgagagtgagactttgaaatcagaggaattccagaagaggctgcacccttataaggatttatagctaccttgggaaaactttcaggattacatggccaggaccttttggaattggagtaaagtctacgaccctttatattgtggagagtgttcacaatttcactttaccctcctgggccactgaggacaccatgactaagttgagagaatgtgcagaattgtccctcctgtccctctatggaattcacaagcagaaagagaaatctaggctccaagggggtgtcctggtcaatgaaatcctcaatcacatgaagagagcaactcagataccaagctacaaaaaacttatcatgtattctgcgcatgacactactgtgagtggcctacagatggcgctagatgtttacaacggactccttcctccctatgcttcttgccacttgacggaattgtactttgagaagggggagtactttgtggagatgtactaccggaatgagacgcagcacgagccgtatcccctcatgctacctggctgcagccccagctgtcctctggagaggtttgctgagctggttggccctgtgatccctcaagactggtccacggagtgtatgaccacaaacagccatcaaggtactgaggacagtacagattagtgtgcacagagatctctgtagaaagagtagctgccctttctcagggcagatgatgctttgagaacatactttggccattacccccagctttgaggaaaatgggctttggatgattattttatgttttagggacccccaacctcaggcaattcctacctcttcacctgaccctgcccccacttgccataaaacttagctaagttttgttttgtttttcagcgttaatgtaaaggggcagcagtgccaaaatataatcagagataaagcttaggtcaaagttcatagagttcccatgaactatatgactggccacacaggatcttttgtatttaaggattctgagattttgcttgagcaggattagataaggctgttctttaaatgtctgaaatggaacagatttcaaaaaaaaaccccacaatctagggtgggaacaaggaaggaaagatgtgaataggctgatgggcaaaaaaccaatttacccatcagttccagccttctctcaaggagaggcaaagaaaggagatacagtggagacatctggaaagttttctccactggaaaactgctactatctgttttatatttctgttaaaatatatgaggctacagaactaaaaattaaaacctctttgtgtcccttggtcctggaacatttatgttccttttaaagaaacaaaaatcaaactttacagaaagatttgatgtatgtaatacatatagcagctcttgaagtatatatatcatagcaaataagtcatctgatgagaacaagctatttgggcacaacacatcaggaaagagagcaccacgtgatggagtttctccagaagctccagtgataagagatgttgactctaaagttgatttaaggccaggcatggtggtttacgcctataatcccagcattttgggagtccgaggtgggcagatcacttgagctcaggaggtcaagatcagcctgggcaacatggtgaaaccttgtctctacataaaatacaaaaacttagatgggcatggtggtgtgtgcctatagtcccactacttgtggggctaaggaggcaggaggatcactttaggcctggtgtgttcaagaccagcctggtcaacatagtgagacactgtctctaccaaaaaaaggaaggaagggacacatatcaaactgaaacaaaattagaaatgtaattatgttctaagtgcctccaagttcaaaacttattggaatgttgagagtgtggttacgaaatacgttaggaggacaaaaggaatgtgtaagtctttaatgccgatatcttcagaaaacctaagcaaacttacaggtcctgctgaaactgcccactctgcaagaagaaatcatgatatagctttgccatgtggcagatctacatgtctagagaacactgtgctctattaccattatggataaagatgagatggtttctagagatggtttctactggctgccatctcatctttatccataatggtaatagagcacagtgttctctagacgtcga

SEQ ID NO: 301122 - DNA, 1028 bp, Homo sapiens
caatcccttaattaaatagcttcccctctacaggcttttgaagtggtagcagttcctcctaactcctgccagaaacagctctcctcaacatgagagctgcacccctcctcctggccagggcagcaagccttagccttggcttcttgtttctgctttttttctggctagaccgaagtgtactagccaaggagttgaagtttgtgactttggtgtttcggcatggagaccgaagtcccattgacacctttcccactgaccccataaaggaatcctcatggccacaaggatttggccaactcacccagtcacacctgtaatccttgcattttggaaggctgaggcaggaggatcactttaggcctggtgtgttcaagaccagcctggtcaacatagtgagacactgtctctaccaaaaaaaggaaggaagggacacatatcaaactgaaacaaaattagaaatgtaattatgttctaagtgcctccaagttcaaaacttattggaatgttgagagtgtggttacgaaatacgttaggaggacaaaaggaatgtgtaagtctttaatgccgatatcttcagaaaacctaagcaaacttacaggtcctgctgaaactgcccactctgcaagaagaaatcatgatatagctttgccatgtggcagatctacatgtctagagaacactgtgctctattaccattatggataaagatgagatggtttctagagatggtttctactggctgccagaatctagagcaaagccatccccgctcctggttggtcacagaatgactgacaaagacatcgattgatatgcttctttgtgttatttccctcccaagtaaatgtttgtccttgggtccattttctatgcttgtaactgtcttctagcagtgagccaaatgtaaaatagtgaataaagtcattattaggaagttcaaaagcattgcttttataatgaacttagaaaaacgtatgtgtgtgtgtttaattagaataaaattcctctaggcagatttcaggagctcc

SEQ ID NO: 301123 - DNA, 730 bp, Homo sapiens
gcggtcgactactactactaaattcgcggccgcgtcgacgaggcaggaggatcactttaggcctggtgtgttcaagaccagcctggtcaacatagtgagacactgtctctaccaaaaaaaggaaggaagggacacatatcaaactgaaacaaaattagaaatgtaattatgttctaagtgcctccaagttcaaaacttattggaatgttgagagtgtggttacgaaatacgttaggaggacaaaaggaatgtgtaagtctttaatgccgatatcttcagaaaacctaagcaaacttacaggtcctgctgaaactgcccactctgcaagaagaaatcatgatatagctttgccatgtggcagatctacatgtctagagaacactgtgctctattaccattatggataaagatgagatggtttctagagatggtttctactggctgccagaatctagagcaaagccatccccgctcctggttggtcacagaatgactgacaaagacatcgattgatatgcttctttgtgttatttccctcccaagtaaatgtttgtccttgggtccattttctatgcttgtaactgtcttctagcagtgagccaaatgtaaaatagtgaataaagtcattattaggaagttcaaaagcattgcttttataatgaacttagaaaaacgtatgtgtgtgtgtttaattagaataaaattcctctaggcagatttcaggagctcc

SEQ ID NO: 301124 - DNA, 691 bp, Homo sapiens
gcggtcgactactactactaaattcgcggccgcgtcgaccagcctggtcaacatagtgagacactgtctctaccaaaaaaaggaaggaagggacacatatcaaactgaaacaaaattagaaatgtaattatgttctaagtgcctccaagttcaaaacttattggaatgttgagagtgtggttacgaaatacgttaggaggacaaaaggaatgtgtaagtctttaatgccgatatcttcagaaaacctaagcaaacttacaggtcctgctgaaactgcccactctgcaagaagaaatcatgatatagctttgccatgtggcagatctacatgtctagagaacactgtgctctattaccattatggataaagatgagatggtttctagagatggtttctactggctgccagaatctagagcaaagccatccccgctcctggttggtcacagaatgactgacaaagacatcgattgatatgcttctttgtgttatttccctcccaagtaaatgtttgtccttgggtccattttctatgcttgtaactgtcttctagcagtgagccaaatgtaaaatagtgaataaagtcattattaggaagttcaaaagcattgcttttataatgaacttagaaaaacgtatgtgtgtgtgtttaattagaataaaattcctctaggcagatttcaggagctcc

SEQ ID NO: 301125 - DNA, 591 bp, Homo sapiens
gcggtcgactactactactaaattcgcggccgcgtcgactgcctccaagttcaaaacttattggaatgttgagagtgtggttacgaaatacgttaggaggacaaaaggaatgtgtaagtctttaatgccgatatcttcagaaaacctaagcaaacttacaggtcctgctgaaactgcccactctgcaagaagaaatcatgatatagctttgccatgtggcagatctacatgtctagagaacactgtgctctattaccattatggataaagatgagatggtttctagagatggtttctactggctgccagaatctagagcaaagccatccccgctcctggttggtcacagaatgactgacaaagacatcgattgatatgcttctttgtgttatttccctcccaagtaaatgtttgtccttgggtccattttctatgcttgtaactgtcttctagcagtgagccaaatgtaaaatagtgaataaagtcattattaggaagttcaaaagcattgcttttataatgaacttagaaaaacgtatgtgtgtgtgtttaattagaataaaattcctctaggcagatttcaggagctcc

SEQ ID NO: 301126 - DNA, 552 bp, Homo sapiens
gcggtcgactactactactaaattcgcggccgcgtcgacggttacgaaatacgttaggaggacaaaaggaatgtgtaagtctttaatgccgatatcttcagaaaacctaagcaaacttacaggtcctgctgaaactgcccactctgcaagaagaaatcatgatatagctttgccatgtggcagatctacatgtctagagaacactgtgctctattaccattatggataaagatgagatggtttctagagatggtttctactggctgccagaatctagagcaaagccatccccgctcctggttggtcacagaatgactgacaaagacatcgattgatatgcttctttgtgttatttccctcccaagtaaatgtttgtccttgggtccattttctatgcttgtaactgtcttctagcagtgagccaaatgtaaaatagtgaataaagtcattattaggaagttcaaaagcattgcttttataatgaacttagaaaaacgtatgtgtgtgtgtttaattagaataaaattcctctaggcagatttcaggagctcc

SEQ ID NO: 301127 - DNA, 516 bp, Homo sapiens
gcggtcgactactactactaaattcgcggccgcgtcgactaagtctttaatgccgatatcttcagaaaacctaagcaaacttacaggtcctgctgaaactgcccactctgcaagaagaaatcatgatatagctttgccatgtggcagatctacatgtctagagaacactgtgctctattaccattatggataaagatgagatggtttctagagatggtttctactggctgccagaatctagagcaaagccatccccgctcctggttggtcacagaatgactgacaaagacatcgattgatatgcttctttgtgttatttccctcccaagtaaatgtttgtccttgggtccattttctatgcttgtaactgtcttctagcagtgagccaaatgtaaaatagtgaataaagtcattattaggaagttcaaaagcattgcttttataatgaacttagaaaaacgtatgtgtgtgtgtttaattagaataaaattcctctaggcagatttcaggagctcc

SEQ ID NO: 301128 - DNA, 661 bp, Homo sapiens
gcggtcgactactactactaaattcgcggccgcgtcgaccggaattgtactttgagaagggggagtactttgtggagatgtactaccggaatgagacgcagcacgagccgtatcccctcatgctacctggctgcagccccagctgtcctctggagaggtttgctgagctggttggccctgtgatccctcaagactggtccacggagtgtatgaccacaaacagccatcaaggtcctgctgaaactgcccactctgcaagaagaaatcatgatatagctttgccatgtggcagatctacatgtctagagaacactgtgctctattaccattatggataaagatgagatggtttctagagatggtttctactggctgccagaatctagagcaaagccatccccgctcctggttggtcacagaatgactgacaaagacatcgattgatatgcttctttgtgttatttccctcccaagtaaatgtttgtccttgggtccattttctatgcttgtaactgtcttctagcagtgagccaaatgtaaaatagtgaataaagtcattattaggaagttcaaaagcattgcttttataatgaacttagaaaaacgtatgtgtgtgtgtttaattagaataaaattcctctaggcagatttcaggagctcc

SEQ ID NO: 301129 - DNA, 469 bp, Homo sapiens
gcggtcgactactactactaaattcgcggccgcgtcgacgtcctgctgaaactgcccactctgcaagaagaaatcatgatatagctttgccatgtggcagatctacatgtctagagaacactgtgctctattaccattatggataaagatgagatggtttctagagatggtttctactggctgccagaatctagagcaaagccatccccgctcctggttggtcacagaatgactgacaaagacatcgattgatatgcttctttgtgttatttccctcccaagtaaatgtttgtccttgggtccattttctatgcttgtaactgtcttctagcagtgagccaaatgtaaaatagtgaataaagtcattattaggaagttcaaaagcattgcttttataatgaacttagaaaaacgtatgtgtgtgtgtttaattagaataaaattcctctaggcagatttcaggagctcc

SEQ ID NO: 301130 - DNA, 438 bp, Homo sapiens
gcggtcgactactactactaaattcgcggccgcgtcgacaaatcatgatatagctttgccatgtggcagatctacatgtctagagaacactgtgctctattaccattatggataaagatgagatggtttctagagatggtttctactggctgccagaatctagagcaaagccatccccgctcctggttggtcacagaatgactgacaaagacatcgattgatatgcttctttgtgttatttccctcccaagtaaatgtttgtccttgggtccattttctatgcttgtaactgtcttctagcagtgagccaaatgtaaaatagtgaataaagtcattattaggaagttcaaaagcattgcttttataatgaacttagaaaaacgtatgtgtgtgtgtttaattagaataaaattcctctaggcagatttcaggagctcc

SEQ ID NO: 301131 - DNA, 323 bp, Homo sapiens
gacaaagacatcgattgatatgcttctttgtgttatttccctcccaagtaaatgtttgtccttgggtccattttctatgcttgtaactgtcttctagcagtgagccaaatgtaaaatagtgaataaagtcattattaggaagttcaaaagcattgcttttataatgaacttagaaaaacgtatgtgtgtgtgtttaattagaataaaattcctctaggcagatttcaggagctcctccctttgtgtttggggtttttgttttagtataacaagatggaaaatattaatataaagtaaaatgatttgactggcttaaatgaaca

SEQ ID NO: 301132 - DNA, 831 bp, Homo sapiens
gacagggattcaccatattggtcaggctggtctctaacacttgctcagtgatccgcccgtctcggcctcccaaagtgctgggattacagatgtgagccatggcacctggtcagatgtctgctgtgatctttttcactggataggtcaagcacttttccacattgcctcatagtcttcattatgatcacctttaatgggctgggggaaagtctgtcaagtggctgtcccatacgttcacttaccccttaaatagtgtcatagtatatagcaagggtttcattgccagctgttttctcatccattcccatggtttccgctactacctatacaacagtgacacagatttatttttctagttctctccttcccaagctgcagatgcttcccagtgaggggctgcccccagctgagccagtccagtataatcagaccttcctgatggtccagccccttccttcctgagcgccatgcagcgtctcctcattcacccctgttcctcagctttggcagggtcgatatgattcacttaccacccaagctaacaactgaaatcatactcctgttcccccatcctccacgtgcatgtcagtctgtgtcctaaatgccacttggatccatccctgctcagcattctggctgctgctgttttaagtcccacaatttctcacctggaagatactgcaacagctacccaatgggtcaccttgcctccaggcctgcgcccccaactccacttgcggccaggatctgtacttagagtcaggccgacatgtgtctctactggacattttgtttttttttttttttagaaggagttttctaccctgtcac

SEQ ID NO: 301133 - DNA, 935 bp, Homo sapiens
tgctgcagggtgctgtatccatctacgtgcgctccagacttggtcgatacagttgacactgtcaatcctttaatcttgatcgacctgtctactcatcaagcctgagaccatcggtccaggaaagaggccagcccacgatcatagctcaagtgcacagttgagcgcatacacagtcactccttcaacacaagctatgtgagccatggcacctggtcagatgtctgctgtgatctttttcactggataggtcaagcacttttccacattgcctcatagtcttcattatgatcacctttaatgggctgggggaaagtctgtcaagtggctgtcccatacgttcacttaccccttaaatagtgtcatagtatatagcaagggtttcattgccagctgttttctcatccattcccatggtttccgctactacctatacaacagtgacacagatttatttttctagttctctccttcccaagctgcagatgcttcccagtgaggggctgcccccagctgagccagtccagtataatcagaccttcctgatggtccagccccttccttcctgagcgccatgcagcgtctcctcattcacccctgttcctcagctttggcagggtcgatatgattcacttaccacccaagctaacaactgaaatcatactcctgttcccccatcctccacgtgcatgtcagtctgtgtcctaaatgccacttggatccatccctgctcagcattctggctgctgctgttttaagtcccacaatttctcacctggaagatactgcaacagctacccaatgggtcaccttgcctccaggcctgcgcccccaactccacttgcggccaggatctgtacttagagtcaggccgacatgtgtctctactggacattttgtttttttttttttttagaaggagttttctaccctgtcac

SEQ ID NO: 301134 - DNA, 4436 bp, Homo sapiens
gcgagacaggaacttctttccccttctctgtgtcaggatcgcagaaagtatgtcccttctctcaccatgagctggctctccagttcccagggagtggtactaacagcctaccaccccagcggcaaggaccaggccgtcgggaacagccatgcaaaggcaggggaggaagccacctcgagtcgcagatatggccagtacactatgaaccaggaaagcaccaccatcaaagttatggagaagcctccatttgatcgatcaatttcccaggattctttggatgaactatctatggaagactattggatagaactagaaaacatcaagaaatctagtgaaaacagccaagaagatcaagaggtggttgttgtcaaagagcctgatgagggagaattggaagaagagtggcttaaagaggccggtttatccaatctcttcggagagtctgctggagatccacaggaaagcattgtgtttttatcaacattgacgcggacccaggcagcagcagttcagaagcgagtagagacggtctcccagaccttgaggaaaaaaaacaaacagtaccagattcctgacgtcagagacatatttgctcaacagagagaatcaaaagaaacagctccaggtggcactgaatcgcagtcacttagaacaaatgaaaacaaataccaaggaagagatgacgaggcatctaaccttgttggtgaagagaagctgatcccacctgaggagacgcctgcccctgaaacagacatcaacctggaggtatcatttgccgagcaagcactcaatcagaaagagagctccaaggagaaaatccagaagagcaaaggcgatgatgccacattacctagtttcagattgccaaaagacaaaacgggtaccacaaggattggtgacctcgcaccccaggacatgaagaaagtttgccatttagccctaattgagctgactgccctctatgatgtattgggtattgagctgaaacaacaaaaagctgtgaaaatcaaaacaaaagattctggtcttttttgcgttccattgacagcgctattagaacaagatcagaggaaagtaccaggaatgcgaatacccttgatctttcaaaaactgatttctcgaattgaagagagaggtttggaaacagaaggcctcttacggatccctggagctgccattagaatcaagaatctttgccaagaactagaagcaaagttttatgaagggacttttaattgggaaagtgtcaaacagcatgatgccgccagcctgctgaagctcttcattcgggagttgccccagccactgctcagtgtggagtatctcaaagcctttcaggctgtccagaatcttccaaccaagaagcagcaactacaggctttgaaccttcttgtcatcctcctacctgatgcaaacagggacacactgaaggcccttcttgaatttctccaaagagtaatagataataaagaaaaaaataaaatgacagtcatgaatgtagcaatggtcatggccccgaatctctttatgtgtcatgcattgggattgaagtccagtgaacagcgagaatttgtaatggcagctgggacagcaaataccatgcacttattgattaagtaccaaaaacttctgtggacaattcccaagtttattgtaaaccaagtgaggaagcaaaacacggaaaatcataaaaaggataaaagagccatgaagaaattgctgaagaaaatggcttatgaccgagaaaaatatgaaaagcaagataagagtacaaatgatgctgacgttcctcagggagtgattcgagtgcaagctccccatctttcgaaagtttccatggcaatacagctaactgaagaactaaaagccagtgatgtacttgccaggtttctcagccaagaaagtggggttgcccagactctcaagaaaggagaagtttttttgtatgaaattggaggaaatattggggaacgctgccttgatgatgacacttacatgaaggatttatatcagcttaacccaaatgctgagtgggttataaagtcaaagccattgtagaagacttaacaagctgcagataaccatgtggacttctgtcataattcttgctgagtcaagagtgtaaataaaagaaatggcaggactcatattattcagttgtacccaagtatttaaaaatgactctcttaagccttaaaaagtcatagatttgtgctgctgccagaattatattaattattattaatgttattattagaaaaaaaatttctggagtgagagtaaagaggcttaattagtttgtgggcagttttcatatgctctgtgaaatgtgtccagatgtgacatagtttttttttttaatatgtggaaatgtcttctcttcccattcttttctcctaaaatcatatatactgtaatatatgctctctcacctctattacctcctcacatctaccctttcccagttaggtttgctttttgaccaaaaagataacaaataccaggtatggcaagttgtgaagacagcacattaaaacatacctaatttcacagtattcctgtcacgacagaatgttagtattcatctctttgaatcatttgctcaaataataacattccaccttttcctgctgtatcacaggaagtgatttgcattttttttcagttcatctgacttatgttcacagaaccgtatcagcgaccaagaaaataggactgtcagaagctgccagttattactgaaccattaaatacttatatactaagaataaataaaatatacccatgtgaaataataattggattatggataacaagagagtgaaagccaaagcactttctgtctactgtactcttctaaatggaattttaaaagtcatagctggctttacgtgttgtcattattagcattataaatatgcatgatagtataatccagtaatggttgaagaatgtattttacttaaagagggatttttttttttaagtcctgaataagtctactggaagaattattcttctgggtgaaaaagcttttgtttgtgttcttattttaaataatcggagtcaatttattaaaatgttcttgaaagtactattcccagggattttaatgcacaaaccatattgtgacaagagatgagcctctgtactgtaaataagaaatgaagtagagaaatgttaaatattttatgagtttagaatatagtaaataaaaggtgatgtaaatgaatgctgcacaaacggtgttcatgatacttttagtagtactttaggaaaaactacacattctcagaagctcttgatgtctctaatgaagggggggaatgctgttaatgagaacagtcataaatttttagcatataattacaagaacagcctgtggatatgatcacttaaatgattttgtggtgattcgtgccattgcttttttatttaaaagaaaattttgtaattaaatgcctttttctaaattatcttctcttggaatcattacttttaatcctatgtgtttatgagtatttttgctttttttttattaatattgagaaatggacttttttgttattaaaagtcacctctattttctattttctttgtaatttttaaagtaggaagatgtcagagatgtaaatatgttttcgtctttagtttttttccttttacaaatttttattcttcaggattttcaaaatacagtttagtctgtttctttgacaatatgtattaatttcccaattagcaaaatggtacttattagtgggttgaaaacaattaataatataaaagaaaaattaagtgcttaaaacattttaggagtatacaacttcaaaaaaaaagatagcagtgaggataatgatttaagtaaaaggttgtctgaagcatatgccaactaaatttcgcaacgtttgctacctacctgaaaaggagggtcaggagggagacacaacatatttttgatcatgaaaaagtatcttaattttaaaaaagtgaaaatgccattttattttgaatcccttttagaactcacgacccaagttcatcaatgttgaataatatcacgtttaaataacaaaaaaatatggactttaaaaaatctcaaattttttagagacagggtcttgctctgttttccagattggagtacagcagtgcattcgcggctaactgcagcctcaagcactggggctcaagcaaacctcctgcctcagcctcgtgagtagctaggaccacaggtgcatgccaccatgcctggctctaaagagaaaaaaaacttgataccatagagccttgaatataaatatcctgatgttaacctactgcttttgctgtgattttttttccttagtgagttttaaatctcaggctagatttttatttgtttttctgtgtgtgtatgagacaaaataaaaataaatatatttgcaaaaaaaaaa

SEQ ID NO: 301135 - DNA, 3471 bp, Homo sapiens
gcgagacaggaacttctttccccttctctgtgtcaggatcgcagaaagtatgtcccttctctcaccatgagctggctctccagttcccagggagtggtactaacagcctaccaccccagcggcaaggaccaggccgtcgggaacagccatgcaaaggcaggggaggaagccacctcgagtcgcagatatggccagtacactatgaaccaggaaagcaccaccatcaaagttatggagaagcctccatttgatcgatcaatttcccaggattctttggatgaactatctatggaagactattggatagaactagaaaacatcaagaaatctagtgaaaacagccaagaagatcaagaggtggttgttgtcaaagagcctgatgagggagaattggaagaagagtggcttaaagaggccggtttatccaatctcttcggagagtctgctggagatccacaggaaagcattgtgtttttatcaacattgacgcggacccaggcagcagcagttcagaagcgagtagagacggtctcccagaccttgaggaaaaaaaacaaacagtaccagattcctgacgtcagagacatatttgctcaacagagagaatcaaaagaaacagctccaggtggcactgaatcgcagtcacttagaacaaatgaaaacaaataccaaggaagagatgacgaggcatctaaccttgttggtgaagagaagctgatcccacctgaggagacgcctgcccctgaaacagacatcaacctggaggtatcatttgccgagcaagcactcaatcagaaagagagctccaaggagaaaatccagaagagcaaaggcgatgatgccacattacctagtttcagattgccaaaagacaaaacgggtaccacaaggattggtgacctcgcaccccaggacatgaagaaagtttgccatttagccctaattgagctgactgccctctatgatgtattgggtattgagctgaaacaacaaaaagctgtgaaaatcaaaacaaaagattctggtcttttttgcgttccattgacagcgctattagaacaagatcagaggaaagtaccaggaatgcgaatacccttgatctttcaaaaactgatttctcgaattgaagagagaggtttggaaacagaaggcctcttacggatccctggagctgccattagaatcaagaatctttgccaagaactagaagcaaagttttatgaagggacttttaattgggaaagtgtcaaacagcatgatgccgccagcctgctgaagctcttcattcgggagttgccccagccactgctcagtgtggagtatctcaaagcctttcaggctgtccagaatcttccaaccaagaagcagcaactacaggctttgaaccttcttgtcatcctcctacctgatgcaaacagggacacactgaaggcccttcttgaatttctccaaagagtaatagataataaagaaaaaaataaaatgacagtcatgaatgtagcaatggtcatggccccgaatctctttatgtgtcatgcattgggattgaagtccagtgaacagcgagaatttgtaatggcagctgggacagcaaataccatgcacttattgattaagtaccaaaaacttctgtggacaattcccaagtttattgtaaaccaagtgaggaagcaaaacacggaaaatcataaaaaggataaaagagccatgaagaaattgctgaagaaaatggcttatgaccgagaaaaatatgaaaagcaagataagagtacaaatgatgctgacgttcctcagggagtgattcgagtgcaagctccccatctttcgaaagtttccatggcaatacagctaactgaagaactaaaagccagtgatgtacttgccaggtttctcagccaagaaagtggggttgcccagactctcaagaaaggagaagtttttttgtatgaaattggaggaaatattggggaacgctgccttgatgatgacacttacatgaaggatttatatcagcttaacccaaatgctgagtgggttataaagtcaaagccattgtagaagacttaacaagctgcagataaccatgtggacttctgtcataattcttgctgagtcaagagtgtaaataaaagaaatggcaggactcatattattcagttgtacccaagtatttaaaaatgactctcttaagccttaaaaagtcatagatttgtgctgctgccagaattatattaattattattaatgttattattagaaaaaaaatttctggagtgagagtaaagaggcttaattagtttgtgggcagttttcatatgctctgtgaaatgtgtccagatgtgacatagtttttttttttaatatgtggaaatgtcttctcttcccattcttttctcctaaaatcatatatactgtaatatatgctctctcacctctattacctcctcacatctaccctttcccagttaggtttgctttttgaccaaaaagataacaaataccaggtatggcaagttgtgaagacagcacattaaaacatacctaatttcacagtattcctgtcacgacagaatgttagtattcatctctttgaatcatttgctcaaataataacattccaccttttcctgctgtatcacaggaagtgatttgcattttttttcagttcatctgacttatgttcacagaaccgtatcagcgaccaagaaaataggactgtcagaagctgccagttattactgaaccattaaatacttatatactaagaataaataaaatatacccatgtgaaataataattggattatggataacaagagagtgaaagccaaagcactttctgtctactgtactcttctaaatggaattttaaaagtcatagctggctttacgtgttgtcattattagcattataaatatgcatgatagtataatccagtaatggttgaagaatgtattttacttaaagagggatttttttttttaagtcctgaataagtctactggaagaattattcttctgggtgaaaaagcttttgtttgtgttcttattttaaataatcggagtcaatttattaaaatgttcttgaaagtactattcccagggattttaatgcacaaaccatattgtgacaagagatgagcctctgtactgtaaataagaaatgaagtagagaaatgttaaatattttatgagtttagaatatagtaaataaaaggtgatgtaaatgaatgctgcacaaacggtgttcatgatacttttagtagtactttaggaaaaactacacattctcagaagctcttgatgtctctaatgaagggggggaatgctgttaatgagaacagtcataaatttttagcatataattacaagaacagcctgtggatatgatcacttaaatgattttgtggtgattcgtgccattgcttttttatttaaaagaaaattttgtaattaaatgcctttttcta

SEQ ID NO: 301136 - DNA, 2744 bp, Homo sapiens
gaggcctgctttccatcagggtagcaattccctggatttgagtaggagccgttccttttgcatggaacatggaccatctactttgctgctgacgttcctcagggagtgattcgagtgcaagctccccatctttcgaaagtttccatggcaatacagctaactgaagaactaaaagccagtgatgtacttgccaggtttctcagccaagaaagtggggttgcccagactctcaagaaaggagaagtttttttgtatgaaattggaggaaatattggggaacgctgccttgatgatgacacttacatgaaggatttatatcagcttaacccaaatgctgagtgggttataaagtcaaagccattgtagaagacttaacaagctgcagataaccatgtggacttctgtcataattcttgctgagtcaagagtgtaaataaaagaaatggcaggactcatattattcagttgtacccaagtatttaaaaatgactctcttaagccttaaaaagtcatagatttgtgctgctgccagaattatattaattattattaatgttattattagaaaaaaaatttctggagtgagagtaaagaggcttaattagtttgtgggcagttttcatatgctctgtgaaatgtgtccagatgtgacatagtttttttttttaatatgtggaaatgtcttctcttcccattcttttctcctaaaatcatatatactgtaatatatgctctctcacctctattacctcctcacatctaccctttcccagttaggtttgctttttgaccaaaaagataacaaataccaggtatggcaagttgtgaagacagcacattaaaacatacctaatttcacagtattcctgtcacgacagaatgttagtattcatctctttgaatcatttgctcaaataataacattccaccttttcctgctgtatcacaggaagtgatttgcattttttttcagttcatctgacttatgttcacagaaccgtatcagcgaccaagaaaataggactgtcagaagctgccagttattactgaaccattaaatacttatatactaagaataaataaaatatacccatgtgaaataataattggattatggataacaagagagtgaaagccaaagcactttctgtctactgtactcttctaaatggaattttaaaagtcatagctggctttacgtgttgtcattattagcattataaatatgcatgatagtataatccagtaatggttgaagaatgtattttacttaaagagggatttttttttttaagtcctgaataagtctactggaagaattattcttctgggtgaaaaagcttttgtttgtgttcttattttaaataatcggagtcaatttattaaaatgttcttgaaagtactattcccagggattttaatgcacaaaccatattgtgacaagagatgagcctctgtactgtaaataagaaatgaagtagagaaatgttaaatattttatgagtttagaatatagtaaataaaaggtgatgtaaatgaatgctgcacaaacggtgttcatgatacttttagtagtactttaggaaaaactacacattctcagaagctcttgatgtctctaatgaagggggggaatgctgttaatgagaacagtcataaatttttagcatataattacaagaacagcctgtggatatgatcacttaaatgattttgtggtgattcgtgccattgcttttttatttaaaagaaaattttgtaattaaatgcctttttctaaattatcttctcttggaatcattacttttaatcctatgtgtttatgagtatttttgctttttttttattaatattgagaaatggacttttttgttattaaaagtcacctctattttctattttctttgtaatttttaaagtaggaagatgtcagagatgtaaatatgttttcgtctttagtttttttccttttacaaatttttattcttcaggattttcaaaatacagtttagtctgtttctttgacaatatgtattaatttcccaattagcaaaatggtacttattagtgggttgaaaacaattaataatataaaagaaaaattaagtgcttaaaacattttaggagtatacaacttcaaaaaaaaagatagcagtgaggataatgatttaagtaaaaggttgtctgaagcatatgccaactaaatttcgcaacgtttgctacctacctgaaaaggagggtcaggagggagacacaacatatttttgatcatgaaaaagtatcttaattttaaaaaagtgaaaatgccattttattttgaatcccttttagaactcacgacccaagttcatcaatgttgaataatatcacgtttaaataacaaaaaaatatggactttaaaaaatctcaaattttttagagacagggtcttgctctgttttccagattggagtacagcagtgcattcgcggctaactgcagcctcaagcactggggctcaagcaaacctcctgcctcagcctcgtgagtagctaggaccacaggtgcatgccaccatgcctggctctaaagagaaaaaaaacttgataccatagagccttgaatataaatatcctgatgttaacctactgcttttgctgtgattttttttccttagtgagttttaaatctcaggctagatttttatttgtttttctgtgtgtgtatgagacaaaataaaaataaatatatttgcaaaaaaaaaa

SEQ ID NO: 301137 - DNA, 2748 bp, Homo sapiens
acacacacacacacacacacccctacacccctacccctacctctacctctcgtgcggagactctagtcgcctactgaatatataatctatagctgacgttcctcagggagtgattcgagtgcaagctccccatctttcgaaagtttccatggcaatacagctaactgaagaactaaaagccagtgatgtacttgccaggtttctcagccaagaaagtggggttgcccagactctcaagaaaggagaagtttttttgtatgaaattggaggaaatattggggaacgctgccttgatgatgacacttacatgaaggatttatatcagcttaacccaaatgctgagtgggttataaagtcaaagccattgtagaagacttaacaagctgcagataaccatgtggacttctgtcataattcttgctgagtcaagagtgtaaataaaagaaatggcaggactcatattattcagttgtacccaagtatttaaaaatgactctcttaagccttaaaaagtcatagatttgtgctgctgccagaattatattaattattattaatgttattattagaaaaaaaatttctggagtgagagtaaagaggcttaattagtttgtgggcagttttcatatgctctgtgaaatgtgtccagatgtgacatagtttttttttttaatatgtggaaatgtcttctcttcccattcttttctcctaaaatcatatatactgtaatatatgctctctcacctctattacctcctcacatctaccctttcccagttaggtttgctttttgaccaaaaagataacaaataccaggtatggcaagttgtgaagacagcacattaaaacatacctaatttcacagtattcctgtcacgacagaatgttagtattcatctctttgaatcatttgctcaaataataacattccaccttttcctgctgtatcacaggaagtgatttgcattttttttcagttcatctgacttatgttcacagaaccgtatcagcgaccaagaaaataggactgtcagaagctgccagttattactgaaccattaaatacttatatactaagaataaataaaatatacccatgtgaaataataattggattatggataacaagagagtgaaagccaaagcactttctgtctactgtactcttctaaatggaattttaaaagtcatagctggctttacgtgttgtcattattagcattataaatatgcatgatagtataatccagtaatggttgaagaatgtattttacttaaagagggatttttttttttaagtcctgaataagtctactggaagaattattcttctgggtgaaaaagcttttgtttgtgttcttattttaaataatcggagtcaatttattaaaatgttcttgaaagtactattcccagggattttaatgcacaaaccatattgtgacaagagatgagcctctgtactgtaaataagaaatgaagtagagaaatgttaaatattttatgagtttagaatatagtaaataaaaggtgatgtaaatgaatgctgcacaaacggtgttcatgatacttttagtagtactttaggaaaaactacacattctcagaagctcttgatgtctctaatgaagggggggaatgctgttaatgagaacagtcataaatttttagcatataattacaagaacagcctgtggatatgatcacttaaatgattttgtggtgattcgtgccattgcttttttatttaaaagaaaattttgtaattaaatgcctttttctaaattatcttctcttggaatcattacttttaatcctatgtgtttatgagtatttttgctttttttttattaatattgagaaatggacttttttgttattaaaagtcacctctattttctattttctttgtaatttttaaagtaggaagatgtcagagatgtaaatatgttttcgtctttagtttttttccttttacaaatttttattcttcaggattttcaaaatacagtttagtctgtttctttgacaatatgtattaatttcccaattagcaaaatggtacttattagtgggttgaaaacaattaataatataaaagaaaaattaagtgcttaaaacattttaggagtatacaacttcaaaaaaaaagatagcagtgaggataatgatttaagtaaaaggttgtctgaagcatatgccaactaaatttcgcaacgtttgctacctacctgaaaaggagggtcaggagggagacacaacatatttttgatcatgaaaaagtatcttaattttaaaaaagtgaaaatgccattttattttgaatcccttttagaactcacgacccaagttcatcaatgttgaataatatcacgtttaaataacaaaaaaatatggactttaaaaaatctcaaattttttagagacagggtcttgctctgttttccagattggagtacagcagtgcattcgcggctaactgcagcctcaagcactggggctcaagcaaacctcctgcctcagcctcgtgagtagctaggaccacaggtgcatgccaccatgcctggctctaaagagaaaaaaaacttgataccatagagccttgaatataaatatcctgatgttaacctactgcttttgctgtgattttttttccttagtgagttttaaatctcaggctagatttttatttgtttttctgtgtgtgtatgagacaaaataaaaataaatatatttgcaaaaaaaaaa

SEQ ID NO: 301138 - DNA, 3244 bp, Homo sapiens
gcgagacaggaacttctttccccttctctgtgtcaggatcgcagaaagtatgtcccttctctcaccatgagctggctctccagttcccagggagtggtactaacagcctaccaccccagcggcaaggaccaggccgtcgggaacagccatgcaaaggcaggggaggaagccacctcgagtcgcagatatggccagtacactatgaaccaggaaagcaccaccatcaaagttatggagaagcctccatttgatcgatcaatttcccaggattctttggatgaactatctatggaagactattggatagaactagaaaacatcaagaaatctagtgaaaacagccaagaagatcaagaggtggttgttgtcaaagagcctgatgagggagaattggaagaagagtggcttaaagaggccggtttatccaatctcttcggagagtctgctggagatccacaggaaagcattgtgtttttatcaacattgacgcggacccaggcagcagcagttcagaagcgagtagagacggtctcccagaccttgaggaaaaaaaacaaacagtaccagattcctgacgtcagagacatatttgctcaacagagagaatcaaaagaaacagctccaggtggcactgaatcgcagtcacttagaacaaatgaaaacaaataccaaggaagagatgacgaggcatctaaccttgttggtgaagagaagctgatcccacctgaggagacgcctgcccctgaaacagacatcaacctggaggtatcatttgccgagcaagcactcaatcagaaagagagctccaaggagaaaatccagaagagcaaaggcgatgatgccacattacctagtttcagattgccaaaagacaaaacgggtaccacaaggattggtgacctcgcaccccaggacatgaagaaagtttgccatttagccctaattgagctgactgccctctatgatgtattgggtattgagctgaaacaacaaaaagctgtgaaaatcaaaacaaaagattctggtcttttttgcgttccattgacagcgctattagaacaagatcagaggaaagtaccaggaatgcgaatacccttgatctttcaaaaactgatttctcgaattgaagagagaggtttggaaacagaaggcctcttacggatccctggagctgccattagaatcaagaatctttgccaagaactagaagcaaagttttatgaagggacttttaattgggaaagtgtcaaacagcatgatgccgccagcctgctgaagctcttcattcgggagttgccccagccactgctcagtgtggagtatctcaaagcctttcaggctgtccagaatcttccaaccaagaagcagcaactacaggctttgaaccttcttgtcatcctcctacctgatgcaaacagggacacactgaaggcccttcttgaatttctccaaagagtaatagataataaagaaaaaaataaaatgacagtcatgaatgtagcaatggtcatggccccgaatctctttatgtgtcatgcattgggattgaagtccagtgaacagcgagaatttgtaatggcagctgggacagcaaataccatgcacttattgattaagtaccaaaaacttctgtggacaattcccaagtttattgtaaaccaagtgaggaagcaaaacacggaaaatcataaaaaggataaaagagccatgaagaaattgctgaagaaaatggcttatgaccgagaaaaatatgaaaagcaagataagagtacaaatgatgctgacgttcctcagggagtgattcgagtgcaagctccccatctttcgaaagtttccatggcaatacagctaactgaagaactaaaagccagtgatgtacttgccaggtttctcagccaagaaagtggggttgcccagactctcaagaaaggagaagtttttttgtatgaaattggaggaaatattggggaacgctgccttgatgatgacacttacatgaaggatttatatcagcttaacccaaatgctgagtgggttataaagtcaaagccattgtagaagacttaacaagctgcagataaccatgtggacttctgtcataattcttgctgagtcaagagtgtaaataaaagaaatggcaggactcatattattcagttgtacccaagtatttaaaaatgactctcttaagccttaaaaagtcatagatttgtgctgctgccagaattatattaattattattaatgttattattagaaaaaaaatttctggagtgagagtaaagaggcttaattagtttgtgggcagttttcatatgctctgtgaaatgtgtccagatgtgacatagtttttttttttaatatgtggaaatgtcttctcttcccattcttttctcctaaaatcatatatactgtaatatatgctctctcacctctattacctcctcacatctaccctttcccagttaggtttgctttttgaccaaaaagataacaaataccaggtatggcaagttgtgaagacagcacattaaaacatacctaatttcacagtattcctgtcacgacagaatgttagtattcatctctttgaatcatttgctcaaataataacattccaccttttcctgctgtatcacaggaagtgatttgcattttttttcagttcatctgacttatgttcacagaaccgtatcagcgaccaagaaaataggactgtcagaagctgccagttattactgaaccattaaatacttatatactaagaataaataaaatatacccatgtgaaataataattggattatggataacaagagagtgaaagccaaagcactttctgtctactgtactcttctaaatggaattttaaaagtcatagctggctttacgtgttgtcattattagcattataaatatgcatgatagtataatccagtaatggttgaagaatgtattttacttaaagagggatttttttttttaagtcctgaataagtctactggaagaattattcttctgggtgaaaaagcttttgtttgtgttcttattttaaataatcggagtcaatttattaaaatgttcttgaaagtactattcccagggattttaatgcacaaaccatattgtgacaagagatgagcctctgtactgtaaataagaaatgaagtagagaaatgttaaatattttatgagtttagaatatagtaaataaaaggtgatgtaaatgaatgctgcacaaac

SEQ ID NO: 301139 - DNA, 2072 bp, Homo sapiens
gcgagacaggaacttctttccccttctctgtgtcaggatcgcagaaagtatgtcccttctctcaccatgagctggctctccagttcccagggagtggtactaacagcctaccaccccagcggcaaggaccaggccgtcgggaacagccatgcaaaggcaggggaggaagccacctcgagtcgcagatatggccagtacactatgaaccaggaaagcaccaccatcaaagttatggagaagcctccatttgatcgatcaatttcccaggattctttggatgaactatctatggaagactattggatagaactagaaaacatcaagaaatctagtgaaaacagccaagaagatcaagaggtggttgttgtcaaagagcctgatgagggagaattggaagaagagtggcttaaagaggccggtttatccaatctcttcggagagtctgctggagatccacaggaaagcattgtgtttttatcaacattgacgcggacccaggcagcagcagttcagaagcgagtagagacggtctcccagaccttgaggaaaaaaaacaaacagtaccagattcctgacgtcagagacatatttgctcaacagagagaatcaaaagaaacagctccaggtggcactgaatcgcagtcacttagaacaaatgaaaacaaataccaaggaagagatgacgaggcatctaaccttgttggtgaagagaagctgatcccacctgaggagacgcctgcccctgaaacagacatcaacctggaggtatcatttgccgagcaagcactcaatcagaaagagagctccaaggagaaaatccagaagagcaaaggcgatgatgccacattacctagtttcagattgccaaaagacaaaacgggtaccacaaggattggtgacctcgcaccccaggacatgaagaaagtttgccatttagccctaattgagctgactgccctctatgatgtattgggtattgagctgaaacaacaaaaagctgtgaaaatcaaaacaaaagattctggtcttttttgcgttccattgacagcgctattagaacaagatcagaggaaagtaccaggaatgcgaatacccttgatctttcaaaaactgatttctcgaattgaagagagaggtttggaaacagaaggcctcttacggatccctggagctgccattagaatcaagaatctttgccaagaactagaagcaaagttttatgaagggacttttaattgggaaagtgtcaaacagcatgatgccgccagcctgctgaagctcttcattcgggagttgccccagccactgctcagtgtggagtatctcaaagcctttcaggctgtccagaatcttccaaccaagaagcagcaactacaggctttgaaccttcttgtcatcctcctacctgatgcaaacagggacacactgaaggcccttcttgaatttctccaaagagtaatagataataaagaaaaaaataaaatgacagtcatgaatgtagcaatggtcatggccccgaatctctttatgtgtcatgcattgggattgaagtccagtgaacagcgagaatttgtaatggcagctgggacagcaaataccatgcacttattgattaagtaccaaaaacttctgtggacaattcccaagtttattgtaaaccaagtgaggaagcaaaacacggaaaatcataaaaaggataaaagagccatgaagaaattgctgaagaaaatggcttatgaccgagaaaaatatgaaaagcaagataagagtacaaatgatgctgacgttcctcagggagtgattcgagtgcaagctccccatctttcgaaagtttccatggcaatacagctaactgaagaactaaaagccagtgatgtacttgccaggtttctcagccaagaaaggggggtggcccagactctcaagaaaggggaagttttttgtgtgaaattggcgggaattatggggggacgctgcctgatgatgaaccttcatgaagggtttttatcagttacccaatgtgggtgggtttaagcaacctgtgaaaattagcgggaaacagggggttggaa

SEQ ID NO: 301140 - DNA, 313 bp, Homo sapiens
atcagggtagcaattccctggatttgagtaggagccgttccttttgcatggaacatggaccatctactttgctgtaagccatgccccctccttcattctgtctggttgctgtagtttcttgactctcctccaaatcatttaaatatgcaatatgaaactatagggcatgaaattgcctgggggtagcttttgtcatttgttaaacagttacttgatatgtgcctactgtgtgccaggaattactgggtacttgaaatataaattattggacaaaacatacaaagatcactgctcttccagagcttaaattcta

SEQ ID NO: 301141 - DNA, 342 bp, Homo sapiens
ctcataaaatccagtttacatgtcattgtaatcagttttatttatatgtgaaacagatgttaaattcggaattgtacctgttacaaatacggaaattagaatgtttctctgtttatgcacagctgatttctcgaattgaagagagaggtttggaaacagaaggcctcttacggatccctggagctgccattagaatcaaggtaatctctgggttctactaatgtaaacattttattgtttatttacacttatgcattttaaaagctaacttgtcctctctaccccttttttccattgttagtaaagtagataaaataaaacaataaaaccttttaccattca

SEQ ID NO: 301142 - DNA, 2543 bp, Homo sapiens
gtgcggagtcaggcgcagcggctccctataagcagaggagctgtccgtgtgctgaaacggcccgagaagctcgcccggagaacggggaggaatatgctgtggagctcctctgccatataaacaaaaagaggaaatctttcaaacatggctgaagcaaagacccactggcttggagcagccctgtctcttatccctttaattttcctcatctctggggctgaagcagcttcatttcagagaaaccagctgcttcagaaagaaccagacctcaggttggaaaatgtccaaaagtttcccagtcctgaaatgatcagggctttggagtacatagaaaacctccgacaacaagctcataaggaagaaagcagcccagattataatccctaccaaggtgtctctgtcccccttcagcaaaaagaaaatggcgatgaaagccacttgcccgagagggattcactgagtgaagaagactggatgagaataatactcgaagctttgagacaggctgaaaatgagcctcagtctgcaccaaaagaaaataagccctatgccttgaattcagaaaagaactttccaatggacatgagtgatgattatgagacacagcagtggccagaaagaaagcttaagcacatgcaattccctcctatgtatgaagagaattccagggataacccctttaaacgcacaaatgaaatagtggaggaacaatatactcctcaaagccttgctacattggaatctgtcttccaagagctggggaaactgacaggaccaaacaaccagaaacgtgagaggatggatgaggagcaaaaactttatacggatgatgaagatgatatctacaaggctaataacattgcctatgaagatgtggtcgggggagaagactggaacccagtagaggagaaaatagagagtcaaacccaggaagaggtgagagacagcaaagagaatatagaaaaaaatgaacaaatcaacgatgagatgaaacgctcagggcagcttggcatccaggaagaagatcttcggaaagagagtaaagaccaactctcagatgatgtctccaaagtaattgcctatttgaaaaggttagtaaatgctgcaggaagtgggaggttacagaatgggcaaaatggggaaagggccaccaggctttttgagaaacctcttgattctcagtctatttatcagctgattgaaatctcaaggaatttacagatacccccagaagacttaattgagatgctcaaaactggggagaagccgaatggatcagtggaaccggagcgggagcttgaccttcctgttgacctagatgacatctcagaggctgacttagaccatccagacctgttccaaaataggatgctctccaagagtggctaccctaaaacacctggtcgtgctgggactgaggccctaccagacgggctcagtgttgaggatattttaaatcttttagggatggagagtgcagcaaatcagaaaacgtcgtattttcccaatccatataaccaggagaaagttctgccaaggctcccttatggtgctggaagatctagatcgaaccagcttcccaaagctgcctggattccacatgttgaaaacagacagatggcatatgaaaacctgaacgacaaggatcaagaattaggtgagtacttggccaggatgctagttaaataccctgagatcattaattcaaaccaagtgaagcgagttcctggtcaaggctcatctgaagatgacctgcaggaagaggaacaaattgagcaggccatcaaagagcatttgaatcaaggcagctctcaggagactgacaagctggccccggtgagcaaaaggttccctgtggggcccccgaagaatgatgataccccaaataggcagtactgggatgaagatctgttaatgaaagtgctggaatacctcaaccaagaaaaggcagaaaagggaagggagcatattgctaagagagcaatggaaaatatgtaagctgctttcattaattaccctactttcattcctcccaccccaagcaaatcccaacatttctcttcagtgtgttgacttctatcctgttaacactgtaatatctttaaatgatgtacaggcagatgaaaccaggtcactggggagtctgcttcatttcctctgagctgttatcttgtgtatggatatgtgtaaatgttatgactccttgataaaaaatttattatgtccattattcaagaaagatatctatgactgtgtttaatagtatatctaatggctgtggcattgttgatgctcacatatgataaaaaagtgtcctataattctattgaaagtttttaatatttattgaattattttgttactgtctgtagtgttttgtggagtactggaccaaaaaaataaagcattataaatatatagttttatttataaggccttttctattgtgtgttttactgttgattaataaatgttatttctggacaaaaaaaaaaaatatgcctggagcgcatacatccatgggcgcggttccgcgggtgggg

SEQ ID NO: 301143 - DNA, 2480 bp, Homo sapiens
cgcgttcttctctatcttcaacactatgtggcggccgcgttttcctcccccccttgcccttttgcgcgaaatctttcaaacatggctgaagcaaagacccactggcttggagcagccctgtctcttatccctttaattttcctcatctctggggctgaagcagcttcatttcagagaaaccagctgcttcagaaagaaccagacctcaggttggaaaatgtccaaaagtttcccagtcctgaaatgatcagggctttggagtacatagaaaacctccgacaacaagctcataaggaagaaagcagcccagattataatccctaccaaggtgtctctgtcccccttcagcaaaaagaaaatggcgatgaaagccacttgcccgagagggattcactgagtgaagaagactggatgagaataatactcgaagctttgagacaggctgaaaatgagcctcagtctgcaccaaaagaaaataagccctatgccttgaattcagaaaagaactttccaatggacatgagtgatgattatgagacacagcagtggccagaaagaaagcttaagcacatgcaattccctcctatgtatgaagagaattccagggataacccctttaaacgcacaaatgaaatagtggaggaacaatatactcctcaaagccttgctacattggaatctgtcttccaagagctggggaaactgacaggaccaaacaaccagaaacgtgagaggatggatgaggagcaaaaactttatacggatgatgaagatgatatctacaaggctaataacattgcctatgaagatgtggtcgggggagaagactggaacccagtagaggagaaaatagagagtcaaacccaggaagaggtgagagacagcaaagagaatatagaaaaaaatgaacaaatcaacgatgagatgaaacgctcagggcagcttggcatccaggaagaagatcttcggaaagagagtaaagaccaactctcagatgatgtctccaaagtaattgcctatttgaaaaggttagtaaatgctgcaggaagtgggaggttacagaatgggcaaaatggggaaagggccaccaggctttttgagaaacctcttgattctcagtctatttatcagctgattgaaatctcaaggaatttacagatacccccagaagacttaattgagatgctcaaaactggggagaagccgaatggatcagtggaaccggagcgggagcttgaccttcctgttgacctagatgacatctcagaggctgacttagaccatccagacctgttccaaaataggatgctctccaagagtggctaccctaaaacacctggtcgtgctgggactgaggccctaccagacgggctcagtgttgaggatattttaaatcttttagggatggagagtgcagcaaatcagaaaacgtcgtattttcccaatccatataaccaggagaaagttctgccaaggctcccttatggtgctggaagatctagatcgaaccagcttcccaaagctgcctggattccacatgttgaaaacagacagatggcatatgaaaacctgaacgacaaggatcaagaattaggtgagtacttggccaggatgctagttaaataccctgagatcattaattcaaaccaagtgaagcgagttcctggtcaaggctcatctgaagatgacctgcaggaagaggaacaaattgagcaggccatcaaagagcatttgaatcaaggcagctctcaggagactgacaagctggccccggtgagcaaaaggttccctgtggggcccccgaagaatgatgataccccaaataggcagtactgggatgaagatctgttaatgaaagtgctggaatacctcaaccaagaaaaggcagaaaagggaagggagcatattgctaagagagcaatggaaaatatgtaagctgctttcattaattaccctactttcattcctcccaccccaagcaaatcccaacatttctcttcagtgtgttgacttctatcctgttaacactgtaatatctttaaatgatgtacaggcagatgaaaccaggtcactggggagtctgcttcatttcctctgagctgttatcttgtgtatggatatgtgtaaatgttatgactccttgataaaaaatttattatgtccattattcaagaaagatatctatgactgtgtttaatagtatatctaatggctgtggcattgttgatgctcacatatgataaaaaagtgtcctataattctattgaaagtttttaatatttattgaattattttgttactgtctgtagtgttttgtggagtactggaccaaaaaaataaagcattataaatatatagttttatttataaggccttttctattgtgtgttttactgttgattaataaatgttatttctggacaaaaaaaaaaaatatgcctggagcgcatacatccatgggcgcggttccgcgggtgggg

SEQ ID NO: 301144 - DNA, 2458 bp, Homo sapiens
  misc_feature (12)..(12): n is a, c, g, or t
ccgcccccgccntttgccaacccccccctagcgctttcccgccacccccccccggctctttcgtctagcgaccgacccactggcttggagcagccctgtctcttatccctttaattttcctcatctctggggctgaagcagcttcatttcagagaaaccagctgcttcagaaagaaccagacctcaggttggaaaatgtccaaaagtttcccagtcctgaaatgatcagggctttggagtacatagaaaacctccgacaacaagctcataaggaagaaagcagcccagattataatccctaccaaggtgtctctgtcccccttcagcaaaaagaaaatggcgatgaaagccacttgcccgagagggattcactgagtgaagaagactggatgagaataatactcgaagctttgagacaggctgaaaatgagcctcagtctgcaccaaaagaaaataagccctatgccttgaattcagaaaagaactttccaatggacatgagtgatgattatgagacacagcagtggccagaaagaaagcttaagcacatgcaattccctcctatgtatgaagagaattccagggataacccctttaaacgcacaaatgaaatagtggaggaacaatatactcctcaaagccttgctacattggaatctgtcttccaagagctggggaaactgacaggaccaaacaaccagaaacgtgagaggatggatgaggagcaaaaactttatacggatgatgaagatgatatctacaaggctaataacattgcctatgaagatgtggtcgggggagaagactggaacccagtagaggagaaaatagagagtcaaacccaggaagaggtgagagacagcaaagagaatatagaaaaaaatgaacaaatcaacgatgagatgaaacgctcagggcagcttggcatccaggaagaagatcttcggaaagagagtaaagaccaactctcagatgatgtctccaaagtaattgcctatttgaaaaggttagtaaatgctgcaggaagtgggaggttacagaatgggcaaaatggggaaagggccaccaggctttttgagaaacctcttgattctcagtctatttatcagctgattgaaatctcaaggaatttacagatacccccagaagacttaattgagatgctcaaaactggggagaagccgaatggatcagtggaaccggagcgggagcttgaccttcctgttgacctagatgacatctcagaggctgacttagaccatccagacctgttccaaaataggatgctctccaagagtggctaccctaaaacacctggtcgtgctgggactgaggccctaccagacgggctcagtgttgaggatattttaaatcttttagggatggagagtgcagcaaatcagaaaacgtcgtattttcccaatccatataaccaggagaaagttctgccaaggctcccttatggtgctggaagatctagatcgaaccagcttcccaaagctgcctggattccacatgttgaaaacagacagatggcatatgaaaacctgaacgacaaggatcaagaattaggtgagtacttggccaggatgctagttaaataccctgagatcattaattcaaaccaagtgaagcgagttcctggtcaaggctcatctgaagatgacctgcaggaagaggaacaaattgagcaggccatcaaagagcatttgaatcaaggcagctctcaggagactgacaagctggccccggtgagcaaaaggttccctgtggggcccccgaagaatgatgataccccaaataggcagtactgggatgaagatctgttaatgaaagtgctggaatacctcaaccaagaaaaggcagaaaagggaagggagcatattgctaagagagcaatggaaaatatgtaagctgctttcattaattaccctactttcattcctcccaccccaagcaaatcccaacatttctcttcagtgtgttgacttctatcctgttaacactgtaatatctttaaatgatgtacaggcagatgaaaccaggtcactggggagtctgcttcatttcctctgagctgttatcttgtgtatggatatgtgtaaatgttatgactccttgataaaaaatttattatgtccattattcaagaaagatatctatgactgtgtttaatagtatatctaatggctgtggcattgttgatgctcacatatgataaaaaagtgtcctataattctattgaaagtttttaatatttattgaattattttgttactgtctgtagtgttttgtggagtactggaccaaaaaaataaagcattataaatatatagttttatttataaggccttttctattgtgtgttttactgttgattaataaatgttatttctggacaaaaaaaaaaaatatgcctggagcgcatacatccatgggcgcggttccgcgggtgggg

SEQ ID NO: 301145 - DNA, 2274 bp, Homo sapiens
gtgcggagtcaggcgcagcggctccctataagcagaggagctgtccgtgtgctgaaacggcccgagaagctcgcccggagaacggggaggaatatgctgtggagctcctctgccatataaacaaaaagaggaaatctttcaaacatggctgaagcaaagacccactggcttggagcagccctgtctcttatccctttaattttcctcatctctggggctgaagcagcttcatttcagagaaaccagctgcttcagaaagaaccagacctcaggttggaaaatgtccaaaagtttcccagtcctgaaatgatcagggctttggagtacatagaaaacctccgacaacaaaagaaagcttaagcacatgcaattccctcctatgtatgaagagaattccagggataacccctttaaacgcacaaatgaaatagtggaggaacaatatactcctcaaagccttgctacattggaatctgtcttccaagagctggggaaactgacaggaccaaacaaccagaaacgtgagaggatggatgaggagcaaaaactttatacggatgatgaagatgatatctacaaggctaataacattgcctatgaagatgtggtcgggggagaagactggaacccagtagaggagaaaatagagagtcaaacccaggaagaggtgagagacagcaaagagaatatagaaaaaaatgaacaaatcaacgatgagatgaaacgctcagggcagcttggcatccaggaagaagatcttcggaaagagagtaaagaccaactctcagatgatgtctccaaagtaattgcctatttgaaaaggttagtaaatgctgcaggaagtgggaggttacagaatgggcaaaatggggaaagggccaccaggctttttgagaaacctcttgattctcagtctatttatcagctgattgaaatctcaaggaatttacagatacccccagaagacttaattgagatgctcaaaactggggagaagccgaatggatcagtggaaccggagcgggagcttgaccttcctgttgacctagatgacatctcagaggctgacttagaccatccagacctgttccaaaataggatgctctccaagagtggctaccctaaaacacctggtcgtgctgggactgaggccctaccagacgggctcagtgttgaggatattttaaatcttttagggatggagagtgcagcaaatcagaaaacgtcgtattttcccaatccatataaccaggagaaagttctgccaaggctcccttatggtgctggaagatctagatcgaaccagcttcccaaagctgcctggattccacatgttgaaaacagacagatggcatatgaaaacctgaacgacaaggatcaagaattaggtgagtacttggccaggatgctagttaaataccctgagatcattaattcaaaccaagtgaagcgagttcctggtcaaggctcatctgaagatgacctgcaggaagaggaacaaattgagcaggccatcaaagagcatttgaatcaaggcagctctcaggagactgacaagctggccccggtgagcaaaaggttccctgtggggcccccgaagaatgatgataccccaaataggcagtactgggatgaagatctgttaatgaaagtgctggaatacctcaaccaagaaaaggcagaaaagggaagggagcatattgctaagagagcaatggaaaatatgtaagctgctttcattaattaccctactttcattcctcccaccccaagcaaatcccaacatttctcttcagtgtgttgacttctatcctgttaacactgtaatatctttaaatgatgtacaggcagatgaaaccaggtcactggggagtctgcttcatttcctctgagctgttatcttgtgtatggatatgtgtaaatgttatgactccttgataaaaaatttattatgtccattattcaagaaagatatctatgactgtgtttaatagtatatctaatggctgtggcattgttgatgctcacatatgataaaaaagtgtcctataattctattgaaagtttttaatatttattgaattattttgttactgtctgtagtgttttgtggagtactggaccaaaaaaataaagcattataaatatatagttttatttataaggccttttctattgtgtgttttactgttgattaataaatgttatttctggacaaaaaaaaaaaatatgcctggagcgcatacatccatgggcgcggttccgcgggtgggg

SEQ ID NO: 301146 - DNA, 2209 bp, Homo sapiens
gtgcggagtcaggcgcagcggctccctataagcagaggagctgtccgtgtgctgaaacggcccgagaagctcgcccggagaacggggaggaatatgctgtggagctcctctgccatataaacaaaaagaggaaatctttcaaacatggctgaagcaaagacccactggcttggagcagccctgtctcttatccctttaattttcctcatctctggggctgaagcagcttcatttcagagaaaccagctgcttcagaaagaaccagacctcaggttggaaaatgtccaaaagtttcccagtcctgaaatgatcagggctttggagtacatagaaaacctccgacaacaaaacgcacaaatgaaatagtggaggaacaatatactcctcaaagccttgctacattggaatctgtcttccaagagctggggaaactgacaggaccaaacaaccagaaacgtgagaggatggatgaggagcaaaaactttatacggatgatgaagatgatatctacaaggctaataacattgcctatgaagatgtggtcgggggagaagactggaacccagtagaggagaaaatagagagtcaaacccaggaagaggtgagagacagcaaagagaatatagaaaaaaatgaacaaatcaacgatgagatgaaacgctcagggcagcttggcatccaggaagaagatcttcggaaagagagtaaagaccaactctcagatgatgtctccaaagtaattgcctatttgaaaaggttagtaaatgctgcaggaagtgggaggttacagaatgggcaaaatggggaaagggccaccaggctttttgagaaacctcttgattctcagtctatttatcagctgattgaaatctcaaggaatttacagatacccccagaagacttaattgagatgctcaaaactggggagaagccgaatggatcagtggaaccggagcgggagcttgaccttcctgttgacctagatgacatctcagaggctgacttagaccatccagacctgttccaaaataggatgctctccaagagtggctaccctaaaacacctggtcgtgctgggactgaggccctaccagacgggctcagtgttgaggatattttaaatcttttagggatggagagtgcagcaaatcagaaaacgtcgtattttcccaatccatataaccaggagaaagttctgccaaggctcccttatggtgctggaagatctagatcgaaccagcttcccaaagctgcctggattccacatgttgaaaacagacagatggcatatgaaaacctgaacgacaaggatcaagaattaggtgagtacttggccaggatgctagttaaataccctgagatcattaattcaaaccaagtgaagcgagttcctggtcaaggctcatctgaagatgacctgcaggaagaggaacaaattgagcaggccatcaaagagcatttgaatcaaggcagctctcaggagactgacaagctggccccggtgagcaaaaggttccctgtggggcccccgaagaatgatgataccccaaataggcagtactgggatgaagatctgttaatgaaagtgctggaatacctcaaccaagaaaaggcagaaaagggaagggagcatattgctaagagagcaatggaaaatatgtaagctgctttcattaattaccctactttcattcctcccaccccaagcaaatcccaacatttctcttcagtgtgttgacttctatcctgttaacactgtaatatctttaaatgatgtacaggcagatgaaaccaggtcactggggagtctgcttcatttcctctgagctgttatcttgtgtatggatatgtgtaaatgttatgactccttgataaaaaatttattatgtccattattcaagaaagatatctatgactgtgtttaatagtatatctaatggctgtggcattgttgatgctcacatatgataaaaaagtgtcctataattctattgaaagtttttaatatttattgaattattttgttactgtctgtagtgttttgtggagtactggaccaaaaaaataaagcattataaatatatagttttatttataaggccttttctattgtgtgttttactgttgattaataaatgttatttctggacaaaaaaaaaaaatatgcctggagcgcatacatccatgggcgcggttccgcgggtgggg

SEQ ID NO: 301147 - DNA, 5313 bp, Homo sapiens
gtgaattatgattttccttagtcagaagcactcatttttacccatgtagaccatccttaggaattaaatattggttatttaatgtagattataatgggaagctgatttttttcacaatggcatatttcaaggacttggttccaaactgagctgaagcttcccaatgcgttttgtacagtctgggaaaaactgtgctgcactggcccacttttgaaggccatcatgctctgtaatataaggatatcatcttattgctgatatctttggagagtccctagcagacacagaaaatgaatggaggcaaagagtgtgacggaggggacaaggaaggaggtcttccagctatacaagttcctgtgggttggcagcgtcgtgtggatcaaaatggagtgctttatgtcagtcccagtgggtctttgttatcttgcttggagcaggttaaaacatacctgcttactgatggaacatgcaagtgtggcttggaatgtcctcttattcttcccaaggtatttaattttgatcctggagctgctgtgaaacagagaaccgcagaagatgttaaggcagatgaagatgtcacaaagctatgcatacataaaagaaaaattattgcagtggccacacttcataaaagcatggaagccccacatccttctctggtgctcaccagtcccggaggaggaacaaatgcaactccagtagtaccttctcgggcagcaactccaagatcagtaagaaataagtctcatgaaggaattacaaattctgtaatgcctgaatgtaagaatcctttcaagttaatgattggatcatcaaatgccatgggaaggctatatgtacaagaactgcctggaagccaacaacaagaactccaccctgtctacccccgacagagattgggcagcagtgaacatggacagaaatctccattccgtggcagccatggaggcctgcccagcccagcgtcatcaggttcccagatatatggagatggttcaatctctccaaggactgacccacttggaagtcctgatgttttcacaagaagtaatcctggttttcatggagctcccaattctagtcctattcacctgaataggactcctctttctccaccttcagtaatgctacatggttctcctgtacagtcatcctgtgcaatggctggaaggactaatatacctctttccccaaccttgactacaaagagtccagtaatgaaaaaaccaatgtgtaatttttcaactaatatggaaataccacgagcaatgttccaccacaaaccaccccaaggcccacctccccctcctccaccttcttgtgctcttcagaaaaagccattaacatctgagaaagatccacttggcattcttgaccctattcctagtaaaccagtgaatcagaaccctgttatcattaatccaaccagtttccattcaaatgtccactctcaggtacctatgatgaatgtaagcatgcctcctgctgttgttcctttgccaagtaatctcccattgccaactgtaaaacctggtcacatgaatcatgggagtcatgtacaaagagttcagcattcagcttcaacctccctgtccccttctccagtgacatcccccgtgcacatgatggggactggaattggaaggattgaggcatcgccccaaagatcacgctcatcttccacatcatcagatcatggaaatttcatgatgccacctgtaggaccccaggccacttctagtggtattaaggttccacccaggtcaccaaggtcaacaatagggtccccaaggccatcaatgccatcaagcccttctaccaagtccgatggacatcatcagtacaaggatatccctaacccattaattgctggaataagtaatgtactaaataccccaagcagtgcagcttttcctactgcatctgccggaagtagttctgtaaagagtcagcctggtttgctgggaatgcctttaaatcagatcttgaaccagcacaatgctgcctcctttccagcaagtagtttactctcagcagcagccaaagcacagctagcaaatcaaaacaaacttgctggtaacaacagtagcagcagtagcaattctggagctgttgccggcagtggcaacactgaaggacatagcactttaaacaccatgttccctcctactgccaacatgcttctcccaacaggtgaagggcaaagtggtcgagcagcactaagagataagctgatgtctcagcaaaaagacgcattgcggaaaagaaaacaaccacctacgacagtgttgagtttgctcagacagtctcaaatggatagttctgcagttcctaaacctggacctgacttgctaaggaagcagggtcagggttcatttcccatcagttcaatgtctcagttactacagtctatgagttgtcaaagctctcacttgagtagcaatagtaccccgggttgtggggcctcaaatactgctttgccttgctctgctaaccagctgcattttacagatcccagtatgaactctagtgttcttcagaacatacctttaagaggggaagccgtgcactgccacaatgcaaacactaactttgttcacagtaacagtccagtccccaaccaccatcttgcaggtttaataaatcagattcaggctagcgggaactgtgggatgctcagtcagtcgggcatggctttaggaaattccttacatcccaatccacctcagtcaagaatttcaacgtcctccactccagtgataccaaacagcattgttagcagctataatcaaacaagttctgaagcaggcggttcaggaccatcatcctccatagccatagcgggcaccaaccaccctgccatcacaaagacaacatctgttcttcaagatggcgtcatagtcaccactgcagctggaaacccactgcagagtcagctacccattgggagtgattttccttttgttggccaggagcacgcacttcattttccatccaacagcacttcaaacaaccatcttccacaccccttgaaccccagcctcctcagttctctacctatctctttgccagtgaatcaacagcatctcctaaaccagaatctattaaatatcctccagccttcagcaggagaaggtgatatgtcatcaataaacaatactttgagtaaccatcaactgactcatctacagtcgctgttaaacaacaatcagatgtttcctccaaatcagcaacagcagcaacttctccaggggtaccagaatctccaggcgttccaaggacagtccacaattccttgcccagctaacaataaccccatggcttgtctgtttcagaactttcaggtgagaatgcaggaagatgcagctctcctaaacaaaagaataagcactcagcctgggctcacagcacttcctgagaatccaaacactacacttccaccttttcaagatacaccttgtgagttgcaaccgaggattgacccatctcttggtcaacaggtgaaggatggcctcgttgtgggtggcccaggtgatgcttccgtagatgccatttacaaagcagttgtcgatgcagccagcaaaggaatgcaggttgtcatcaccactgcagtcaacagtacaactcagatcagccccattccagctctgagtgccatgagtgccttcactgcctcaattggtgacccattaaatctctccagtgctgtcagtgcggtcattcatggacggaacatgggaggtgttgatcatgatggtaggctgaggaattcaagaggggctcggctgcccaagaatctagaccatgggaaaaatgtgaacgaaggagatgggtttgaatatttcaagtcagcaagttgccacacatccaaaaaacagtgggacggggagcaaagccccagaggggagcgaaacaggtggaagtacgaggaatttttagatcatccaggccatatccacagtagtccttgtcatgaaaggcccaacaatgtctctacactgccatttctgcctggggaacagcacccaatactgttaccaccaagaaactgtccaggggataaaattctagaggaaaatttcaggtataataactacaaaagaactatgatgagttttaaggagagactagagaacactgtggaaagatgtgcacacataaatgggaatagacctcgacagagtcggggatttggagagctgctaagcactgcaaagcaagacctggtcctagaggagcagtctccaagttcctcaaatagtttggaaaattctctggtcaaagactacatccattacaatggagactttaatgccaaaagcgttaatgggtgtgtgcctagcccttcagatgctaaaagcattagtagtgaagatgacctaaggaacccagactccccctcttcaaatgaattgatacattatagaccaaggacgttcaatgttggcgacttggtctggggccaaatcaaaggactgacttcctggcctggaaaattagtaagagaagacgacgttcacaattcatgtcaacaaagccccgaggaagggaaggtggagcccgagaagttgaagacactaacagaaggtttggaagcctacagccgtgtccggaaaaggaacagaaaaagtggaaagctaaataaccatttagaagctgctattcatgaggccatgagtgaactggacaaaatgtctgggactgtacaccaaatcccacagggtgacagacaaatgagaccccccaaacccaagaggaggaagatctccagataacagagactactccactaatgcgcagtgtttattaaaggaacatgcacagatgtatctgtatataggtattgatatagccacagttatatcaatatttagactatggcagatagctaccaccaccacagggtgctaaaagaaacagtgatacaaaatttttttgatcaggaaggataatgaatgctggaaaagccaatcaaagtctctgtgtgatgagagtgatcaatggtcaagagattactgagaaactctttttctataatactaaattgtgattataagaaatagtccaaatgtttctgaagaattttcaatgttgtatatagaaaatacagaatttcatggtgatatcagaaatgtaaatattgtacagtattgtcatgtacaagcgtacctaatgcacactttatcttttattgtacaaagaaatagtgtacaaaattctttggtttctatggagtacacctaccagagactaccagtgtaaagtgataaataaaaatacaacctaaatgcttttctatgaaaatgtaaaaga

SEQ ID NO: 301148 - DNA, 551 bp, Homo sapiens
gaggacccccagccaataacctcccaagacctggtcctagaggagcagtctccaagttcctcaaatagtttggaaaattctctggtcaaagactacatccattacaatggagactttaatgccaaaagcgttaatgggtgtgtgcctagcccttcagatgctaaaagcattagtagtgaagatgacctaaggaacccagactccccctcttcaaatgaattgatacattatagaccaaggacgttcaatgttggcgacttggtctggggccaaatcaaaggactgacttcctggcctggaaaattagtaagagaagacgacgttcacaattcatgtcaacaaagccccgaggaagggaaggtataccaatctttatccattgtcaaatactaacctttgttcagatatcaattattgctttttgttatcatcactttggattctttggatttgaaattaggattcttcatgactcattgaggtctcacaagcttctggagcataaaatgaagaggggatggttatagtcaacaaaatgtcgtatcaacaag

SEQ ID NO: 301149 - DNA, 3472 bp, Homo sapiens
gtgaattatgattttccttagtcagaagcactcatttttacccatgtagaccatccttaggaattaaatattggttatttaatgtagattataatgggaagctgatttttttcacaatggcatatttcaaggacttggttccaaactgagctgaagcttcccaatgcgttttgtacagtctgggaaaaactgtgctgcactggcccacttttgaaggccatcatgctctgtaatataaggatatcatcttattgctgatatctttggagagtccctagcagacacagaaaatgaatggaggcaaagagtgtgacggaggggacaaggaaggaggtcttccagctatacaagttcctgtgggttggcagcgtcgtgtggatcaaaatggagtgctttatgtcagtcccagtgggtctttgttatcttgcttggagcaggttaaaacatacctgcttactgatggaacatgcaagtgtggcttggaatgtcctcttattcttcccaaggtatttaattttgatcctggagctgctgtgaaacagagaaccgcagaagatgttaaggcagatgaagatgtcacaaagctatgcatacataaaagaaaaattattgcagtggccacacttcataaaagcatggaagccccacatccttctctggtgctcaccagtcccggaggaggaacaaatgcaactccagtagtaccttctcgggcagcaactccaagatcagtaagaaataagtctcatgaaggaattacaaattctgtaatgcctgaatgtaagaatcctttcaagttaatgattggatcatcaaatgccatgggaaggctatatgtacaagaactgcctggaagccaacaacaagaactccaccctgtctacccccgacagagattgggcagcagtgaacatggacagaaatctccattccgtggcagccatggaggcctgcccagcccagcgtcatcaggttcccagatatatggagatggttcaatctctccaaggactgacccacttggaagtcctgatgttttcacaagaagtaatcctggttttcatggagctcccaattctagtcctattcacctgaataggactcctctttctccaccttcagtaatgctacatggttctcctgtacagtcatcctgtgcaatggctggaaggactaatatacctctttccccaaccttgactacaaagagtccagtaatgaaaaaaccaatgtgtaatttttcaactaatatggaaataccacgagcaatgttccaccacaaaccaccccaaggcccacctccccctcctccaccttcttgtgctcttcagaaaaagccattaacatctgagaaagatccacttggcattcttgaccctattcctagtaaaccagtgaatcagaaccctgttatcattaatccaaccagtttccattcaaatgtccactctcaggtacctatgatgaatgtaagcatgcctcctgctgttgttcctttgccaagtaatctcccattgccaactgtaaaacctggtcacatgaatcatgggagtcatgtacaaagagttcagcattcagcttcaacctccctgtccccttctccagtgacatcccccgtgcacatgatggggactggaattggaaggattgaggcatcgccccaaagatcacgctcatcttccacatcatcagatcatggaaatttcatgatgccacctgtaggaccccaggccacttctagtggtattaaggttccacccaggtcaccaaggtcaacaatagggtccccaaggccatcaatgccatcaagcccttctaccaagtccgatggacatcatcagtacaaggatatccctaacccattaattgctggaataagtaatgtactaaataccccaagcagtgcagcttttcctactgcatctgccggaagtagttctgtaaagagtcagcctggtttgctgggaatgcctttaaatcagatcttgaaccagcacaatgctgcctcctttccagcaagtagtttactctcagcagcagccaaagcacagctagcaaatcaaaacaaacttgctggtaacaacagtagcagcagtagcaattctggagctgttgccggcagtggcaacactgaaggacatagcactttaaacaccatgttccctcctactgccaacatgcttctcccaacaggtgaagggcaaagtggtcgagcagcactaagagataagctgatgtctcagcaaaaagacgcattgcggaaaagaaaacaaccacctacgacagtgttgagtttgctcagacagtctcaaatggatagttctgcagttcctaaacctggacctgacttgctaaggaagcagggtcagggttcatttcccatcagttcaatgtctcagttactacagtctatgagttgtcaaagctctcacttgagtagcaatagtaccccgggttgtggggcctcaaatactgctttgccttgctctgctaaccagctgcattttacagatcccagtatgaactctagtgttcttcagaacatacctttaagaggggaagccgtgcactgccacaatgcaaacactaactttgttcacagtaacagtccagtccccaaccaccatcttgcaggtttaataaatcagattcaggctagcgggaactgtgggatgctcagtcagtcgggcatggctttaggaaattccttacatcccaatccacctcagtcaagaatttcaacgtcctccactccagtgataccaaacagcattgttagcagctataatcaaacaagttctgaagcaggtatggttttattagaaaaaagtacccaaaggtactaaacttttctacttttttaaaaaatttgtaccaaaatatttattatgataagaaatgatcctttccccattgtgaaattctcttcatttctttagtatttataattttatttacagaatgctagggatttgtctattgggaagattaacagctaagaggatttcatgtgtttccattatttgttgtcaatctgtgtcattttgaatattgttcgactttcacttggttttataaccattggactccaaactgcaaaataagccatacgaggcagggtttcctggtttgtgagacatgtccttggtctatgccaatataaaagccatctccctagcttttgtttgtattcaggtaaatgaagtttatcttggaaaaatccaaaaaggcaaaaataaatggattttttttcttgctgctgaacagaagtaggtgaatggataggaaaaggtaactagaagttgtacgaagtagaaggctgtcttctaatgtgttttcttatcctagtttgctatccttattatttgtttgagaaaactcaaaaatggatattggctactcccttttaaaaaaaaagctaataatttaagctttctaataaaaaaaaggcttgaaaacctgatttccagaa

SEQ ID NO: 301150 - DNA, 465 bp, Homo sapiens
ctgaagcttcccaatgcgttttgtacagtctgggaaaaactgtgctgcactggcccacttttgaaggccatcatgctctgtaatataaggatatcatcttattgctgatatctttggagagtccctagcagacacagaaaatgaatggaggcaaagagtgtgacggaggggacaaggaaggaggtcttccagctatacaagttcctgtgggttggcagcgtcgtgtggatcaaaatggagtgctttatgtcaggtaagttcttattattacctgtggtacctgcaaagttgtactccaaagactaaggagagaaccaagcatggtgactgatggcacctcatataaatgtgaaaaagtgacctttgtgctagaaacatatgagaatttttattgccttagatttccagagagaattttttgcattacttgtttatataaggtgtcattctgcttatctctgtaac

SEQ ID NO: 301151 - DNA, 472 bp, Homo sapiens
agccagggagcatgaggggcgtctctgggagagggaacccgtggcccaactttcttcccaaatcaccagattgtggaagaagcatgtggaagaggaaaaagtccatctccccgccccacaatctgttcaactttttttagtagttctgtgactttaatcattagtattcagtgataagaatcccagagtgatgttttgtcatctgaattttccaaacgcgagtataaattggctttctctcgtggaattggtacttttgttttctgattaggaaattaaattgagttttgtttctttaattttttaatctggtgtgttgttttcattaattccagaagtggaaagctaaataaccatttagaagctgctattcatgaggccatgagtgaactggacaaaatgtctgggactgtaagttaatttatttttccattatactacgtttctttgaaaataaattgtgttacacttt

SEQ ID NO: 301152 - DNA, 2372 bp, Homo sapiens
ttaatattgttgccctaggtttcttttgtttaatatttgtctggattgcctgttcccataaattgacctttaatcagttagctttgttcttaagattggtttaaaacgtagaataatagggaggagcatgggagggtgggacgtctaatgtaaatccagcccagtgattacattagctgggcgctgattaggttaggatgttgcccaggtacaaggccaggatcttcgggacctggcttcatttggagttcagctaccaaaaggaaaccttcctctgggtcctggagtatttggcctgaaattgggaactcggaagttgctgctccagggcgctccctgcggagctccgccgcccgcctctccgcccggcctttcccggcgtccccacgcggggcgcaaccgcgagaaagaaacgcaggtcgcaccgtcagcgcccagagcagcgccagtttccgggcccgggctgctctcggagccatgagctgcggccgcccccctcccgacgtggacggcatgatcaccctcaaggtggacaacctgacctaccgcacctctcccgacagcttgaggcgcgtgttcgagaagtacgggcgcgtgggcgacgtgtacatcccgcgggagccccacaccaaggcgccccggggcttcgctttcgtccgctttcacgaccggcgcgacgcccaagacgccgaggccgccatggacggggcggagctggacggacgcgagctgcgggtgcaggtggcgcgctatggccgccgggacctgccccgcagccgccagggagagccacgcggcaggtccagaggcggcggctacggacggcggagccgcagctacgggcggcggagccgcagccccaggcggcgacaccgcagccgatcccggggtcccagctgctccaggtcccgcagccgatctcgctataggggttctcgctatagccggtctccctacagccgatctccttacagccggtcgcgctacagccgctctccctacagcagatctcgctacagggaatctcgctacggcggatctcactacagctcatctggttacagtaactctcgctacagccgatatcacagcagccggtctcactcgaagtctgggtcctccactagctctcgctctgcatcaacctccaaatcgagctctgcgcgacgatccaagtcctcctcggtctccaggtctcgctcgcggtccaggtcttcatctatgaccaggagtcctccccgggtatccaagaggaaatccaagtcaaggtcgcgatccaagaggccccccaagtctcctgaagaggaaggacagatgtcctcttaagaaaatgatgcatcaggaagcaacgtgatggaggacttgggggaaaaggatcacatactcagtctatggaagcaacgtccctggaagaagaggctgcctattgaaaaggttgtgtcacacttttctacctttttgccagtttgaagctttgcatcaggtggcaaaattcattctatgtgccgttttgttgttattcacattttattgtaacttaggaggtgaacgacctaagattacgttattgggtttggatatttgaggcaaaaatttatttttatttctatagtgatgactgttttggtttgaaatgaacagattggtaacctaatttgtggcctcctgacttttaaggaaacgtgtgcagccattacacacagcctaacgctgtcaagacattgcttcaacattgccttcattccttaaaaacctacaaaaggtggtgtaaattaatatggataattttatttacctccaggtctaaaaggtagtgtgacccaaatttgtataaagatttttcatgtgaaaggactggggttttagcaaacacaggtctaatctcttttgtgtttttgtgcaccaggcccggctgcgtagcagttgagtgatgctggttagctattaaggtggcctgttgcagtgcagagtgctgagctgcttcctgttttcttctgattgctcctggggaaaacacgccttgtcctgaagaacaaatggctgtccagtttattaaaatgcctgtcaactgcacttccagtcacccaggccttgcagataaataatggagcatgcagtgagcacatctagctgacgataatcacaccttttcccccgtcttttctgaaaaattgtaaatctgatcatatcaacatgtatgaacttaaaatatggagaatgttatggaagaaatagtttataagtttgttaagtacttataacatggtttatctttttgattattaattttttacgctaaccattgtttctgtagttaaaattgttttcttggtgttatcttttctcagaataaaattagaaacttttgatgg

SEQ ID NO: 301153 - DNA, 334 bp, Homo sapiens
  misc_feature (52)..(53): n is a, c, g, or t
  misc_feature (73)..(73): n is a, c, g, or t
tcaggttatctagaggatcccggtcatcttgtctacacccatcaccacgccnngtcttccccaactcactaancagcaccgtcatccatttagcatttcaagccagtgagaagtcatcatttataagtgcatttctaaaaatattgcttaattttgtttttgagctttgtataagtggaattttgtgtgtactgattattttgctcaatactatgtctttaagattctctgtattgttgcatgtggctgagtttatttttgatgctgtgtagtgttttactaattaataaatcataattcagtttttactgttctattgatggaaaaaagggtt

SEQ ID NO: 301154 - DNA, 4493 bp, Homo sapiens
ttaatattgttgccctaggtttcttttgtttaatatttgtctggattgcctgttcccataaattgacctttaatcagttagctttgttcttaagattggtttaaaacgtagaataatagggaggagcatgggagggtgggacgtctaatgtaaatccagcccagtgattacattagctgggcgctgattaggttaggatgttgcccaggtacaaggccaggatcttcgggacctggcttcatttggagttcagctaccaaaaggaaaccttcctctgggtcctggagtatttggcctgaaattgggaactcggaagttgctgctccagggcgctccctgcggagctccgccgcccgcctctccgcccggcctttcccggcgtccccacgcggggcgcaaccgcgagaaagaaacgcaggtcgcaccgtcagcgcccagagcagcgccagtttccgggcccgggctgctctcggagccatgagctgcggccgcccccctcccgacgtggacggcatgatcaccctcaaggtggacaacctgacctaccgcacctctcccgacagcttgaggcgcgtgttcgagaagtacgggcgcgtgggcgacgtgtacatcccgcgggagccccacaccaaggcgccccggggcttcgctttcgtccgctttcacgaccggcgcgacgcccaagacgccgaggccgccatggacggggcggagctggacggacgcgagctgcgggtgcaggtggcgcgctatggccgccgggacctgccccgcagccgccagggagagccacgcggcaggtccagaggcggcggctacggacggcggagccgcagctacgggcggcggagccgcagccccaggcggcgacaccgcagccgatcccggggtcccagctgctccaggtcccgcagccgatctcgctataggggttctcgctatagccggtctccctacagccgatctccttacagccggtcgcgctacagccgctctccctacagcagatctcgctacagggaatctcgctacggcggatctcactacagctcatctggttacagtaactctcgctacagccgatatcacagcagccggtctcactcgaagtctgggtcctccactagctctcgctctgcatcaacctccaaatcgagctctgcgcgacgatccaagtcctcctcggtctccaggtctcgctcgcggtccaggtcttcatctatgaccaggagtcctccccgggtatccaagaggaaatccaagtcaaggtcgcgatccaagaggccccccaagtctcctgaagaggaaggacagatgtcctcttaagaaaatgatgcatcaggaagcaacgtgatggaggacttgggggaaaaggatcacatactcagtctatggaagcaacgtccctggaagaagaggctgcctattgaaaaggttgtgtcacacttttctacctttttgccagtttgaagctttgcatcaggtggcaaaattcattctatgtgccgttttgttgttattcacattttattgtaacttaggaggtgaacgacctaagattacgttattgggtttggatatttgaggcaaaaatttatttttatttctatagtgatgactgttttggtttgaaatgaacagattggtaacctaatttgtggcctcctgacttttaaggaaacgtgtgcagccattacacacagcctaacgctgtcaagacattgcttcaacattgccttcattccttaaaaacctacaaaaggtggtgtaaattaatatggataattttatttacctccaggtctaaaaggtagtgtgacccaaatttgtataaagatttttcatgtgaaaggactggggttttagcaaacacaggtctaatctcttttgtgtttttgtgcaccaggcccggctgcgtagcagttgagtgatgctggttagctattaaggtggcctgttgcagtgcagagtgctgagctgcttcctgttttcttctgattgctcctggggaaaacacgccttgtcctgaagaacaaatggctgtccagtttattaaaatgcctgtcaactgcacttccagtcacccaggccttgcagataaataatggagcatgcagtgagcacatctagctgacgataatcacaccttttcccccgtcttttctgaaaaattgtaaatctgatcatatcaacatgtatgaacttaaaatatggagaatgttatggaagaaatagtttataagtttgttaagtacttataacatggtttatctttttgattattaattttttacgctaaccattgtttctgtagttaaaattgttttcttggtgttatcttttctcagaataaaattagaaacttttgatggaaagtaggttgttttattttctgtatgacttttggatatttgtacttttgagaaaattattagcaccaagtgtttctcaaaatataatttttaaaaaatccttaataggcttttagctatgtgctttattgttttatcacaatgcagtttatttgtagtttctctcttttttcctcacacctatggtttttttacttccaaaattattttcaaataatccatttttggctttcatcattatccctactagatgttatgtgttcttttgcaattgtttctgcttatacctttactagcaaagggaaaaataacaatttggtgtcaatgatctggtgacaataggattacattggagccaattgaataaatttattctttcaatcatatggatcttcattaatatttttgactgaattatcaattaaaaatatttcattccctttgtgcagaaactgctaaatccagggttcgattcttgaatgaactggcaagctggctgtggtctgtagatatacatcccacattttgttgttataacagttagtagttagtattgctttcatatatagactccagaatctaaattttacgataatgacatttcttctggtcatgacaaatgtaatattttacaaatataaatctacgtagaatccaaagacacacacggagcagtcctgtctgagaaataaaaaatcaggacacccatggcatcgtagtagcccctcgcgtccagcaggtggcgaagggaggtgaggtttatttattaaatgggaccgagtgggacggggacggggcagccctaagggtagggaagcattgtcaatttctggggatagaatgagacccaggcatagctggagtttgaagctttgaagcaaaaatatctgtagaacatcttaaacgtgaccaaaatatgatgttaaaatcagcaactctttatacgttaaaaactttgaaacctgtggccgggcatggtggctcgcgcctgtaatcccagcactttgggaggccaaggcaggtggatcacctgaggtcaggagctcaagaccagcctgaccaacatggtgaaaccccgtctctactaaaaatacaaaaattagctgggcatggtggcgcatgcctataatcccagctactcggaggctgaggcaggataatcgcttgaaaccgggagacagaggttgtggtgagccgagatcacgccattgcactccagccggggcaacaagagcaaaacttcatctcaaaaaaaaaaaataaaaaaaaagaaaaaggaaaaaaacaaacaaacaacaactttgaaacctaggaacaattttggacctgttggagcagaaatgtgtagttgtcattgaaggtgtgaacataccctacctctactctacatgtggaagacctgacccacagaggacatgaacccatgaagaagagtgatgtgacatgttttgcattttattagtaccatgatctaaccaactgagctaactggccacaccattttatcctttataatgatcactatgagggctgagtgcagaatggagtgtatgtggtcaagagtggaagctgtgaggctattgcagtaatccagaaagaaaggtgacaatggcttagacttcagtggtagtgttggaaatggacataaatagacatattcaggaaatatattgatcttagatctaataagacacgtaatagattagaagtagggaaattaatgaaaaagcagaattaaggatgacttctcactggcttgaaatgctaaatggatgacggtgctgtttagtgagttggggaagactgggcgtggtgatgggtgtagaaattgagaaaggaaaatcaagaatttccagaactttcagagcaatgttaaatactttccttgatagtgggtcagtcatcatttataagtgcatttctaaaaatattgcttaattttgtttttgagctttgtataagtggaattttgtgtgtactgattattttgctcaatactatgtctttaagattctctgtattgttgcatgtggctgagtttatttttgatgctgtgtagtgttttactaattaataaatcataattcagtttttactgttctattgatggaaaaaagggtt

SEQ ID NO: 301155 - DNA, 4358 bp, Homo sapiens
ttaatattgttgccctaggtttcttttgtttaatatttgtctggattgcctgttcccataaattgacctttaatcagttagctttgttcttaagattggtttaaaacgtagaataatagggaggagcatgggagggtgggacgtctaatgtaaatccagcccagtgattacattagctgggcgctgattaggttaggatgttgcccaggtacaaggccaggatcttcgggacctggcttcatttggagttcagctaccaaaaggaaaccttcctctgggtcctggagtatttggcctgaaattgggaactcggaagttgctgctccagggcgctccctgcggagctccgccgcccgcctctccgcccggcctttcccggcgtccccacgcggggcgcaaccgcgagaaagaaacgcaggtcgcaccgtcagcgcccagagcagcgccagtttccgggcccgggctgctctcggagccatgagctgcggccgcccccctcccgacgtggacggcatgatcaccctcaaggtggacaacctgacctaccgcacctctcccgacagcttgaggcgcgtgttcgagaagtacgggcgcgtgggcgacgtgtacatcccgcgggagccccacaccaaggcgccccggggcttcgctttcgtccgctttcacgaccggcgcgacgcccaagacgccgaggccgccatggacggggcggagctggacggacgcgagctgcgggtgcaggtggcgcgctatggccgccgggacctgccccgcagccgccagggagagccacgcggcaggtccagaggcggcggctacggacggcggagccgcagctacgggcggcggagccgcagccccaggcggcgacaccgcagccgatcccggggtcccagctgctccaggtcccgcagccgatctcgctataggggttctcgctatagccggtctccctacagccgatctccttacagccggtcgcgctacagccgctctccctacagcagatctcgctacagggaatctcgctacggcggatctcactacagctcatctggttacagtaactctcgctacagccgatatcacagcagccggtctcactcgaagtctgggtcctccactagctctcgctctgcatcaacctccaaatcgagctctgcgcgacgatccaagtcctcctcggtctccaggtctcgctcgcggtccaggtcttcatctatgaccaggagtcctccccgggtatccaagaggaaatccaagtcaaggtcgcgatccaagaggccccccaagtctcctgaagaggaaggacagatgtcctcttaagaaaatgatgcatcaggaagcaacgtgatggaggacttgggggaaaaggatcacatactcagtctatggaagcaacgtccctggaagaagaggctgcctattgaaaaggttgtgtcacacttttctacctttttgccagtttgaagctttgcatcaggtggcaaaattcattctatgtgccgttttgttgttattcacattttattgtaacttaggaggtgaacgacctaagattacgttattgggtttggatatttgaggcaaaaatttatttttatttctatagtgatgactgttttggtttgaaatgaacagattggtaacctaatttgtggcctcctgacttttaaggaaacgtgtgcagccattacacacagcctaacgctgtcaagacattgcttcaacattgccttcattccttaaaaacctacaaaaggtggtgtaaattaatatggataattttatttacctccaggtctaaaaggtagtgtgacccaaatttgtataaagatttttcatgtgaaaggactggggttttagcaaacacaggtctaatctcttttgtgtttttgtgcaccaggcccggctttattaaaatgcctgtcaactgcacttccagtcacccaggccttgcagataaataatggagcatgcagtgagcacatctagctgacgataatcacaccttttcccccgtcttttctgaaaaattgtaaatctgatcatatcaacatgtatgaacttaaaatatggagaatgttatggaagaaatagtttataagtttgttaagtacttataacatggtttatctttttgattattaattttttacgctaaccattgtttctgtagttaaaattgttttcttggtgttatcttttctcagaataaaattagaaacttttgatggaaagtaggttgttttattttctgtatgacttttggatatttgtacttttgagaaaattattagcaccaagtgtttctcaaaatataatttttaaaaaatccttaataggcttttagctatgtgctttattgttttatcacaatgcagtttatttgtagtttctctcttttttcctcacacctatggtttttttacttccaaaattattttcaaataatccatttttggctttcatcattatccctactagatgttatgtgttcttttgcaattgtttctgcttatacctttactagcaaagggaaaaataacaatttggtgtcaatgatctggtgacaataggattacattggagccaattgaataaatttattctttcaatcatatggatcttcattaatatttttgactgaattatcaattaaaaatatttcattccctttgtgcagaaactgctaaatccagggttcgattcttgaatgaactggcaagctggctgtggtctgtagatatacatcccacattttgttgttataacagttagtagttagtattgctttcatatatagactccagaatctaaattttacgataatgacatttcttctggtcatgacaaatgtaatattttacaaatataaatctacgtagaatccaaagacacacacggagcagtcctgtctgagaaataaaaaatcaggacacccatggcatcgtagtagcccctcgcgtccagcaggtggcgaagggaggtgaggtttatttattaaatgggaccgagtgggacggggacggggcagccctaagggtagggaagcattgtcaatttctggggatagaatgagacccaggcatagctggagtttgaagctttgaagcaaaaatatctgtagaacatcttaaacgtgaccaaaatatgatgttaaaatcagcaactctttatacgttaaaaactttgaaacctgtggccgggcatggtggctcgcgcctgtaatcccagcactttgggaggccaaggcaggtggatcacctgaggtcaggagctcaagaccagcctgaccaacatggtgaaaccccgtctctactaaaaatacaaaaattagctgggcatggtggcgcatgcctataatcccagctactcggaggctgaggcaggataatcgcttgaaaccgggagacagaggttgtggtgagccgagatcacgccattgcactccagccggggcaacaagagcaaaacttcatctcaaaaaaaaaaaataaaaaaaaagaaaaaggaaaaaaacaaacaaacaacaactttgaaacctaggaacaattttggacctgttggagcagaaatgtgtagttgtcattgaaggtgtgaacataccctacctctactctacatgtggaagacctgacccacagaggacatgaacccatgaagaagagtgatgtgacatgttttgcattttattagtaccatgatctaaccaactgagctaactggccacaccattttatcctttataatgatcactatgagggctgagtgcagaatggagtgtatgtggtcaagagtggaagctgtgaggctattgcagtaatccagaaagaaaggtgacaatggcttagacttcagtggtagtgttggaaatggacataaatagacatattcaggaaatatattgatcttagatctaataagacacgtaatagattagaagtagggaaattaatgaaaaagcagaattaaggatgacttctcactggcttgaaatgctaaatggatgacggtgctgtttagtgagttggggaagactgggcgtggtgatgggtgtagaaattgagaaaggaaaatcaagaatttccagaactttcagagcaatgttaaatactttccttgatagtgggtcagtcatcatttataagtgcatttctaaaaatattgcttaattttgtttttgagctttgtataagtggaattttgtgtgtactgattattttgctcaatactatgtctttaagattctctgtattgttgcatgtggctgagtttatttttgatgctgtgtagtgttttactaattaataaatcataattcagtttttactgttctattgatggaaaaaagggtt

SEQ ID NO: 301156 - DNA, 4439 bp, Homo sapiens
ttaatattgttgccctaggtttcttttgtttaatatttgtctggattgcctgttcccataaattgacctttaatcagttagctttgttcttaagattggtttaaaacgtagaataatagggaggagcatgggagggtgggacgtctaatgtaaatccagcccagtgattacattagctgggcgctgattaggttaggatgttgcccaggtacaaggccaggatcttcgggacctggcttcatttggagttcagctaccaaaaggaaaccttcctctgggtcctggagtatttggcctgaaattgggaactcggaagttgctgctccagggcgctccctgcggagctccgccgcccgcctctccgcccggcctttcccggcgtccccacgcggggcgcaaccgcgagaaagaaacgcaggtcgcaccgtcagcgcccagagcagcgccagtttccgggcccgggctgctctcggagccatgagctgcggccgcccccctcccgacgtggacggcatgatcaccctcaaggtggacaacctgacctaccgcacctctcccgacagcttgaggcgcgtgttcgagaagtacgggcgcgtgggcgacgtgtacatcccgcgggagccccacaccaaggcgccccggggcttcgctttcgtccgctttcacgaccggcgcgacgcccaagacgccgaggccgccatggacggggcggagctggacggacgcgagctgcgggtgcaggtggcgcgctatggccgccgggacctgccccgcagccgccagggagagccacgcggcaggtccagaggcggcggctacggacggcggagccgcagctacgggcggcggagccgcagccccaggcggcgacaccgcagccgatcccggggtcccagctgctccaggtcccgcagccgatctcgctataggggttctcgctatagccggtctccctacagccgatctccttacagccggtcgcgctacagccgctctccctacagcagatctcgctacagggaatctcgctacggcggatctcactacagctcatctggttacagtaactctcgctacagccgatatcacagcagccggtctcactcgaagtctgggtcctccactagctctcgctctgcatcaacctccaaatcgagctctgcgcgacgatccaagtcctcctcggtctccaggtctcgctcgcggtccaggtcttcatctatgaccaggagtcctccccgggtatccaagaggaaatccaagtcaaggtcgcgatccaagaggccccccaagtctcctgaagaggaaggacagatgtcctcttaagaaaatgatgcatcaggaagcaacgtgatggaggacttgggggaaaaggatcacatactcagtctatggaagcaacgtccctggaagaagaggctgcctattgaaaaggttgtgtcacacttttctacctttttgccagtttgaagctttgcatcaggtggcaaaattcattctatgtgccgttttgttgttattcacattttattgtaacttaggaggtgaacgacctaagattacgttattgggtttggatatttgaggcaaaaatttatttttatttctatagtgatgactgttttggtttgaaatgaacagattggtaacctaatttgtggcctcctgacttttaaggaaacgtgtgcagccattacacacagcctaacgctgtcaagacattgcttcaacattgccttcattccttaaaaacctacaaaaggtggtgtaaattaatatggataattttatttacctccaggtctaaaaggtagtgtgacccaaatttgtataaagatttttcatgtgaaaggactggggttttagcaaacacaggtctaatctcttttgtgtttttgtgcaccaggcccggctgcgtagcagttgagtgatgctggttagctattaaggtggcctgttgcagtgcagagtgctgagctgcttcctgttttcttctgattgctcctggggaaaacacgccttgtcctgaagaacaaatggctgtccagtttattaaaatgcctgtcaactgcacttccagtcacccaggccttgcagataaataatggagcatgcagtgagcacatctagctgacgataatcacaccttttcccccgtcttttctgaaaaattgtaaatctgatcatatcaacatgtatgaacttaaaatatggagaatgttatggaagaaatagtttataagtttgttaagtacttataacatggtttatctttttgattattaattttttacgctaaccattgtttctgtagttaaaattgttttcttggtgttatcttttctcagaataaaattagaaacttttgatggaaagtaggttgttttattttctgtatgacttttggatatttgtacttttgagaaaattattagcaccaagtgtttctcaaaatataatttttaaaaaatccttaataggcttttagctatgtgctttattgttttatcacaatgcagtttatttgtagtttctctcttttttcctcacacctatggtttttttacttccaaaattattttcaaataatccatttttggctttcatcattatccctactagatgttatgtgttcttttgcaattgtttctgcttatacctttactagcaaagggaaaaataacaatttggtgtcaatgatctggtgacaataggattacattggagccaattgaataaatttattctttcaatcatatggatcttcattaatatttttgactgaattatcaattaaaaatatttcattccctttgtgcagaaactgctaaatccagggttcgattcttgaatgaactggcaagctggctgtggtctgtagatatacatcccacattttgttgttataacagttagtagttagtattgctttcatatatagactccagaatctaaattttacgataatgacatttcttctggtcatgacaaatgtaatattttacaaatataaatctacgtagaatccaaagacacacacggagcagtcctgtctgagaaataaaaaatcaggacacccatggcatcgtagtagcccctcgcgtccagcaggtggcgaagggaggtgaggtttatttattaaatgggaccgagtgggacggggacggggcagccctaagggtagggaagcattgtcaatttctggggatagaatgagacccaggcatagctggagtttgaagctttgaagcaaaaatatctgtagaacatcttaaacgtgaccaaaatatgatgttaaaatcagcaactctttatacgttaaaaactttgaaacctgtggccgggcatggtggctcgcgcctgtaatcccagcactttgggaggccaaggcaggtggatcacctgaggtcaggagctcaagaccagcctgaccaacatggtgaaaccccgtctctactaaaaatacaaaaattagctgggcatggtggcgcatgcctataatcccagctactcggaggctgaggcaggataatcgcttgaaaccgggagacagaggttgtggtgagccgagatcacgccattgcactccagccggggcaacaagagcaaaacttcatctcaaaaaaaaaaaataaaaaaaaagaaaaaggaaaaaaacaaacaaacaacaactttgaaacctaggaacaattttggacctgttggagcagaaatgtgtagttgtcattgaaggtgtgaacataccctacctctactctacatgtggaagacctgacccacagaggacatgaacccatgaagaagagtgatgtgacatgttttgcattttattagtaccatgatctaaccaactgagctaactggccacaccattttatcctttataatgatcactatgagggctgagtgcagaatggagtgtatgtggtcaagagtggaagctgtgaggctattgcagtaatccagaaagaaaggtgacaatggcttagacttcagtggtagtgttggaaatggacataaatagacatattcaggaaatatattgatcttagatctaataagacacgtaatagattagaagtagggaaattaatgaaaaagcagaattaaggatgacttctcactggcttgaaatgctaaatggatgacggtgctgtttagtgagttggggaagactgggcgtggtgatgggtgtagaaattgagaaaggaaaatcaagaatttccagaactttcagagcaatgttaaatactttccttgatagtgggtcagtcatcatttataagtgcatttgtactgattattttgctcaatactatgtctttaagattctctgtattgttgcatgtggctgagtttatttttgatgctgtgtagtgttttactaattaataaatcataattcagtttttactgttctattgatggaaaaaagggtt

SEQ ID NO: 301157 - DNA, 4262 bp, Homo sapiens
ttaatattgttgccctaggtttcttttgtttaatatttgtctggattgcctgttcccataaattgacctttaatcagttagctttgttcttaagattggtttaaaacgtagaataatagggaggagcatgggagggtgggacgtctaatgtaaatccagcccagtgattacattagctgggcgctgattaggttaggatgttgcccaggtacaaggccaggatcttcgggacctggcttcatttggagttcagctaccaaaaggaaaccttcctctgggtcctggagtatttggcctgaaattgggaactcggaagttgctgctccagggcgctccctgcggagctccgccgcccgcctctccgcccggcctttcccggcgtccccacgcggggcgcaaccgcgagaaagaaacgcaggtcgcaccgtcagcgcccagagcagcgccagtttccgggcccgggctgctctcggagccatgagctgcggccgcccccctcccgacgtggacggcatgatcaccctcaaggtggacaacctgacctaccgcacctctcccgacagcttgaggcgcgtgttcgagaagtacgggcgcgtgggcgacgtgtacatcccgcgggagccccacaccaaggcgccccggggcttcgctttcgtccgctttcacgaccggcgcgacgcccaagacgccgaggccgccatggacggggcggagctggacggacgcgagctgcgggtgcaggtggcgcgctatggccgccgggacctgccccgcagccgccagggagagccacgcggcaggtccagaggcggcggctacggacggcggagccgcagctacgggcggcggagccgcagccccaggcggcgacaccgcagccgatcccggggtcccagctgctccaggtcccgcagccgatctcgctataggggttctcgctatagccggtctccctacagccgatctccttacagccggtcgcgctacagccgctctccctacagcagatctcgctacagggaatctcgctacggcggatctcactacagctcatctggttacagtaactctcgctacagccgatatcacagcagccggtctcactcgaagtctgggtcctccactagctctcgctctgcatcaacctccaaatcgagctctgcgcgacgatccaagtcctcctcggtctccaggtctcgctcgcggtccaggtcttcatctatgaccaggagtcctccccgggtatccaagaggaaatccaagtcaaggtcgcgatccaagaggccccccaagtctcctgaagaggaaggacagatgtcctcttaagaaaatgatgcatcaggaagcaacgtgatggaggacttgggggaaaaggatcacatactcagtctatggaagcaacgtccctggaagaagaggctgcctattgaaaaggttgtgtcacacttttctacctttttgccagtttgaagctttgcatcaggtggcaaaattcattctatgtgccgttttgttgttattcacattttattgtaacttaggaggtgaacgacctaagattacgttattgggtttggatatttgaggcaaaaatttatttttatttctatagtgatgactgttttggtttgaaatgaacagattggtaacctaatttgtggcctcctgacttttaaggaaacgtgtgcagccattacacacagcctaacgctgtcaagacattgcttcaacattgccttcattccttaaaaacctacaaaaggtggtgtaaattaatatggataattttatttacctccaggtctaaaaggtagtgtgacccaaatttgtataaagatttttcatgtgaaaggactggggttttagcaaacacaggtctaatctcttttgtgtttttgtgcaccaggcccggctgcgtagcagttgagtgatgctggttagctattaaggtggcctgttgcagtgcagagtgctgagctgcttcctgttttcttctgattgctcctggggaaaacacgccttgtcctgaagaacaaatggctgtccagtttattaaaatgcctgtcaactgcacttccagtcacccaggccttgcagataaataatggagcatgcagtgagcacatctagctgacgataatcacaccttttcccccgtcttttctgaaaaattgtaaatctgatcatatcaacatgtatgaacttaaaatatggagaatgttatggaagaaatagtttataagtttgttaagtacttataacatggtttatctttttgattattaattttttacgctaaccattgtttctgtagttaaaattgttttcttggtgttatcttttctcagaataaaattagaaacttttgatggaaagtaggttgttttattttctgtatgacttttggatatttgtacttttgagaaaattattagcaccaagtgtttctcaaaatataatttttaaaaaatccttaataggcttttagctatgtgctttattgttttatcacaatgcagtttatttgtagtttctctcttttttcctcacacctatggtttttttacttccaaaattattttcaaataatccatttttggctttcatcattatccctactagatgttatgtgttcttttgcaattgtttctgcttatacctttactagcaaagggaaaaataacaatttggtgtcaatgatctggtgacaataggattacattggagccaattgaataaatttattctttcaatcatatggatcttcattaatatttttgactgaattatcaattaaaaatatttcattccctttgtgcagaaactgctaaatccagggttcgattcttgaatgaactggcaagctggctgtggtctgtagatatacatcccacattttgttgttataacagttagtagttagtattgctttcatatatagactccagaatctaaattttacgataatgacatttcttctggtcatgacaaatgtaatattttacaaatataaatctacgtagaatccaaagacacacacggagcagtcctgtctgagaaataaaaaatcaggacacccatggcatcgtagtagcccctcgcgtccagcaggtggcgaagggaggtgaggtttatttattaaatgggaccgagtgggacggggacggggcagccctaagggtagggaagcattgtcaatttctggggatagaatgagacccaggcatagctggagtttgaagctttgaagcaaaaatatctgtagaacatcttaaacgtgaccaaaatatgatgttaaaatcagcaactctttatacgttaaaaactttgaaacctgtggccgggcatggtggctcgcgcctgtaatcccagcactttgggaggccaaggcaggtggatcacctgaggtcaggagctcaagaccagcctgaccaacatggtgaaaccccgtctctactaaaaatacaaaaattagctgggcatggtggcgcatgcctataatcccagctactcggaggctgaggcaggataatcgcttgaaaccgggagacagaggttgtggtgagccgagatcacgccattgcactccagccggggcaacaagagcaaaacttcatctcaaaaaaaaaaaataaaaaaaaagaaaaaggaaaaaaacaaacaaacaacaactttgaaacctaggaacaattttggacctgttggagcagaaatgtgtagttgtcattgaaggtgtgaacataccctacctctactctacatgtggaagacctgacccacagaggacatgaacccatgaagaagagtgatgtgacatgttttgcattttattagtaccatgatctaaccaactgagctaactggccacaccattttatcctttataatgatcactatgagggctgagtgcagaatggagtgtatgtggtcaagagtggaagctgtgaggctattgcagtaatccagaaagaaaggtgacaatggcttagacttcagtggtagtgttggaaatggacataaatagacatattcaggaaatatattgatcttagatctaataagacacgtaatagattagaagtagggaaattaatgaaaaagcagaattaaggatgacttctcactggcttgaaatgctaaaaaaagaaaaaatagggccgggcgcggtggctcacgcctgtaatcccagcactttcggaggccgagggaggtggatcacaaggtcaagagatagagaccatcctcgttgtgtagaaattgaa

SEQ ID NO: 301158 - DNA, 4442 bp, Homo sapiens
ttaatattgttgccctaggtttcttttgtttaatatttgtctggattgcctgttcccataaattgacctttaatcagttagctttgttcttaagattggtttaaaacgtagaataatagggaggagcatgggagggtgggacgtctaatgtaaatccagcccagtgattacattagctgggcgctgattaggttaggatgttgcccaggtacaaggccaggatcttcgggacctggcttcatttggagttcagctaccaaaaggaaaccttcctctgggtcctggagtatttggcctgaaattgggaactcggaagttgctgctccagggcgctccctgcggagctccgccgcccgcctctccgcccggcctttcccggcgtccccacgcggggcgcaaccgcgagaaagaaacgcaggtcgcaccgtcagcgcccagagcagcgccagtttccgggcccgggctgctctcggagccatgagctgcggccgcccccctcccgacgtggacggcatgatcaccctcaaggtggacaacctgacctaccgcacctctcccgacagcttgaggcgcgtgttcgagaagtacgggcgcgtgggcgacgtgtacatcccgcgggagccccacaccaaggcgccccggggcttcgctttcgtccgctttcacgaccggcgcgacgcccaagacgccgaggccgccatggacggggcggagctggacggacgcgagctgcgggtgcaggtggcgcgctatggccgccgggacctgccccgcagccgccagggagagccacgcggcaggtccagaggcggcggctacggacggcggagccgcagctacgggcggcggagccgcagccccaggcggcgacaccgcagccgatcccggggtcccagctgctccaggtcccgcagccgatctcgctataggggttctcgctatagccggtctccctacagccgatctccttacagccggtcgcgctacagccgctctccctacagcagatctcgctacagggaatctcgctacggcggatctcactacagctcatctggttacagtaactctcgctacagccgatatcacagcagccggtctcactcgaagtctgggtcctccactagctctcgctctgcatcaacctccaaatcgagctctgcgcgacgatccaagtcctcctcggtctccaggtctcgctcgcggtccaggtcttcatctatgaccaggagtcctccccgggtatccaagaggaaatccaagtcaaggtcgcgatccaagaggccccccaagtctcctgaagaggaaggacagatgtcctcttaagaaaatgatgcatcaggaagcaacgtgatggaggacttgggggaaaaggatcacatactcagtctatggaagcaacgtccctggaagaagaggctgcctattgaaagtggcaaaattcattctatgtgccgttttgttgttattcacattttattgtaacttaggaggtgaacgacctaagattacgttattgggtttggatatttgaggcaaaaatttatttttatttctatagtgatgactgttttggtttgaaatgaacagattggtaacctaatttgtggcctcctgacttttaaggaaacgtgtgcagccattacacacagcctaacgctgtcaagacattgcttcaacattgccttcattccttaaaaacctacaaaaggtggtgtaaattaatatggataattttatttacctccaggtctaaaaggtagtgtgacccaaatttgtataaagatttttcatgtgaaaggactggggttttagcaaacacaggtctaatctcttttgtgtttttgtgcaccaggcccggctgcgtagcagttgagtgatgctggttagctattaaggtggcctgttgcagtgcagagtgctgagctgcttcctgttttcttctgattgctcctggggaaaacacgccttgtcctgaagaacaaatggctgtccagtttattaaaatgcctgtcaactgcacttccagtcacccaggccttgcagataaataatggagcatgcagtgagcacatctagctgacgataatcacaccttttcccccgtcttttctgaaaaattgtaaatctgatcatatcaacatgtatgaacttaaaatatggagaatgttatggaagaaatagtttataagtttgttaagtacttataacatggtttatctttttgattattaattttttacgctaaccattgtttctgtagttaaaattgttttcttggtgttatcttttctcagaataaaattagaaacttttgatggaaagtaggttgttttattttctgtatgacttttggatatttgtacttttgagaaaattattagcaccaagtgtttctcaaaatataatttttaaaaaatccttaataggcttttagctatgtgctttattgttttatcacaatgcagtttatttgtagtttctctcttttttcctcacacctatggtttttttacttccaaaattattttcaaataatccatttttggctttcatcattatccctactagatgttatgtgttcttttgcaattgtttctgcttatacctttactagcaaagggaaaaataacaatttggtgtcaatgatctggtgacaataggattacattggagccaattgaataaatttattctttcaatcatatggatcttcattaatatttttgactgaattatcaattaaaaatatttcattccctttgtgcagaaactgctaaatccagggttcgattcttgaatgaactggcaagctggctgtggtctgtagatatacatcccacattttgttgttataacagttagtagttagtattgctttcatatatagactccagaatctaaattttacgataatgacatttcttctggtcatgacaaatgtaatattttacaaatataaatctacgtagaatccaaagacacacacggagcagtcctgtctgagaaataaaaaatcaggacacccatggcatcgtagtagcccctcgcgtccagcaggtggcgaagggaggtgaggtttatttattaaatgggaccgagtgggacggggacggggcagccctaagggtagggaagcattgtcaatttctggggatagaatgagacccaggcatagctggagtttgaagctttgaagcaaaaatatctgtagaacatcttaaacgtgaccaaaatatgatgttaaaatcagcaactctttatacgttaaaaactttgaaacctgtggccgggcatggtggctcgcgcctgtaatcccagcactttgggaggccaaggcaggtggatcacctgaggtcaggagctcaagaccagcctgaccaacatggtgaaaccccgtctctactaaaaatacaaaaattagctgggcatggtggcgcatgcctataatcccagctactcggaggctgaggcaggataatcgcttgaaaccgggagacagaggttgtggtgagccgagatcacgccattgcactccagccggggcaacaagagcaaaacttcatctcaaaaaaaaaaaataaaaaaaaagaaaaaggaaaaaaacaaacaaacaacaactttgaaacctaggaacaattttggacctgttggagcagaaatgtgtagttgtcattgaaggtgtgaacataccctacctctactctacatgtggaagacctgacccacagaggacatgaacccatgaagaagagtgatgtgacatgttttgcattttattagtaccatgatctaaccaactgagctaactggccacaccattttatcctttataatgatcactatgagggctgagtgcagaatggagtgtatgtggtcaagagtggaagctgtgaggctattgcagtaatccagaaagaaaggtgacaatggcttagacttcagtggtagtgttggaaatggacataaatagacatattcaggaaatatattgatcttagatctaataagacacgtaatagattagaagtagggaaattaatgaaaaagcagaattaaggatgacttctcactggcttgaaatgctaaatggatgacggtgctgtttagtgagttggggaagactgggcgtggtgatgggtgtagaaattgagaaaggaaaatcaagaatttccagaactttcagagcaatgttaaatactttccttgatagtgggtcagtcatcatttataagtgcatttctaaaaatattgcttaattttgtttttgagctttgtataagtggaattttgtgtgtactgattattttgctcaatactatgtctttaagattctctgtattgttgcatgtggctgagtttatttttgatgctgtgtagtgttttactaattaataaatcataattcagtttttactgttctattgatggaaaaaagggtt

SEQ ID NO: 301159 - DNA, 4012 bp, Homo sapiens
ttaatattgttgccctaggtttcttttgtttaatatttgtctggattgcctgttcccataaattgacctttaatcagttagctttgttcttaagattggtttaaaacgtagaataatagggaggagcatgggagggtgggacgtctaatgtaaatccagcccagtgattacattagctgggcgctgattaggttaggatgttgcccaggtacaaggccaggatcttcgggacctggcttcatttggagttcagctaccaaaaggaaaccttcctctgggtcctggagtatttggcctgaaattgggaactcggaagttgctgctccagggcgctccctgcggagctccgccgcccgcctctccgcccggcctttcccggcgtccccacgcggggcgcaaccgcgagaaagaaacgcaggtcgcaccgtcagcgcccagagcagcgccagtttccgggcccgggctgctctcggagccatgagctgcggccgcccccctcccgacgtggacggcatgatcaccctcaaggtggacaacctgacctaccgcacctctcccgacagcttgaggcgcgtgttcgagaagtacgggcgcgtgggcgacgtgtacatcccgcgggagccccacaccaaggcgccccggggcttcgctttcgtccgctttcacgaccggcgcgacgcccaagacgccgaggccgccatggacggggcggagctggacggacgcgagctgcgggtgcaggtggcgcgctatggccgccgggacctgccccgcagccgccagggagagccacgcggcaggtccagaggcggcggctacggacggcggagccgcagctacgggcggcggagccgcagccccaggcggcgacaccgcagccgatcccggggtcccagctgctccaggtcccgcagccgatctcgctataggggttctcgctatagccggtctccctacagccgatctccttacagccggtcgcgctacagccgctctccctacagcagatctcgctacagggaatctcgctacggcggatctcactacagctcatctggttacagtaactctcgctacagccgatatcacagcagccggtctcactcgaagtctgggtcctccactagctctcgctctgcatcaacctccaaatcgagctctgcgcgacgatccaagtcctcctcggtctccaggtctcgctcgcggtccaggtcttcatctatgaccaggagtcctccccgggtatccaagaggaaatccaagtcaaggtcgcgatccaagaggccccccaagtctcctgaagaggaaggacagatgtcctcttaagaaaatgatgcatcaggaagcaacgtgatggaggacttgggggaaaaggatcacatactcagtctatggaagcaacgtccctggaagaagaggctgcctattgaaatgcgtagcagttgagtgatgctggttagctattaaggtggcctgttgcagtgcagagtgctgagctgcttcctgttttcttctgattgctcctggggaaaacacgccttgtcctgaagaacaaatggctgtccagtttattaaaatgcctgtcaactgcacttccagtcacccaggccttgcagataaataatggagcatgcagtgagcacatctagctgacgataatcacaccttttcccccgtcttttctgaaaaattgtaaatctgatcatatcaacatgtatgaacttaaaatatggagaatgttatggaagaaatagtttataagtttgttaagtacttataacatggtttatctttttgattattaattttttacgctaaccattgtttctgtagttaaaattgttttcttggtgttatcttttctcagaataaaattagaaacttttgatggaaagtaggttgttttattttctgtatgacttttggatatttgtacttttgagaaaattattagcaccaagtgtttctcaaaatataatttttaaaaaatccttaataggcttttagctatgtgctttattgttttatcacaatgcagtttatttgtagtttctctcttttttcctcacacctatggtttttttacttccaaaattattttcaaataatccatttttggctttcatcattatccctactagatgttatgtgttcttttgcaattgtttctgcttatacctttactagcaaagggaaaaataacaatttggtgtcaatgatctggtgacaataggattacattggagccaattgaataaatttattctttcaatcatatggatcttcattaatatttttgactgaattatcaattaaaaatatttcattccctttgtgcagaaactgctaaatccagggttcgattcttgaatgaactggcaagctggctgtggtctgtagatatacatcccacattttgttgttataacagttagtagttagtattgctttcatatatagactccagaatctaaattttacgataatgacatttcttctggtcatgacaaatgtaatattttacaaatataaatctacgtagaatccaaagacacacacggagcagtcctgtctgagaaataaaaaatcaggacacccatggcatcgtagtagcccctcgcgtccagcaggtggcgaagggaggtgaggtttatttattaaatgggaccgagtgggacggggacggggcagccctaagggtagggaagcattgtcaatttctggggatagaatgagacccaggcatagctggagtttgaagctttgaagcaaaaatatctgtagaacatcttaaacgtgaccaaaatatgatgttaaaatcagcaactctttatacgttaaaaactttgaaacctgtggccgggcatggtggctcgcgcctgtaatcccagcactttgggaggccaaggcaggtggatcacctgaggtcaggagctcaagaccagcctgaccaacatggtgaaaccccgtctctactaaaaatacaaaaattagctgggcatggtggcgcatgcctataatcccagctactcggaggctgaggcaggataatcgcttgaaaccgggagacagaggttgtggtgagccgagatcacgccattgcactccagccggggcaacaagagcaaaacttcatctcaaaaaaaaaaaataaaaaaaaagaaaaaggaaaaaaacaaacaaacaacaactttgaaacctaggaacaattttggacctgttggagcagaaatgtgtagttgtcattgaaggtgtgaacataccctacctctactctacatgtggaagacctgacccacagaggacatgaacccatgaagaagagtgatgtgacatgttttgcattttattagtaccatgatctaaccaactgagctaactggccacaccattttatcctttataatgatcactatgagggctgagtgcagaatggagtgtatgtggtcaagagtggaagctgtgaggctattgcagtaatccagaaagaaaggtgacaatggcttagacttcagtggtagtgttggaaatggacataaatagacatattcaggaaatatattgatcttagatctaataagacacgtaatagattagaagtagggaaattaatgaaaaagcagaattaaggatgacttctcactggcttgaaatgctaaatggatgacggtgctgtttagtgagttggggaagactgggcgtggtgatgggtgtagaaattgagaaaggaaaatcaagaatttccagaactttcagagcaatgttaaatactttccttgatagtgggtcagtcatcatttataagtgcatttctaaaaatattgcttaattttgtttttgagctttgtataagtggaattttgtgtgtactgattattttgctcaatactatgtctttaagattctctgtattgttgcatgtggctgagtttatttttgatgctgtgtagtgttttactaattaataaatcataattcagtttttactgttctattgatggaaaaaagggtt

SEQ ID NO: 301160 - DNA, 3945 bp, Homo sapiens
ttaatattgttgccctaggtttcttttgtttaatatttgtctggattgcctgttcccataaattgacctttaatcagttagctttgttcttaagattggtttaaaacgtagaataatagggaggagcatgggagggtgggacgtctaatgtaaatccagcccagtgattacattagctgggcgctgattaggttaggatgttgcccaggtacaaggccaggatcttcgggacctggcttcatttggagttcagctaccaaaaggaaaccttcctctgggtcctggagtatttggcctgaaattgggaactcggaagttgctgctccagggcgctccctgcggagctccgccgcccgcctctccgcccggcctttcccggcgtccccacgcggggcgcaaccgcgagaaagaaacgcaggtcgcaccgtcagcgcccagagcagcgccagtttccgggcccgggctgctctcggagccatgagctgcggccgcccccctcccgacgtggacggcatgatcaccctcaaggtggacaacctgacctaccgcacctctcccgacagcttgaggcgcgtgttcgagaagtacgggcgcgtgggcgacgtgtacatcccgcgggagccccacaccaaggcgccccggggcttcgctttcgtccgctttcacgaccggcgcgacgcccaagacgccgaggccgccatggacggggcggagctggacggacgcgagctgcgggtgcaggtggcgcgctatggccgccgggacctgccccgcagccgccagggagagccacgcggcaggtccagaggcggcggctacggacggcggagccgcagctacgggcggcggagccgcagccccaggcggcgacaccgcagccgatcccggggtcccagctgctccaggtcccgcagccgatctcgctataggggttctcgctatagccggtctccctacagccgatctccttacagccggtcgcgctacagccgctctccctacagcagatctcgctacagggaatctcgctacggcggatctcactacagctcatctggttacagtaactctcgctacagccgatatcacagcagccggtctcactcgaagtctgggtcctccactagctctcgctctgcatcaacctccaaatcgagctctgcgcgacgatccaagtcctcctcggtctccaggtctcgctcgcggtccaggtcttcatctatgaccaggagtcctccccgggtatccaagaggaaatccaagtcaaggtcgcgatccaagaggccccccaagtctcctgaagaggaaggacagatgtcctcttaagaaaatgatgcatcaggaagcaacgtgatggaggacttgggggaaaaggatcacatactcagtctatggaagcaacgtccctgttgcagtgcagagtgctgagctgcttcctgttttcttctgattgctcctggggaaaacacgccttgtcctgaagaacaaatggctgtccagtttattaaaatgcctgtcaactgcacttccagtcacccaggccttgcagataaataatggagcatgcagtgagcacatctagctgacgataatcacaccttttcccccgtcttttctgaaaaattgtaaatctgatcatatcaacatgtatgaacttaaaatatggagaatgttatggaagaaatagtttataagtttgttaagtacttataacatggtttatctttttgattattaattttttacgctaaccattgtttctgtagttaaaattgttttcttggtgttatcttttctcagaataaaattagaaacttttgatggaaagtaggttgttttattttctgtatgacttttggatatttgtacttttgagaaaattattagcaccaagtgtttctcaaaatataatttttaaaaaatccttaataggcttttagctatgtgctttattgttttatcacaatgcagtttatttgtagtttctctcttttttcctcacacctatggtttttttacttccaaaattattttcaaataatccatttttggctttcatcattatccctactagatgttatgtgttcttttgcaattgtttctgcttatacctttactagcaaagggaaaaataacaatttggtgtcaatgatctggtgacaataggattacattggagccaattgaataaatttattctttcaatcatatggatcttcattaatatttttgactgaattatcaattaaaaatatttcattccctttgtgcagaaactgctaaatccagggttcgattcttgaatgaactggcaagctggctgtggtctgtagatatacatcccacattttgttgttataacagttagtagttagtattgctttcatatatagactccagaatctaaattttacgataatgacatttcttctggtcatgacaaatgtaatattttacaaatataaatctacgtagaatccaaagacacacacggagcagtcctgtctgagaaataaaaaatcaggacacccatggcatcgtagtagcccctcgcgtccagcaggtggcgaagggaggtgaggtttatttattaaatgggaccgagtgggacggggacggggcagccctaagggtagggaagcattgtcaatttctggggatagaatgagacccaggcatagctggagtttgaagctttgaagcaaaaatatctgtagaacatcttaaacgtgaccaaaatatgatgttaaaatcagcaactctttatacgttaaaaactttgaaacctgtggccgggcatggtggctcgcgcctgtaatcccagcactttgggaggccaaggcaggtggatcacctgaggtcaggagctcaagaccagcctgaccaacatggtgaaaccccgtctctactaaaaatacaaaaattagctgggcatggtggcgcatgcctataatcccagctactcggaggctgaggcaggataatcgcttgaaaccgggagacagaggttgtggtgagccgagatcacgccattgcactccagccggggcaacaagagcaaaacttcatctcaaaaaaaaaaaataaaaaaaaagaaaaaggaaaaaaacaaacaaacaacaactttgaaacctaggaacaattttggacctgttggagcagaaatgtgtagttgtcattgaaggtgtgaacataccctacctctactctacatgtggaagacctgacccacagaggacatgaacccatgaagaagagtgatgtgacatgttttgcattttattagtaccatgatctaaccaactgagctaactggccacaccattttatcctttataatgatcactatgagggctgagtgcagaatggagtgtatgtggtcaagagtggaagctgtgaggctattgcagtaatccagaaagaaaggtgacaatggcttagacttcagtggtagtgttggaaatggacataaatagacatattcaggaaatatattgatcttagatctaataagacacgtaatagattagaagtagggaaattaatgaaaaagcagaattaaggatgacttctcactggcttgaaatgctaaatggatgacggtgctgtttagtgagttggggaagactgggcgtggtgatgggtgtagaaattgagaaaggaaaatcaagaatttccagaactttcagagcaatgttaaatactttccttgatagtgggtcagtcatcatttataagtgcatttctaaaaatattgcttaattttgtttttgagctttgtataagtggaattttgtgtgtactgattattttgctcaatactatgtctttaagattctctgtattgttgcatgtggctgagtttatttttgatgctgtgtagtgttttactaattaataaatcataattcagtttttactgttctattgatggaaaaaagggtt

SEQ ID NO: 301161 - DNA, 4476 bp, Homo sapiens
ttaatattgttgccctaggtttcttttgtttaatatttgtctggattgcctgttcccataaattgacctttaatcagttagctttgttcttaagattggtttaaaacgtagaataatagggaggagcatgggagggtgggacgtctaatgtaaatccagcccagtgattacattagctgggcgctgattaggttaggatgttgcccaggtacaaggccaggatcttcgggacctggcttcatttggagttcagctaccaaaaggaaaccttcctctgggtcctggagtatttggcctgaaattgggaactcggaagttgctgctccagggcgctccctgcggagctccgccgcccgcctctccgcccggcctttcccggcgtccccacgcggggcgcaaccgcgagaaagaaacgcaggtcgcaccgtcagcgcccagagcagcgccagtttccgggcccgggctgctctcggagccatgagctgcggccgcccccctcccgacgtggacggcatgatcaccctcaaggtggacaacctgacctaccgcacctctcccgacagcttgaggcgcgtgttcgagaagtacgggcgcgtgggcgacgtgtacatcccgcgggagccccacaccaaggcgccccggggcttcgctttcgtccgctttcacgaccggcgcgacgcccaagacgccgaggccgccatggacggggcggagctggacggacgcgagctgcgggtgcaggtggcgcgctatggccgccgggacctgccccgcagccgccagggagagccacgcggcaggtccagaggcggcggctacggacggcggagccgcagctacccccaggcggcgacaccgcagccgatcccggggtcccagctgctccaggtcccgcagccgatctcgctataggggttctcgctatagccggtctccctacagccgatctccttacagccggtcgcgctacagccgctctccctacagcagatctcgctacagggaatctcgctacggcggatctcactacagctcatctggttacagtaactctcgctacagccgatatcacagcagccggtctcactcgaagtctgggtcctccactagctctcgctctgcatcaacctccaaatcgagctctgcgcgacgatccaagtcctcctcggtctccaggtctcgctcgcggtccaggtcttcatctatgaccaggagtcctccccgggtatccaagaggaaatccaagtcaaggtcgcgatccaagaggccccccaagtctcctgaagaggaaggacagatgtcctcttaagaaaatgatgcatcaggaagcaacgtgatggaggacttgggggaaaaggatcacatactcagtctatggaagcaacgtccctggaagaagaggctgcctattgaaaaggttgtgtcacacttttctacctttttgccagtttgaagctttgcatcaggtggcaaaattcattctatgtgccgttttgttgttattcacattttattgtaacttaggaggtgaacgacctaagattacgttattgggtttggatatttgaggcaaaaatttatttttatttctatagtgatgactgttttggtttgaaatgaacagattggtaacctaatttgtggcctcctgacttttaaggaaacgtgtgcagccattacacacagcctaacgctgtcaagacattgcttcaacattgccttcattccttaaaaacctacaaaaggtggtgtaaattaatatggataattttatttacctccaggtctaaaaggtagtgtgacccaaatttgtataaagatttttcatgtgaaaggactggggttttagcaaacacaggtctaatctcttttgtgtttttgtgcaccaggcccggctgcgtagcagttgagtgatgctggttagctattaaggtggcctgttgcagtgcagagtgctgagctgcttcctgttttcttctgattgctcctggggaaaacacgccttgtcctgaagaacaaatggctgtccagtttattaaaatgcctgtcaactgcacttccagtcacccaggccttgcagataaataatggagcatgcagtgagcacatctagctgacgataatcacaccttttcccccgtcttttctgaaaaattgtaaatctgatcatatcaacatgtatgaacttaaaatatggagaatgttatggaagaaatagtttataagtttgttaagtacttataacatggtttatctttttgattattaattttttacgctaaccattgtttctgtagttaaaattgttttcttggtgttatcttttctcagaataaaattagaaacttttgatggaaagtaggttgttttattttctgtatgacttttggatatttgtacttttgagaaaattattagcaccaagtgtttctcaaaatataatttttaaaaaatccttaataggcttttagctatgtgctttattgttttatcacaatgcagtttatttgtagtttctctcttttttcctcacacctatggtttttttacttccaaaattattttcaaataatccatttttggctttcatcattatccctactagatgttatgtgttcttttgcaattgtttctgcttatacctttactagcaaagggaaaaataacaatttggtgtcaatgatctggtgacaataggattacattggagccaattgaataaatttattctttcaatcatatggatcttcattaatatttttgactgaattatcaattaaaaatatttcattccctttgtgcagaaactgctaaatccagggttcgattcttgaatgaactggcaagctggctgtggtctgtagatatacatcccacattttgttgttataacagttagtagttagtattgctttcatatatagactccagaatctaaattttacgataatgacatttcttctggtcatgacaaatgtaatattttacaaatataaatctacgtagaatccaaagacacacacggagcagtcctgtctgagaaataaaaaatcaggacacccatggcatcgtagtagcccctcgcgtccagcaggtggcgaagggaggtgaggtttatttattaaatgggaccgagtgggacggggacggggcagccctaagggtagggaagcattgtcaatttctggggatagaatgagacccaggcatagctggagtttgaagctttgaagcaaaaatatctgtagaacatcttaaacgtgaccaaaatatgatgttaaaatcagcaactctttatacgttaaaaactttgaaacctgtggccgggcatggtggctcgcgcctgtaatcccagcactttgggaggccaaggcaggtggatcacctgaggtcaggagctcaagaccagcctgaccaacatggtgaaaccccgtctctactaaaaatacaaaaattagctgggcatggtggcgcatgcctataatcccagctactcggaggctgaggcaggataatcgcttgaaaccgggagacagaggttgtggtgagccgagatcacgccattgcactccagccggggcaacaagagcaaaacttcatctcaaaaaaaaaaaataaaaaaaaagaaaaaggaaaaaaacaaacaaacaacaactttgaaacctaggaacaattttggacctgttggagcagaaatgtgtagttgtcattgaaggtgtgaacataccctacctctactctacatgtggaagacctgacccacagaggacatgaacccatgaagaagagtgatgtgacatgttttgcattttattagtaccatgatctaaccaactgagctaactggccacaccattttatcctttataatgatcactatgagggctgagtgcagaatggagtgtatgtggtcaagagtggaagctgtgaggctattgcagtaatccagaaagaaaggtgacaatggcttagacttcagtggtagtgttggaaatggacataaatagacatattcaggaaatatattgatcttagatctaataagacacgtaatagattagaagtagggaaattaatgaaaaagcagaattaaggatgacttctcactggcttgaaatgctaaatggatgacggtgctgtttagtgagttggggaagactgggcgtggtgatgggtgtagaaattgagaaaggaaaatcaagaatttccagaactttcagagcaatgttaaatactttccttgatagtgggtcagtcatcatttataagtgcatttctaaaaatattgcttaattttgtttttgagctttgtataagtggaattttgtgtgtactgattattttgctcaatactatgtctttaagattctctgtattgttgcatgtggctgagtttatttttgatgctgtgtagtgttttactaattaataaatcataattcagtttttactgttctattgatggaaaaaagggtt

SEQ ID NO: 301162 - DNA, 3924 bp, Homo sapiens
ttaatattgttgccctaggtttcttttgtttaatatttgtctggattgcctgttcccataaattgacctttaatcagttagctttgttcttaagattggtttaaaacgtagaataatagggaggagcatgggagggtgggacgtctaatgtaaatccagcccagtgattacattagctgggcgctgattaggttaggatgttgcccaggtacaaggccaggatcttcgggacctggcttcatttggagttcagctaccaaaaggaaaccttcctctgggtcctggagtatttggcctgaaattgggaactcggaagttgctgctccagggcgctccctgcggagctccgccgcccgcctctccgcccggcctttcccggcgtccccacgcggggcgcaaccgcgagaaagaaacgcaggtcgcaccgtcagcgcccagagcagcgccagtttccgggcccgggctgctctcggagccatgagctgcggccgcccccctcccgacgtggacggcatgatcaccctcaaggtggacaacctgacctaccgcacctctcccgacagcttgaggcgcgtgttcgagaagtacgggcgcgtgggcgacgtgtacatcccgcgggagccccacaccaaggcgccccggggcttcgctttcgtccgctttcacgaccggcgcgacgcccaagacgccgaggccgccatggacggggcggagctggacggacgcgagctgcgggtgcaggtggcgcgctatggccgccgggacctgccccgcagccgccagggagagccacgcggcaggtccagaggcggcggctacggacggcggagccgcagctacgggcggcggagccgcagccccaggcggcgacaccgcagccgatcccggggtcccagctgctccaggtcccgcagccgatctcgctataggggttctcgctatagccggtctccctacagccgatctccttacagccggtcgcgctacagccgctctccctacagcagatctcgctacagggaatctcgctacggcggatctcactacagctcatctggttacagtaactctcgctacagccgatatcacagcagccggtctcactcgaagtctgggtcctccactagctctcgctctgcatcaacctccaaatcgagctctgcgcgaaatccaagtcaaggtcgcgatccaagaggccccccaagtctcctgaagaggaaggacagatgtcctcttaagaaaatgatgcatcaggaagcaacgtgatggaggacttgggggaaaaggatcacatactcagtctatggaagcaacgtccctggaagaagaggctgcctattgaaatgcgtagcagttgagtgatgctggttagctattaaggtggcctgttgcagtgcagagtgctgagctgcttcctgttttcttctgattgctcctggggaaaacacgccttgtcctgaagaacaaatggctgtccagtttattaaaatgcctgtcaactgcacttccagtcacccaggccttgcagataaataatggagcatgcagtgagcacatctagctgacgataatcacaccttttcccccgtcttttctgaaaaattgtaaatctgatcatatcaacatgtatgaacttaaaatatggagaatgttatggaagaaatagtttataagtttgttaagtacttataacatggtttatctttttgattattaattttttacgctaaccattgtttctgtagttaaaattgttttcttggtgttatcttttctcagaataaaattagaaacttttgatggaaagtaggttgttttattttctgtatgacttttggatatttgtacttttgagaaaattattagcaccaagtgtttctcaaaatataatttttaaaaaatccttaataggcttttagctatgtgctttattgttttatcacaatgcagtttatttgtagtttctctcttttttcctcacacctatggtttttttacttccaaaattattttcaaataatccatttttggctttcatcattatccctactagatgttatgtgttcttttgcaattgtttctgcttatacctttactagcaaagggaaaaataacaatttggtgtcaatgatctggtgacaataggattacattggagccaattgaataaatttattctttcaatcatatggatcttcattaatatttttgactgaattatcaattaaaaatatttcattccctttgtgcagaaactgctaaatccagggttcgattcttgaatgaactggcaagctggctgtggtctgtagatatacatcccacattttgttgttataacagttagtagttagtattgctttcatatatagactccagaatctaaattttacgataatgacatttcttctggtcatgacaaatgtaatattttacaaatataaatctacgtagaatccaaagacacacacggagcagtcctgtctgagaaataaaaaatcaggacacccatggcatcgtagtagcccctcgcgtccagcaggtggcgaagggaggtgaggtttatttattaaatgggaccgagtgggacggggacggggcagccctaagggtagggaagcattgtcaatttctggggatagaatgagacccaggcatagctggagtttgaagctttgaagcaaaaatatctgtagaacatcttaaacgtgaccaaaatatgatgttaaaatcagcaactctttatacgttaaaaactttgaaacctgtggccgggcatggtggctcgcgcctgtaatcccagcactttgggaggccaaggcaggtggatcacctgaggtcaggagctcaagaccagcctgaccaacatggtgaaaccccgtctctactaaaaatacaaaaattagctgggcatggtggcgcatgcctataatcccagctactcggaggctgaggcaggataatcgcttgaaaccgggagacagaggttgtggtgagccgagatcacgccattgcactccagccggggcaacaagagcaaaacttcatctcaaaaaaaaaaaataaaaaaaaagaaaaaggaaaaaaacaaacaaacaacaactttgaaacctaggaacaattttggacctgttggagcagaaatgtgtagttgtcattgaaggtgtgaacataccctacctctactctacatgtggaagacctgacccacagaggacatgaacccatgaagaagagtgatgtgacatgttttgcattttattagtaccatgatctaaccaactgagctaactggccacaccattttatcctttataatgatcactatgagggctgagtgcagaatggagtgtatgtggtcaagagtggaagctgtgaggctattgcagtaatccagaaagaaaggtgacaatggcttagacttcagtggtagtgttggaaatggacataaatagacatattcaggaaatatattgatcttagatctaataagacacgtaatagattagaagtagggaaattaatgaaaaagcagaattaaggatgacttctcactggcttgaaatgctaaatggatgacggtgctgtttagtgagttggggaagactgggcgtggtgatgggtgtagaaattgagaaaggaaaatcaagaatttccagaactttcagagcaatgttaaatactttccttgatagtgggtcagtcatcatttataagtgcatttctaaaaatattgcttaattttgtttttgagctttgtataagtggaattttgtgtgtactgattattttgctcaatactatgtctttaagattctctgtattgttgcatgtggctgagtttatttttgatgctgtgtagtgttttactaattaataaatcataattcagtttttactgttctattgatggaaaaaagggtt

SEQ ID NO: 301163 - DNA, 4137 bp, Homo sapiens
ttaatattgttgccctaggtttcttttgtttaatatttgtctggattgcctgttcccataaattgacctttaatcagttagctttgttcttaagattggtttaaaacgtagaataatagggaggagcatgggagggtgggacgtctaatgtaaatccagcccagtgattacattagctgggcgctgattaggttaggatgttgcccaggtacaaggccaggatcttcgggacctggcttcatttggagttcagctaccaaaaggaaaccttcctctgggtcctggagtatttggcctgaaattgggaactcggaagttgctgctccagggcgctccctgcggagctccgccgcccgcctctccgcccggcctttcccggcgtccccacgcggggcgcaaccgcgagaaagaaacgcaggtcgcaccgtcagcgcccagagcagcgccagtttccgggcccgggctgctctcggagccatgagctgggcggcggagccgcagccccaggcggcgacaccgcagccgatcccggggtcccagctgctccaggtcccgcagccgatctcgctataggggttctcgctatagccggtctccctacagccgatctccttacagccggtcgcgctacagccgctctccctacagcagatctcgctacagggaatctcgctacggcggatctcactacagctcatctggttacagtaactctcgctacagccgatatcacagcagccggtctcactcgaagtctgggtcctccactagctctcgctctgcatcaacctccaaatcgagctctgcgcgacgatccaagtcctcctcggtctccaggtctcgctcgcggtccaggtcttcatctatgaccaggagtcctccccgggtatccaagaggaaatccaagtcaaggtcgcgatccaagaggccccccaagtctcctgaagaggaaggacagatgtcctcttaagaaaatgatgcatcaggaagcaacgtgatggaggacttgggggaaaaggatcacatactcagtctatggaagcaacgtccctggaagaagaggctgcctattgaaaaggttgtgtcacacttttctacctttttgccagtttgaagctttgcatcaggtggcaaaattcattctatgtgccgttttgttgttattcacattttattgtaacttaggaggtgaacgacctaagattacgttattgggtttggatatttgaggcaaaaatttatttttatttctatagtgatgactgttttggtttgaaatgaacagattggtaacctaatttgtggcctcctgacttttaaggaaacgtgtgcagccattacacacagcctaacgctgtcaagacattgcttcaacattgccttcattccttaaaaacctacaaaaggtggtgtaaattaatatggataattttatttacctccaggtctaaaaggtagtgtgacccaaatttgtataaagatttttcatgtgaaaggactggggttttagcaaacacaggtctaatctcttttgtgtttttgtgcaccaggcccggctgcgtagcagttgagtgatgctggttagctattaaggtggcctgttgcagtgcagagtgctgagctgcttcctgttttcttctgattgctcctggggaaaacacgccttgtcctgaagaacaaatggctgtccagtttattaaaatgcctgtcaactgcacttccagtcacccaggccttgcagataaataatggagcatgcagtgagcacatctagctgacgataatcacaccttttcccccgtcttttctgaaaaattgtaaatctgatcatatcaacatgtatgaacttaaaatatggagaatgttatggaagaaatagtttataagtttgttaagtacttataacatggtttatctttttgattattaattttttacgctaaccattgtttctgtagttaaaattgttttcttggtgttatcttttctcagaataaaattagaaacttttgatggaaagtaggttgttttattttctgtatgacttttggatatttgtacttttgagaaaattattagcaccaagtgtttctcaaaatataatttttaaaaaatccttaataggcttttagctatgtgctttattgttttatcacaatgcagtttatttgtagtttctctcttttttcctcacacctatggtttttttacttccaaaattattttcaaataatccatttttggctttcatcattatccctactagatgttatgtgttcttttgcaattgtttctgcttatacctttactagcaaagggaaaaataacaatttggtgtcaatgatctggtgacaataggattacattggagccaattgaataaatttattctttcaatcatatggatcttcattaatatttttgactgaattatcaattaaaaatatttcattccctttgtgcagaaactgctaaatccagggttcgattcttgaatgaactggcaagctggctgtggtctgtagatatacatcccacattttgttgttataacagttagtagttagtattgctttcatatatagactccagaatctaaattttacgataatgacatttcttctggtcatgacaaatgtaatattttacaaatataaatctacgtagaatccaaagacacacacggagcagtcctgtctgagaaataaaaaatcaggacacccatggcatcgtagtagcccctcgcgtccagcaggtggcgaagggaggtgaggtttatttattaaatgggaccgagtgggacggggacggggcagccctaagggtagggaagcattgtcaatttctggggatagaatgagacccaggcatagctggagtttgaagctttgaagcaaaaatatctgtagaacatcttaaacgtgaccaaaatatgatgttaaaatcagcaactctttatacgttaaaaactttgaaacctgtggccgggcatggtggctcgcgcctgtaatcccagcactttgggaggccaaggcaggtggatcacctgaggtcaggagctcaagaccagcctgaccaacatggtgaaaccccgtctctactaaaaatacaaaaattagctgggcatggtggcgcatgcctataatcccagctactcggaggctgaggcaggataatcgcttgaaaccgggagacagaggttgtggtgagccgagatcacgccattgcactccagccggggcaacaagagcaaaacttcatctcaaaaaaaaaaaataaaaaaaaagaaaaaggaaaaaaacaaacaaacaacaactttgaaacctaggaacaattttggacctgttggagcagaaatgtgtagttgtcattgaaggtgtgaacataccctacctctactctacatgtggaagacctgacccacagaggacatgaacccatgaagaagagtgatgtgacatgttttgcattttattagtaccatgatctaaccaactgagctaactggccacaccattttatcctttataatgatcactatgagggctgagtgcagaatggagtgtatgtggtcaagagtggaagctgtgaggctattgcagtaatccagaaagaaaggtgacaatggcttagacttcagtggtagtgttggaaatggacataaatagacatattcaggaaatatattgatcttagatctaataagacacgtaatagattagaagtagggaaattaatgaaaaagcagaattaaggatgacttctcactggcttgaaatgctaaatggatgacggtgctgtttagtgagttggggaagactgggcgtggtgatgggtgtagaaattgagaaaggaaaatcaagaatttccagaactttcagagcaatgttaaatactttccttgatagtgggtcagtcatcatttataagtgcatttctaaaaatattgcttaattttgtttttgagctttgtataagtggaattttgtgtgtactgattattttgctcaatactatgtctttaagattctctgtattgttgcatgtggctgagtttatttttgatgctgtgtagtgttttactaattaataaatcataattcagtttttactgttctattgatggaaaaaagggtt

SEQ ID NO: 301164 - DNA, 1891 bp, Homo sapiens
ttaatattgttgccctaggtttcttttgtttaatatttgtctggattgcctgttcccataaattgacctttaatcagttagctttgttcttaagattggtttaaaacgtagaataatagggaggagcatgggagggtgggacgtctaatgtaaatccagcccagtgattacattagctgggcgctgattaggttaggatgttgcccaggtacaaggccaggatcttcgggacctggcttcatttggagttcagctaccaaaaggaaaccttcctctgggtcctggagtatttggcctgaaattgggaactcggaagttgctgctccagggcgctccctgcggagctccgccgcccgcctctccgcccggcctttcccggcgtccccacgcggggcgcaaccgcgagaaagaaacgcaggtcgcaccgtcagcgcccagagcagcgccagtttccgggcccgggctgctctcggagccatgagctgcggccgcccccctcccgacgtggacggcatgatcaccctcaaggtggacaacctgacctaccgcacctctcccgacagcttgaggcgcgtgttcgagaagtacgggcgcgtgggcgacgtgtacatcccgcgggagccccacaccaaggcgccccggggcttcgctttcgtccgctttcacgaccggcgcgacgcccaagacgccgaggccgccatggacggggcggagctggacggacgcgagctgcgggtgcaggtggcgcgctatggccgccgggacctgccccgcagccgccagggagagccacgcggcaggtccagaggcggcggctacggacggcggagccgcagctacgggcggcggagccgcagccccaggcggcgacaccgcagccgatcccggggtcccagctgctccaggtcccgcagccgatctcgctataggggttctcgctatagccggtctccctacagccgatctccttacagccggtcgcgctacagccgctctccctacagcagatctcgctacagggaatctcgctacggcggatctcactacagctcatctggttacagtaactctcgctacagccgatatcacagcagccggtctcactcgaagtctgggtcctccactagctctcgctctgcatcaacctccaaatcgagctctgcgcgacgatccaagtcctcctcggtctccaggtctcgctcgcggtccaggtcttcatctatgaccaggagtcctccccgggtatccaagaggaaatccaagtcaaggtcgcgatccaagaggccccccaagtctcctgaagaggaaggacagatgtcctcttaagaaaatgatgcatcaggaagcaacgtgatggaggacttgggggaaaaggatcacatactcagtctatggaagcaacgtccctggaagaagaggctgcctattgaaatgcgtagcagttgagtgatgctggttagctattaaggtggcctgttgcagtgcagagtgctgagctgcttcctgttttcttctgattgctcctggggaaaacacgccttgtcctgaagaacaaatggctgtccagtttattaaaatgcctgtcaactgcacttccagtcacccaggccttgcagataaataatggagcatgcagtgagcacatctagctgacgataatcacaccttttcccccgtcttttctgaaaaattgtaaatctgatcatatcaacatgtatgaacttaaaatatggagaatgttatggaagaaatagtttataagtttgttaagtacttataacatggtttatctttttgattattaattttttacgctaaccattgtttctgtagttaaaattgttttcttggtgttatcttttctcagaataaaattagaaacttttgatgg

SEQ ID NO: 301165 - DNA, 1598 bp, Homo sapiens
ttaatattgttgccctaggtttcttttgtttaatatttgtctggattgcctgttcccataaattgacctttaatcagttagctttgttcttaagattggtttaaaacgtagaataatagggaggagcatgggagggtgggacgtctaatgtaaatccagcccagtgattacattagctgggcgctgattaggttaggatgttgcccaggtacaaggccaggatcttcgggacctggcttcatttggagttcagctaccaaaaggaaaccttcctctgggtcctggagtatttggcctgaaattgggaactcggaagttgctgctccagggcgctccctgcggagctccgccgcccgcctctccgcccggcctttcccggcgtccccacgcggggcgcaaccgcgagaaagaaacgcaggtcgcaccgtcagcgcccagagcagcgccagtttccgggcccgggctgctctcggagccatgagctgcggccgcccccctcccgacgtggacggcatgatcaccctcaaggtggacaacctgacctaccgcacctctcccgacagcttgaggcgcgtgttcgagaagtacgggcgcgtgggcgacgtgtacatcccgcgggagccccacaccaaggcgccccggggcttcgctttcgtccgctttcacgaccggcgcgacgcccaagacgccgaggccgccatggacggggcggagctggacggacgcgagctgcgggtgcaggtggcgcgctatggccgccgggacctgccccgcagccgccagggagagccacgcggcaggtccagaggcggcggctacggacggcggagccgcagctacgggcggcggagccgcagccccaggcggcgacaccgcagccgatcccggggtcccagctgctccaggtcccgcagccgatctcgctataggggttctcgctatagccggtctccctacagccgatctccttacagccggtcgcgctacagccgctctccctacagcagatctcgctacagggaatctcgctacggcggatctcactacagctcatctggttacagtaactctcgctacagccgatatcacagcagccggtctcactcgaagtctgggtcctccactagctctcgctctgcatcaacctccaaatcgagctctgcgcgacgatccaagtcctcctcggtctccaggtctcgctcgcggtccaggtcttcatctatgaccaggagtcctccccgggtatccaagaggaaatccaagtcaaggtcgcgatccaagaggccccccaagtctcctgaagaggaaggacagatgtcctcttaagaaaatgatgcatcaggaagcaacgtgatggaggacttgggggaaaaggatcacatactcagtctatggaagcaacgtccctggaagaagaggctgcctattgaaaaggttgtgtcacacttttctacctttttgccagtttgaagctttgcatcaggtggcaaaattcattctatgtgccgttttgttgttattcacattttattgtaacttaggaggtgaacgacctaagattacaataaaatgtgaattacaacaaaatgaaccatagt

SEQ ID NO: 301166 - DNA, 2652 bp, Homo sapiens
caatacacagatcatatagaaacaagtcatgagaacaagaggctgcctattgaaaaagccaggatagaataatgcgtagcagttgagtgatgctggttagctattaaggtggcctgttgcagtgcagagtgctgagctgcttcctgttttcttctgattgctcctggggaaaacacgccttgtcctgaagaacaaatggctgtccagtttattaaaatgcctgtcaactgcacttccagtcacccaggccttgcagataaataatggagcatgcagtgagcacatctagctgacgataatcacaccttttcccccgtcttttctgaaaaattgtaaatctgatcatatcaacatgtatgaacttaaaatatggagaatgttatggaagaaatagtttataagtttgttaagtacttataacatggtttatctttttgattattaattttttacgctaaccattgtttctgtagttaaaattgttttcttggtgttatcttttctcagaataaaattagaaacttttgatggaaagtaggttgttttattttctgtatgacttttggatatttgtacttttgagaaaattattagcaccaagtgtttctcaaaatataatttttaaaaaatccttaataggcttttagctatgtgctttattgttttatcacaatgcagtttatttgtagtttctctcttttttcctcacacctatggtttttttacttccaaaattattttcaaataatccatttttggctttcatcattatccctactagatgttatgtgttcttttgcaattgtttctgcttatacctttactagcaaagggaaaaataacaatttggtgtcaatgatctggtgacaataggattacattggagccaattgaataaatttattctttcaatcatatggatcttcattaatatttttgactgaattatcaattaaaaatatttcattccctttgtgcagaaactgctaaatccagggttcgattcttgaatgaactggcaagctggctgtggtctgtagatatacatcccacattttgttgttataacagttagtagttagtattgctttcatatatagactccagaatctaaattttacgataatgacatttcttctggtcatgacaaatgtaatattttacaaatataaatctacgtagaatccaaagacacacacggagcagtcctgtctgagaaataaaaaatcaggacacccatggcatcgtagtagcccctcgcgtccagcaggtggcgaagggaggtgaggtttatttattaaatgggaccgagtgggacggggacggggcagccctaagggtagggaagcattgtcaatttctggggatagaatgagacccaggcatagctggagtttgaagctttgaagcaaaaatatctgtagaacatcttaaacgtgaccaaaatatgatgttaaaatcagcaactctttatacgttaaaaactttgaaacctgtggccgggcatggtggctcgcgcctgtaatcccagcactttgggaggccaaggcaggtggatcacctgaggtcaggagctcaagaccagcctgaccaacatggtgaaaccccgtctctactaaaaatacaaaaattagctgggcatggtggcgcatgcctataatcccagctactcggaggctgaggcaggataatcgcttgaaaccgggagacagaggttgtggtgagccgagatcacgccattgcactccagccggggcaacaagagcaaaacttcatctcaaaaaaaaaaaataaaaaaaaagaaaaaggaaaaaaacaaacaaacaacaactttgaaacctaggaacaattttggacctgttggagcagaaatgtgtagttgtcattgaaggtgtgaacataccctacctctactctacatgtggaagacctgacccacagaggacatgaacccatgaagaagagtgatgtgacatgttttgcattttattagtaccatgatctaaccaactgagctaactggccacaccattttatcctttataatgatcactatgagggctgagtgcagaatggagtgtatgtggtcaagagtggaagctgtgaggctattgcagtaatccagaaagaaaggtgacaatggcttagacttcagtggtagtgttggaaatggacataaatagacatattcaggaaatatattgatcttagatctaataagacacgtaatagattagaagtagggaaattaatgaaaaagcagaattaaggatgacttctcactggcttgaaatgctaaatggatgacggtgctgtttagtgagttggggaagactgggcgtggtgatgggtgtagaaattgagaaaggaaaatcaagaatttccagaactttcagagcaatgttaaatactttccttgatagtgggtcagtcatcatttataagtgcatttctaaaaatattgcttaattttgtttttgagctttgtataagtggaattttgtgtgtactgattattttgctcaatactatgtctttaagattctctgtattgttgcatgtggctgagtttatttttgatgctgtgtagtgttttactaattaataaatcataattcagtttttactgttctattgatggaaaaaagggtt

SEQ ID NO: 301167 - DNA, 1027 bp, Homo sapiens
  misc_feature (1)..(1): n is a, c, g, or t
  misc_feature (4)..(4): n is a, c, g, or t
  misc_feature (6)..(6): n is a, c, g, or t
ngcncnggcggaggctcagtctgcgcgcaggaccggcccaagtccggggcccccgtgtccctcgcgtccctcctcccggcccgggcccctcgcccgtggccgccccggccccttttgcggagaggcagagactccgcgcgtcgccatttctggactaggctgttgctttctgtgctttttctgcgggcgcctctgcaaacggcggcgccggggaccgaccccccgcccgggctcggggcgctgctggcgtgtcccggggttccggcctcgaggtgtgcccgccagggctctggaggcgttcagttgcatttgggccgggggaccgggccggaggggctcggaggacatgagagcctggcttcggcggccttcgtcttccagagaggaggttcagatgagcccctgctgacttgagagagacagagagaccacgccgattgctgagaggaactggaagaagaaaaattcccagactcagtgggaagagctccctcaccatgagtagcgctatgttggtgacttgcctcccggaccccagcagcagcttccgtgaggatgccccgcggcccccagtgccaggggaagaaggggagaccccaccgtgtcagccaggggtgggcaagggccaggtcaccaaacccatgcctgtctcttccaacaccaggcggaacgaagatgggttgggggagccggaggggcgggcatctccggattcccctctgacccggtggaccaagtccttacactccttattgggcgatcaagacggtgcttacctgttccgaactttcctggagagggagaaatgcgtggataccttagacttctggtttgcctgcaatggattcaggcagatgaacctgaaggataccaaaactttacgagtagccaatgacttttgtcatgacattttgttctacttatactgtaaattatgcattataaagagttcatttaaggaaaattacttggtacaataattattgtaattaagagatgtagcctttattaaaattttatatttttc

SEQ ID NO: 301168 - DNA, 3480 bp, Homo sapiens
  misc_feature (1)..(1): n is a, c, g, or t
  misc_feature (4)..(4): n is a, c, g, or t
  misc_feature (6)..(6): n is a, c, g, or t
ngcncnggcggaggctcagtctgcgcgcaggaccggcccaagtccggggcccccgtgtccctcgcgtccctcctcccggcccgggcccctcgcccgtggccgccccggccccttttgcggagaggcagagactccgcgcgtcgccatttctggactaggctgttgctttctgtgctttttctgcgggcgcctctgcaaacggcggcgccggggaccgaccccccgcccgggctcggggcgctgctggcgtgtcccggggttccggcctcgaggtgtgcccgccagggctctggaggcgttcagttgcatttgggccgggggaccgggccggaggggctcggaggacatgagagcctggcttcggcggccttcgtcttccagagaggaggttcagatgagcccctgctgacttgagagagacagagagaccacgccgattgctgagaggaactggaagaagaaaaattcccagactcagtgggaagagctccctcaccatgagtagcgctatgttggtgacttgcctcccggaccccagcagcagcttccgtgaggatgccccgcggcccccagtgccaggggaagaaggggagaccccaccgtgtcagccaggggtgggcaagggccaggtcaccaaacccatgcctgtctcttccaacaccaggcggaacgaagatgggttgggggagccggaggggcgggcatctccggattcccctctgacccggtggaccaagtccttacactccttattgggcgatcaagacggtgcttacctgttccgaactttcctggagagggagaaatgcgtggataccttagacttctggtttgcctgcaatggattcaggcagatgaacctgaaggataccaaaactttacgagtagccaaagcgatctacaaaaggtacattgagaacaacagcattgtctccaagcagctgaagcctgccaccaagacctacataagagatggcatcaagaagcagcagattgattccatcatgtttgaccaggcgcagaccgagatccagtcggtgatggaggaaaatgcctaccagatgtttttgacttctgatatatacctcgaatatgtgaggagtgggggagaaaacacagcttacatgagtaatgggggactcgggagcctaaaggtcgtgtgtggctatctccccaccttgaatgaagaagaggagtggacttgtgccgacttcaagtgcaaactttcgccaaccgtggttggcttgtccagcaaaactctgagggccacggcgagtgtgaggtccacggaaactgttgacagtggatacaggtccttcaagaggagcgatcctgttaatccttatcacataggttctggctatgtctttgcaccagccaccagcgccaacgacagtgagatatccagtgatgcgctgacggatgattccatgtccatgacggacagcagtgtagatggaattcctccttatcgtgtgggcagtaagaaacagctccagagagaaatgcatcgcagtgtgaaggccaatggccaagtgtctctacctcatttcccgagaacccaccgcctgcccaaggagatgacccccgtggaacccgccacctttgcagctgagctgatctcgaggctggaaaagctgaagctggagttggagagccgccacagcctggaggagcgcctgcagcagatccgagaggatgaagagagagagggctccgagctcacactcaattcgcgggagggggcgcccacgcagcaccccctctccctactgccctccggcagctacgaggaagacccgcagacgatactggacgatcacctgtccagggtcctcaagacccctggctgccagtctccgggcgtaggccgctatagccctcgctcccgctccccggaccaccaccaccaccaccattcgcagtaccactccctgctcccgcccggtggcaagctgcctcccgcggccgcctcgccgggcgcctgccccctcctcgggggcaaaggctttgtgaccaagcagacgacgaagcatgtccaccaccactacatccaccaccatgccgtccccaagaccaaggaggagatcgaggcggaggccacgcagcgggtgcactgcttctgccctgggggcagcgagtattactgctactcgaaatgcaaaagccactccaaggctccggaaaccatgcccagcgagcagtttggcggcagcagaggcagtaccttgcccaaacgcaatgggaaaggcacggagccgggcctggccctgcccgccagggaaggaggggcccccggcggagctggggccctgcagcttccccgggaggaaggagacaggtcgcaggatgtctggcagtggatgctggagagtgagcggcagagcaagcccaagccccatagtgcccaaagcacaaaaaaggcctaccccttggagtctgcccgctcgtctccaggcgaacgagccagccggcaccatctgtgggggggcaacagcgggcacccccgcaccaccccccgtgcccacctgttcacccaggaccctgcgatgcctcccctgaccccacccaacacgctggctcagctggaggaggcctgtcgcaggctagctgaggtgtcgaagcccccaaagcagcggtgctgtgtggccagtcagcagagggacaggaatcattcggccactgttcagacgggagccacacccttctccaatccaagcctggctccagaagatcacaaagagccaaagaaactggcaggtgtccacgcgctccaggccagtgagttggttgtcacttactttttctgtggggaagaaattccataccggaggatgctgaaggctcagagcttgaccctgggccactttaaagagcagctcagcaaaaagggaaattataggtattacttcaaaaaagcaagcgatgagtttgcctgtggagcggtgtttgaggagatctgggaggatgagacggtgctcccgatgtatgaaggccggattctgggcaaagtggagcggatcgattgagccctggggtctggctttggtgaactgttggagcccgaagctcttgtgaactgtcttggctgtgagcaactgcgacaaaacattttgaaggaaaattaaaccaatgaagaagacaaagtctaaggaagaatcggccagtgggcttcgggagggcggggggaggttgattttcatgattcatgagctgggtactgactgagataagaaaagcctgaactatttattaaaaacatgaccactcttggctattgaagatgctgcctgtatttgagagactgccatacataatatatgacttcctagggatctgaaatccataaactaagagaaactgtgtatagcttacctgaacaggaatccttactgatatttatagaacagttgatttcccccatccccagtttatggatatgctgctttaaacttgggaagggggagacaggtaagtttt

SEQ ID NO: 301169 - DNA, 3196 bp, Homo sapiens
cagcccgagagccgggaaataaaaataacccctcagagcgatggatttcggggccgcccggcggccgaggcgcccgccgaaggccctgctgtaaaagagaggaggttcagatgagcccctgctgacttgagagagacagagagaccacgccgattgctgagaggaactggaagaagaaaaattcccagactcagtgggaagagctccctcaccatgagtagcgctatgttggtgacttgcctcccggaccccagcagcagcttccgtgaggatgccccgcggcccccagtgccaggggaagaaggggagaccccaccgtgtcagccaggggtgggcaagggccaggtcaccaaacccatgcctgtctcttccaacaccaggcggaacgaagatgggttgggggagccggaggggcgggcatctccggattcccctctgacccggtggaccaagtccttacactccttattgggcgatcaagacggtgcttacctgttccgaactttcctggagagggagaaatgcgtggataccttagacttctggtttgcctgcaatggattcaggcagatgaacctgaaggataccaaaactttacgagtagccaaagcgatctacaaaaggtacattgagaacaacagcattgtctccaagcagctgaagcctgccaccaagacctacataagagatggcatcaagaagcagcagattgattccatcatgtttgaccaggcgcagaccgagatccagtcggtgatggaggaaaatgcctaccagatgtttttgacttctgatatatacctcgaatatgtgaggagtgggggagaaaacacagcttacatgagtaatgggggactcgggagcctaaaggtcgtgtgtggctatctccccaccttgaatgaagaagaggagtggacttgtgccgacttcaagtgcaaactttcgccaaccgtggttggcttgtccagcaaaactctgagggccacggcgagtgtgaggtccacggaaactgttgacagtggatacaggtccttcaagaggagcgatcctgttaatccttatcacataggttctggctatgtctttgcaccagccaccagcgccaacgacagtgagatatccagtgatgcgctgacggatgattccatgtccatgacggacagcagtgtagatggaattcctccttatcgtgtgggcagtaagaaacagctccagagagaaatgcatcgcagtgtgaaggccaatggccaagtgtctctacctcatttcccgagaacccaccgcctgcccaaggagatgacccccgtggaacccgccacctttgcagctgagctgatctcgaggctggaaaagctgaagctggagttggagagccgccacagcctggaggagcgcctgcagcagatccgagaggatgaagagagagagggctccgagctcacactcaattcgcgggagggggcgcccacgcagcaccccctctccctactgccctccggcagctacgaggaagacccgcagacgatactggacgatcacctgtccagggtcctcaagacccctggctgccagtctccgggcgtaggccgctatagccctcgctcccgctccccggaccaccaccaccaccaccattcgcagtaccactccctgctcccgcccggtggcaagctgcctcccgcggccgcctcgccgggcgcctgccccctcctcgggggcaaaggctttgtgaccaagcagacgacgaagcatgtccaccaccactacatccaccaccatgccgtccccaagaccaaggaggagatcgaggcggaggccacgcagcgggtgcactgcttctgccctgggggcagcgagtattactgctactcgaaatgcaaaagccactccaaggctccggaaaccatgcccagcgagcagtttggcggcagcagaggcagtaccttgcccaaacgcaatgggaaaggcacggagccgggcctggccctgcccgccagggaaggaggggcccccggcggagctggggccctgcagcttccccgggaggaaggagacaggtcgcaggatgtctggcagtggatgctggagagtgagcggcagagcaagcccaagccccatagtgcccaaagcacaaaaaaggcctaccccttggagtctgcccgctcgtctccaggcgaacgagccagccggcaccatctgtgggggggcaacagcgggcacccccgcaccaccccccgtgcccacctgttcacccaggaccctgcgatgcctcccctgaccccacccaacacgctggctcagctggaggaggcctgtcgcaggctagctgaggtgtcgaagcccccaaagcagcggtgctgtgtggccagtcagcagagggacaggaatcattcggccactgttcagacgggagccacacccttctccaatccaagcctggctccagaagatcacaaagagccaaagaaactggcaggtgtccacgcgctccaggccagtgagttggttgtcacttactttttctgtggggaagaaattccataccggaggatgctgaaggctcagagcttgaccctgggccactttaaagagcagctcagcaaaaagggaaattataggtattacttcaaaaaagcaagcgatgagtttgcctgtggagcggtgtttgaggagatctgggaggatgagacggtgctcccgatgtatgaaggccggattctgggcaaagtggagcggatcgattgagccctggggtctggctttggtgaactgttggagcccgaagctcttgtgaactgtcttggctgtgagcaactgcgacaaaacattttgaaggaaaattaaaccaatgaagaagacaaagtctaaggaagaatcggccagtgggcttcgggagggcggggggaggttgattttcatgattcatgagctgggtactgactgagataagaaaagcctgaactatttattaaaaacatgaccactcttggctattgaagatgctgcctgtatttgagagactgccatacataatatatgacttcctagggatctgaaatccataaactaagagaaactgtgtatagcttacctgaacaggaatccttactgatatttatagaacagttgatttcccccatccccagtttatggatatgctgctttaaacttgggaagggggagacaggtaagtttt

SEQ ID NO: 301170 - DNA, 3228 bp, Homo sapiens
gttccccgacgccgcggccggcccgggggggcccggggctgccgccgcgagccgagccgggggccggggccgggcccctgccaggggcgcctgcgaggtctcgccgccgagcgcgcgcggggatcaatgagaggaggttcagatgagcccctgctgacttgagagagacagagagaccacgccgattgctgagaggaactggaagaagaaaaattcccagactcagtgggaagagctccctcaccatgagtagcgctatgttggtgacttgcctcccggaccccagcagcagcttccgtgaggatgccccgcggcccccagtgccaggggaagaaggggagaccccaccgtgtcagccaggggtgggcaagggccaggtcaccaaacccatgcctgtctcttccaacaccaggcggaacgaagatgggttgggggagccggaggggcgggcatctccggattcccctctgacccggtggaccaagtccttacactccttattgggcgatcaagacggtgcttacctgttccgaactttcctggagagggagaaatgcgtggataccttagacttctggtttgcctgcaatggattcaggcagatgaacctgaaggataccaaaactttacgagtagccaaagcgatctacaaaaggtacattgagaacaacagcattgtctccaagcagctgaagcctgccaccaagacctacataagagatggcatcaagaagcagcagattgattccatcatgtttgaccaggcgcagaccgagatccagtcggtgatggaggaaaatgcctaccagatgtttttgacttctgatatatacctcgaatatgtgaggagtgggggagaaaacacagcttacatgagtaatgggggactcgggagcctaaaggtcgtgtgtggctatctccccaccttgaatgaagaagaggagtggacttgtgccgacttcaagtgcaaactttcgccaaccgtggttggcttgtccagcaaaactctgagggccacggcgagtgtgaggtccacggaaactgttgacagtggatacaggtccttcaagaggagcgatcctgttaatccttatcacataggttctggctatgtctttgcaccagccaccagcgccaacgacagtgagatatccagtgatgcgctgacggatgattccatgtccatgacggacagcagtgtagatggaattcctccttatcgtgtgggcagtaagaaacagctccagagagaaatgcatcgcagtgtgaaggccaatggccaagtgtctctacctcatttcccgagaacccaccgcctgcccaaggagatgacccccgtggaacccgccacctttgcagctgagctgatctcgaggctggaaaagctgaagctggagttggagagccgccacagcctggaggagcgcctgcagcagatccgagaggatgaagagagagagggctccgagctcacactcaattcgcgggagggggcgcccacgcagcaccccctctccctactgccctccggcagctacgaggaagacccgcagacgatactggacgatcacctgtccagggtcctcaagacccctggctgccagtctccgggcgtaggccgctatagccctcgctcccgctccccggaccaccaccaccaccaccattcgcagtaccactccctgctcccgcccggtggcaagctgcctcccgcggccgcctcgccgggcgcctgccccctcctcgggggcaaaggctttgtgaccaagcagacgacgaagcatgtccaccaccactacatccaccaccatgccgtccccaagaccaaggaggagatcgaggcggaggccacgcagcgggtgcactgcttctgccctgggggcagcgagtattactgctactcgaaatgcaaaagccactccaaggctccggaaaccatgcccagcgagcagtttggcggcagcagaggcagtaccttgcccaaacgcaatgggaaaggcacggagccgggcctggccctgcccgccagggaaggaggggcccccggcggagctggggccctgcagcttccccgggaggaaggagacaggtcgcaggatgtctggcagtggatgctggagagtgagcggcagagcaagcccaagccccatagtgcccaaagcacaaaaaaggcctaccccttggagtctgcccgctcgtctccaggcgaacgagccagccggcaccatctgtgggggggcaacagcgggcacccccgcaccaccccccgtgcccacctgttcacccaggaccctgcgatgcctcccctgaccccacccaacacgctggctcagctggaggaggcctgtcgcaggctagctgaggtgtcgaagcccccaaagcagcggtgctgtgtggccagtcagcagagggacaggaatcattcggccactgttcagacgggagccacacccttctccaatccaagcctggctccagaagatcacaaagagccaaagaaactggcaggtgtccacgcgctccaggccagtgagttggttgtcacttactttttctgtggggaagaaattccataccggaggatgctgaaggctcagagcttgaccctgggccactttaaagagcagctcagcaaaaagggaaattataggtattacttcaaaaaagcaagcgatgagtttgcctgtggagcggtgtttgaggagatctgggaggatgagacggtgctcccgatgtatgaaggccggattctgggcaaagtggagcggatcgattgagccctggggtctggctttggtgaactgttggagcccgaagctcttgtgaactgtcttggctgtgagcaactgcgacaaaacattttgaaggaaaattaaaccaatgaagaagacaaagtctaaggaagaatcggccagtgggcttcgggagggcggggggaggttgattttcatgattcatgagctgggtactgactgagataagaaaagcctgaactatttattaaaaacatgaccactcttggctattgaagatgctgcctgtatttgagagactgccatacataatatatgacttcctagggatctgaaatccataaactaagagaaactgtgtatagcttacctgaacaggaatccttactgatatttatagaacagttgatttcccccatccccagtttatggatatgctgctttaaacttgggaagggggagacaggtaagtttt

SEQ ID NO: 301171 - DNA, 3285 bp, Homo sapiens
  misc_feature (1)..(1): n is a, c, g, or t
  misc_feature (4)..(4): n is a, c, g, or t
  misc_feature (6)..(6): n is a, c, g, or t
ngcncnggcggaggctcagtctgcgcgcaggaccggcccaagtccggggcccccgtgtccctcgcgtccctcctcccggcccgggcccctcgcccgtggccgccccggccccttttgcggagaggcagagactccgcgcgtcgccatttctggactaggctgttgctttctgtgctttttctgcgggcgcctctgcaaacggcggcgccggggaccgaccccccgcccgggctcggggcgctgctggcgtgtcccggggttccggcctcgaggtgtgcccgccagggctctggaggcgttcagttgcatttgggccgggggaccgggccggaggggctcggaggacatgagagcctggcttcggcggccttcgtcttccagagaggaggttcagatgagcccctgctgacttgagagagacagagagaccacgccgattgctgagaggaactggaagaagaaaaattcccagactcagtgggaagagctccctcaccatgagtagcgctatgttggtgacttgcctcccggaccccagcagcagcttccgtgaggatgccccgcggcccccagtgccaggggaagaaggggagaccccaccgtgtcagccaggggtgggcaagggccaggtcaccaaacccatgcctgtctcttccaacaccaggcggaacgaagatgggttgggggagccggaggggcgggcatctccggattcccctctgacccggtggaccaagtccttacactccttattgggcgatcaagacggtgcttacctgttccgaactttcctggagagggagaaatgcgtggataccttagacttctggtttgcctgcaatggattcaggcagatgaacctgaaggataccaaaactttacgagtagccaaagcgatctacaaaaggtacattgagaacaacagcattgtctccaagcagctgaagcctgccaccaagacctacataagagatggcatcaagaagcagcagattgattccatcatgtttgaccaggcgcagaccgagatccagtcggtgatggaggaaaatgcctaccagatgtttttgacttctgatatatacctcgaatatgtgaggagtgggggagaaaacacagcttacatgagtaatgggggactcgggagcctaaaggtcgtgtgtggctatctccccaccttgaatgaagaagaggagtggacttgtgccgacttcaagtgcaaactttcgccaaccgtggttggcttgtccagcaaaactctgagggccacggcgagtgtgaggtccacggaaactgttgacagtggatacaggtccttcaagaggagcgatcctgttaatccttatcacataggttctggctatgtctttgcaccagccaccagcgccaacgacagtgagatatccagtgatgcgctgacggatgattccatgtccatgacggacagcagtgtagatggaattcctccttatcgtgtgggcagtaagaaacagctccagagagaaatgcatcgcagtgtgaaggccaatggccaagtgtctctacctcatttcccgagaacccaccgcctgcccaaggagatgacccccgtggaacccgccacctttgcagctgagctgatctcgaggctggaaaagctgaagctggagttggagagccgccacagcctggaggagcgcctgcagcagatccgagaggatgaagagagagagggctccgagctcacactcaattcgcgggagggggcgcccacgcagcaccccctctccctactgccctccggcagctacgaggaagacccgcagacgatactggacgatcacctgtccagggtcctcaagacccctggctgccagtctccgggcgtaggccgctatagccctcgctcccgctccccggaccaccaccaccaccaccattcgcagtaccactccctgctcccgcccggtggcaagctgcctcccgcggccgcctcgccgggcgcctgccccctcctcgggggcaaaggctttgtgaccaagcagacgacgaagcatgtccaccaccactacatccaccaccatgccgtccccaagaccaaggaggagatcgaggcggaggccacgcagcgggtgcactgcttctgccctgggggcagcgagtattactgctactcgaaatgcaaaagccactccaaggctccggaaaccatgcccagcgagcagtttggtgcccaaagcacaaaaaaggcctaccccttggagtctgcccgctcgtctccaggcgaacgagccagccggcaccatctgtgggggggcaacagcgggcacccccgcaccaccccccgtgcccacctgttcacccaggaccctgcgatgcctcccctgaccccacccaacacgctggctcagctggaggaggcctgtcgcaggctagctgaggtgtcgaagcccccaaagcagcggtgctgtgtggccagtcagcagagggacaggaatcattcggccactgttcagacgggagccacacccttctccaatccaagcctggctccagaagatcacaaagagccaaagaaactggcaggtgtccacgcgctccaggccagtgagttggttgtcacttactttttctgtggggaagaaattccataccggaggatgctgaaggctcagagcttgaccctgggccactttaaagagcagctcagcaaaaagggaaattataggtattacttcaaaaaagcaagcgatgagtttgcctgtggagcggtgtttgaggagatctgggaggatgagacggtgctcccgatgtatgaaggccggattctgggcaaagtggagcggatcgattgagccctggggtctggctttggtgaactgttggagcccgaagctcttgtgaactgtcttggctgtgagcaactgcgacaaaacattttgaaggaaaattaaaccaatgaagaagacaaagtctaaggaagaatcggccagtgggcttcgggagggcggggggaggttgattttcatgattcatgagctgggtactgactgagataagaaaagcctgaactatttattaaaaacatgaccactcttggctattgaagatgctgcctgtatttgagagactgccatacataatatatgacttcctagggatctgaaatccataaactaagagaaactgtgtatagcttacctgaacaggaatccttactgatatttatagaacagttgatttcccccatccccagtttatggatatgctgctttaaacttgggaagggggagacaggtaagtttt

SEQ ID NO: 301172 - DNA, 1488 bp, Homo sapiens
caccatggcctaggtctgggctggctgcaggccctgcctcatggcctctgagccctccactgccccagggccttgggccctctgcagatctcatccaggatttattggtgtccagtggggtgagggaggcctgtctgaaggccgagcctccctgcctgcacccaagttagaaatgggggtaccagcacttagcttctctctgagtgctggctcccaaggaagggacctgggacctgggccacagtgggggcttgcccttacctcttcagaaggaagcatcttccacagcccccacccaactttcttaggagtgatctggtggccagaacaggattttgcacggccccttttatcctgcgcatgtggcctagggtcatccccagcccatccctgtgtcagccctgagtgctggacactgcgttccagaaatgaggaagaggagagagaagagatggacagacctcagatccattaaagtgttctcacttccctgagacttggttctgggtccttaaaaccaggtttcctaggctgggaccctgtacatagttggtgtttaatgagtgtttatggagaggagagttctaaggtcacctctggctgcaggcatccagggattattccagcaatctgcaggtagggagtgggtcccagcctgggagcctgctgtcaggagcaggcagacctggactcacagcctggctgtgatgcttgttcgctcagcttctccatttatgagatggggagaatagtcacagcctcctcaaagggttgtgaaaatcaaatgtgataatttgtggaaagcccttagcagtggcctggcacaaaacaaatgctcagtggatggaagctgcctattattattgtcgttgttgttgtttgccatgactgctctgggccgggggtagagctagcatccgggcatgtacgagggaagagggaggcaggcctctattcaaaggcagaaattcctttaagattgtggtctgctgggtttcagggagtgtctgtgttgtttgtttttgtttgtttgtttgttttgagacagggtctcgctctgtcacccaggctggagtgtagtggtgcagtcttggctcactgcaacctccacctcctgggctcaagcgattctcatgcctcagcctcccgagtagctgggactacaggtgtgtgccactatgcctggctaatttttgtattttttgtagagacggggttttgccatgttgcccaggctggaagtgtctatgtttaactgcatcttataaaccagcaacaagttttctactgggaattagaatggtgcatacacaatgtattattatcactgtcagatgagcatgcttgaatgtagcatgactgcctctttttgcttttcctagaggttttttttttgcttgttactcatctgttgacctacctgggggaagtagcacccttgcatttcaaaaataaaattgatggcattacaaatggaaaaaaaaacat

SEQ ID NO: 301173 - DNA, 927 bp, Homo sapiens
cctgcagatccagaggcccgtggtgaagaccagcatggagcagctggcccaggagctgcaaggactggcccaggcccaagacaattctgtgctggggcagcggctgcaggaggaggcccaaggactcagaaaccttcaccaggagaaggtcgtcccccagcagagccttgtggcaaagctcaacctcagcgtcagggccctggagtcctctgccccgaatctccagctggagacctcagatgtcctagccaatgtcacctacctgaaaggagagctgcctgcctgggcagccaggatcctgaggaatgtgagtgagtgtttcctggcccgggagatgggctacttctcccagtacgtggcctgggtgagagaggaggtgactcagcgcattgccacctgccagcccctctccggagccctggacaacagccgtgtgatcctgtgtgacatgatggctgacccctggaatgccttctggttctgcctggcatggtgcaccttcttcctgatccccagcatcatctttgccgtcaagacctccaaatacttccgtcctatccggaaacgcctcagctccaccagctctgaggagactcagctcttccacatcccccgggttacctccctgaagctgtagggccttgtggagacggggttttgccatgttgcccaggctggaagtgtctatgtttaactgcatcttataaaccagcaacaagttttctactgggaattagaatggtgcatacacaatgtattattatcactgtcagatgagcatgcttgaatgtagcatgactgcctctttttgcttttcctagaggttttttttttgcttgttactcatctgttgacctacctgggggaagtagcacccttgcatttcaaaaataaaattgatggcattacaaatggaaaaaaaaacat

SEQ ID NO: 301174 - DNA, 687 bp, Homo sapiens
gctgtctcgaggatccctgtggctactgctggagagggctctgcagccagagaggggcctgaggactgtgagtgagtgtttcctggcccgggagatgggctacttctcccagtacgtggcctgggtgagagaggaggtgactcagcgcattgccacctgccagcccctctccggagccctggacaacagccgtgtgatcctgtgtgacatgatggctgacccctggaatgccttctggttctgcctggcatggtgcaccttcttcctgatccccagcatcatctttgccgtcaagacctccaaatacttccgtcctatccggaaacgcctcagctccaccagctctgaggagactcagctcttccacatcccccgggttacctccctgaagctgtagggccttgtggagacggggttttgccatgttgcccaggctggaagtgtctatgtttaactgcatcttataaaccagcaacaagttttctactgggaattagaatggtgcatacacaatgtattattatcactgtcagatgagcatgcttgaatgtagcatgactgcctctttttgcttttcctagaggttttttttttgcttgttactcatctgttgacctacctgggggaagtagcacccttgcatttcaaaaataaaattgatggcattacaaatggaaaaaaaaacat

SEQ ID NO: 301175 - DNA, 1251 bp, Homo sapiens
cctgcagatccagaggcccgtggtgaagaccagcatggagcagctggcccaggagctgcaaggactggcccaggcccaagacaattctgtgctggggcagcggctgcaggaggaggcccaaggactcagaaaccttcaccaggagaaggtcgtcccccagcagagccttgtggcaaagctcaacctcagcgtcagggccctggagtcctctgccccgaatctccagctggagacctcagatgtcctagccaatgtcacctacctgaaaggagagctgcctgcctgggcagccaggatcctgaggaatgtgagtgagtgtttcctggcccgggagatgggctacttctcccagtacgtggcctgggtgagagaggaggtgactcagcgcattgccacctgccagcccctctccggagccctggacaacagccgtgtgatcctgtgtgacatgatggctgacccctggaatgccttctggttctgcctggcatggtgcaccttcttcctgatccccagcatcatctttgccgtcaagacctccaaatacttccgtcctatccggaaacgcctcagctccaccagctctgaggagactcagctcttccacatcccccgggttacctccctgaagctgtagggccttgtgggtgagttttccccaactcgcttaattgctccctgccagggattaagggagtggggtggggaggggctggggtctggggtttccagggcctaggagggcaggaaggcttggggacatggtggagtctgggtattgggtgtggcccatccagcagtggggctgacagccctgttctcccctccctccccttcacccgtttccttcttaatccctgacagggtgaggtgaccctgaggctgcctgtcctcccctttgatttagcctgggccacaggacttcggtagctcttgccccagagcccaggctggcatccaggcctggactgtccccagttccggcttacctggccccaccttgcctgctcctttccacccctttctgctcacgacccccatcattcacgctcagaatcacatgggacttctgtgcagctgcagagccagcaagtccctccaggtgtcaccccttacccccatgctggtggcatcctcacaggaagagcctgttctccacctgctggagcctggaccctggggtgggacagaggcctcgtccaaccccactccccttcccgtgtgtcttccccctgccaagcctccccctgc

SEQ ID NO: 301176 - DNA, 1034 bp, Homo sapiens
cctgcagatccagaggcccgtggtgaagaccagcatggagcagctggcccaggagctgcaaggactggcccaggcccaagacaattctgtgctggggcagcggctgcaggaggaggcccaaggactcagaaaccttcaccaggagaaggtcgtcccccagcagagccttgtggcaaagctcaacctcagcgtcagggccctggagtcctctgccccgaatctccagctggagacctcagatgtcctagccaatgtcacctacctgaaaggagagctgcctgcctgggcagccaggatcctgaggaatgtgagtgagtgtttcctggcccgggagatgggctacttctcccagtacgtggcctgggtgagagaggaggtgactcagcgcattgccacctgccagcccctctccggagccctggacaacagccgtgtgatcctgtgtgacatgatggctgacccctggaatgccttctggttctgcctggcatggtgcaccttcttcctgatccccagcatcatctttgccgtcaagacctccaaatacttccgtcctatccggaaacgcctcagctccaccagctctgaggagactcagctcttccacatcccccgggttacctccctgaagctgtagggccttgtggggtgaggtgaccctgaggctgcctgtcctcccctttgatttagcctgggccacaggacttcggtagctcttgccccagagcccaggctggcatccaggcctggactgtccccagttccggcttacctggccccaccttgcctgctcctttccacccctttctgctcacgacccccatcattcacgctcagaatcacatgggacttctgtgcagctgcagagccagcaagtccctccaggtgtcaccccttacccccatgctggtggcatcctcacaggaagagcctgttctccacctgctggagcctggaccctggggtgggacagaggcctcgtccaaccccactccccttcccgtgtgtcttccccctgccaagcctccccctgc

SEQ ID NO: 301177 - DNA, 310 bp, Homo sapiens
attagagacctcctttctgaaagtgtactgtattggagagagatgaataaaaaatttcctcttctcaagtgttttacttatctcatttaaacctcataacaaccctaggaggtgggtactttcattagcctcattttatcactgacaaaatggaggcttaaagagattaggtgacttgtttaaagtagcacccaatagatggcagagacaagaattgaacgcaggaagtacagctccatagcctgtgcccttaaaacagtgctatatgtgtgatacagcctctgtgtatttcatctcatggtcataagca

SEQ ID NO: 301178 - DNA, 819 bp, Homo sapiens
cgcgggtgggaaccttgacaagcagcatggctgcaggttgctcagaggcgccgcggccagcggcggcttctgatgggtctctggtagggcaggctggcgtcctgccttgcctagagttgccgacttatgccgctgcttgtgcgctggtgaacagtcgctactcatgcctggtggccgggccgcaccaaaggcacatcgcgctgtcgccccgctaccttaacaggaaacgcaccggcattcgagaacagcttgatgcggagctccttcgctattctgagagccttttaggtgtccctattgcatatgataacatcaaagttgtgggagagcttggagatatttatgatgatcaaggacacattcatcttaacattgaagccgattttgttattttctgccctgaaccagggcagaagcttatgggtatagttaataaagtgtcttctagccacattggctgtttagtacatgggtgtttcaatgcctccattcctaaacctgagcagttgtcagctgagcagtggcaaaccatggagataaacatgggtgatgaactagaatttgaagtatttcgtttagactcagatgctgctggagtattctgcattcggggaaaactaaatatcacaagttacattcaagcgctctgagttctgagagttccgaaaggctgaggagtgtaaaaactaaaagagaaagagaagaccggaatttggtggcgtggcccaagtggagtgggaggaaccagggagggggggaaaaaagggggtggggggggcgaaaaaaaaaaacggttgagcgttggggggggcaaaaaat

SEQ ID NO: 301179 - DNA, 4193 bp, Homo sapiens
cgcgggtgggaaccttgacaagcagcatggctgcaggttgctcagaggcgccgcggccagcggcggcttctgatgggtctctggtagggcaggctggcgtcctgccttgcctagagttgccgacttatgccgctgcttgtgcgctggtgaacagtcgctactcatgcctggtggccgggccgcaccaaaggcacatcgcgctgtcgccccgctaccttaacaggaaacgcaccggcattcgagaacagcttgatgcggagctccttcgctattctgagagccttttaggtgtccctattgcatatgataacatcaaagttgtgggagagcttggagatatttatgatgatcaaggacacattcatcttaacattgaagccgattttgttattttctgccctgaaccagggcagaagcttatgggtatagttaataaagtgtcttctagccacattggctgtttagtacatgggtgtttcaatgcctccattcctaaacctgagcagttgtcagctgagcagtggcaaaccatggagataaacatgggtgatgaactagaatttgaagtatttcgtttagactcagatgctgctggagtattctgcattcggggaaaactaaatatcacaagtttacaattcaagcgctctgaagtttctgaagaagttacagaaaatggcactgaggaagctgctaaaaaacctaaaaagaagaaaaagaagaaagacccagagacatatgaagtggacagtggtaccacaaagctagcagatgatgcagatgacactccaatggaagagtcagccctgcagaatactaataatgcgaatggcatctgggaggaggagccaaagaaaaagaagaagaagaaaaagcaccaggaagttcaggaccaggaccctgttttccaaggcagtgactccagtggttaccaaagtgaccataaaaagaaaaaaaagaaaagaaaacacagtgaagaggccgaatttaccccacctttgaaatgctcaccaaaaagaaaagggaaaagtaattttctttagtgtattttaaacacgattcagtttttaaaagatcgatctacatacaatagatgaataaatgttttcagtgatatgaaaaggttaagtatgccagtagtttacaaaacagaaaatacttaactaggagtaggaggctttatatgctaaaaatgataaaactgactgtaaattaatttggggaaagccagtattgttaaaataccattttatacaaaataaaaagctgctctcactgtcagctctcatattcttccaggttttgcactctacataaaattatttctacaatgtcaagactagccaaaggactttataatacaatattatattactaaagaatgagttaagtttgagattttgatgatttgattttgtgtgtgtttaataggcttcaccttattacatgctattttattttgcttttttaaaaactcaggacattaactaattttaggttttcctttatcatggctttctacagtatttctattgtttaacataaaatagtttgccaaagaagtttctgaagtcttcacagctcttaaaagccaggccagtactgactgtgtggtggtaaatgctattcattattttcttttctttcttccaagtgcatgtgtgtccttgtcttcttaagtctgagaggttgctggaaaggactgttttcttgtacttgttcatttgtgcctcagccattctagttttgttgtgtgttggaggacagtctaatgaagacaggataaatgtgattctgactagtgggaaatttcagattactttttaatgattggaatgggctataagatattgtgctgaagagaaaacagttgttctgttcactgctttcattgagaaaatgtggaatgtctcttgactaattgacaaagtgtaatgaaatgacaagctggttgaagctggtaatcaatgcatggccatatttattcattttccacacacttgaccatctactttgtataacacattctgctaaggcccagggatacaatggcaaacaagatagatgtagttccttcccttgtggcatgtcataagagaaacagatgtgcatatacacacaataaataagaaaattaataattgtattaagtggtatgaaaaaaagggggaggattgttcactcactgttacctgtgttagtatctgcaaatgcatgaatggttgaactcccatgtcagcatttttgttgccatttatttagtaccagacatagtgctggtctcacagcttaatatttggtaatgaataaattctgctagtggtatatgttgatctgaacttacaatgatgggatatagaattggcagagtggcagatgttcacaattgtctacaagtagatgtgctagacaatggaaggatgcaggccaacctctttgattacaattgagattcatgtgactattgagccctggaaatgtagcttgtccaaattgagatgtgctgtcagtataaaatacataccagattttaaagatgtaccaaaaaatgtaaactatctcaatttttatattggtgaaatcaatatgtcttggtatagtggcttaaataaaacaattttagcctttctcagtttatttttctgcaaaaagattaaaaattgtacatgaagctcatgttaactttcttttggtcagtgctattttaaaggaagtatgagttgaaaaaaaattgaaataaactatatcatattactaggacttaatatagtggcatacccaggaaatgcttagtaagtgttcccttcacattttaaaatttgagtatacaatcatgtttgacaatatagaaatttaatttttagtgaaacaattctaaaccccttttccatagacacaagaaagatggcaaatttatgctattcctggaaaaatacattgtggcttagcaaataagcaagttcccacgttacttttgttttgcttcaagtaatacttctgccagttgtgttttatgaattaaacagggaacggcatgctgaacttgaaactagatttgttcctgcttttttcacaatgtgagtagttttgaaaagtcagatctggccatttgtctttcctagaatagcataactttgttcattgttttttttgtttgtctttctgacacagaaagactgatgatggtgtccactatgtattcttcaaaacatttggcacatgctgcactaacctagtctatcttttctatcttggaatttgctcatacaaaccctatagcctagactagatcccttaccctctctccagttcctatcattcacccatttcactgtgcaagacacctcactagtcaccagtgatacagaaatgacttttaagcagtttctgctcttaagggcttaccgttttgtctataagatacacaagtataaatgacaagtacaaataacaatgaatgtttaatgctttacgtttagtgtttaagcttgttgttggaagagcagcattttgacccttggagaagaaaaactagctgtggcattccaggtggagaacctgacagaggactaagaagttatctaatgtaaaagacctcaggcaccaccttcgcataaactttttccagacaaggctaaatgtgcatgcttcataaccataattcttatttttctttaataaatatttttctacttgtaacactgtgcattatttcaaactgtttacctgtttgtaaagcttgtctcttaatcaaatttgtcttgaccaaataagtttcctgagggctggaattatgccttaactatatctatagtatttaacagtgaatcctttgtataatgaaagcatcaacagataattttaaattgataaataaaaagcacagtttcaaatggtaaaaaaaacaccacaacaaccaacaacacgttgtggggtgactcggccctggaaagagtttcaaacccatgcggtgggccgggccccatagcacgggcactggcatacgtggcaaagaacagcggctcagcacaggcgtggttccccccataaaaagccgcgggaacgcgggttggaaaccgagggtcggagcaaggtcaacaaggccggcctacctcccccgtgggaggtaaaagaatacacgaaatgacagaaaaaaaagcggacacagaagagaaaaaaaagaggaaagaaca

SEQ ID NO: 301180 - DNA, 4140 bp, Homo sapiens
cgcgggtgggaaccttgacaagcagcatggctgcaggttgctcagaggcgccgcggccagcggcggcttctgatgggtctctggtagggcaggctggcgtcctgccttgcctagagttgccgacttatgccgctgcttgtgcgctggtgaacagtcgctactcatgcctggtggccgggccgcaccaaaggcacatcgcgctgtcgccccgctaccttaacaggaaacgcaccggcattcgagaacagcttgatgcggagctccttcgctattctgagagccttttaggtgtccctattgcatatgataacatcaaagttgtgggagagcttggagatatttatgatgatcaaggacacattcatcttaacattgaagccgattttgttattttctgccctgaaccagggcagaagcttatgggtatagttaataaagtgtcttctagccacattggctgtttagtacatgggtgtttcaatgcctccattcctaaacctgagcagttgtcagctgagcagtggcaaaccatggagataaacatgggtgatgaactagaatttgaagtatttcgtttagactcagatgctgctggagtattctgcattcggggaaaactaaatatcacaagtttacaattcaagcgctctgaagtttctgaagaagttacagaaaatggcactgaggaagctgctaaaaaacctaaaaagaagaaaaagaagaaagacccagagacatatgaagtggacagtggtaccacaaagctagcagatgatgcagatgacactccaatggaagagtcagccctgcagaatactaataatgcgaatggcatctgggaggaggagccaaagaaaaagaagaagaagaaaaagcaccaggaagttcaggaccaggaccctgttttccaaggcagtgactccagtggttaccaaagtgaccataaaaagaaaaaaaagaaaagaaaacacagtgaagaggccgaatttaccccacctttgaaatgctcaccaaaaagaaaagggaaaagtaattttctttagtgtattttaaacacgattcagtttttaaaagatcgatctacatacaatagatgaataaatgttttcagtgatatgaaaaggttaagtatgccagtagtttacaaaacagaaaatacttaactaggagtaggaggctttatatgctaaaaatgataaaactgactgtaaattaatttggggaaagccagtattgttaaaataccattttatacaaaataaaaagctgctctcactgtcagctctcatattcttccaggttttgcactctacataaaattatttctacaatgtcaagactagccaaaggactttataatacaatattatattactaaagaatgagttaagtttgagattttgatgatttgattttgtgtgtgtttaataggcttcaccttattacatgctattttattttgcttttttaaaaactcaggacattaactaattttaggttttcctttatcatggctttctacagtatttctattgtttaacataaaatagtttgccaaagaagtttctgaagtcttcacagcttcttttctttcttccaagtgcatgtgtgtccttgtcttcttaagtctgagaggttgctggaaaggactgttttcttgtacttgttcatttgtgcctcagccattctagttttgttgtgtgttggaggacagtctaatgaagacaggataaatgtgattctgactagtgggaaatttcagattactttttaatgattggaatgggctataagatattgtgctgaagagaaaacagttgttctgttcactgctttcattgagaaaatgtggaatgtctcttgactaattgacaaagtgtaatgaaatgacaagctggttgaagctggtaatcaatgcatggccatatttattcattttccacacacttgaccatctactttgtataacacattctgctaaggcccagggatacaatggcaaacaagatagatgtagttccttcccttgtggcatgtcataagagaaacagatgtgcatatacacacaataaataagaaaattaataattgtattaagtggtatgaaaaaaagggggaggattgttcactcactgttacctgtgttagtatctgcaaatgcatgaatggttgaactcccatgtcagcatttttgttgccatttatttagtaccagacatagtgctggtctcacagcttaatatttggtaatgaataaattctgctagtggtatatgttgatctgaacttacaatgatgggatatagaattggcagagtggcagatgttcacaattgtctacaagtagatgtgctagacaatggaaggatgcaggccaacctctttgattacaattgagattcatgtgactattgagccctggaaatgtagcttgtccaaattgagatgtgctgtcagtataaaatacataccagattttaaagatgtaccaaaaaatgtaaactatctcaatttttatattggtgaaatcaatatgtcttggtatagtggcttaaataaaacaattttagcctttctcagtttatttttctgcaaaaagattaaaaattgtacatgaagctcatgttaactttcttttggtcagtgctattttaaaggaagtatgagttgaaaaaaaattgaaataaactatatcatattactaggacttaatatagtggcatacccaggaaatgcttagtaagtgttcccttcacattttaaaatttgagtatacaatcatgtttgacaatatagaaatttaatttttagtgaaacaattctaaaccccttttccatagacacaagaaagatggcaaatttatgctattcctggaaaaatacattgtggcttagcaaataagcaagttcccacgttacttttgttttgcttcaagtaatacttctgccagttgtgttttatgaattaaacagggaacggcatgctgaacttgaaactagatttgttcctgcttttttcacaatgtgagtagttttgaaaagtcagatctggccatttgtctttcctagaatagcataactttgttcattgttttttttgtttgtctttctgacacagaaagactgatgatggtgtccactatgtattcttcaaaacatttggcacatgctgcactaacctagtctatcttttctatcttggaatttgctcatacaaaccctatagcctagactagatcccttaccctctctccagttcctatcattcacccatttcactgtgcaagacacctcactagtcaccagtgatacagaaatgacttttaagcagtttctgctcttaagggcttaccgttttgtctataagatacacaagtataaatgacaagtacaaataacaatgaatgtttaatgctttacgtttagtgtttaagcttgttgttggaagagcagcattttgacccttggagaagaaaaactagctgtggcattccaggtggagaacctgacagaggactaagaagttatctaatgtaaaagacctcaggcaccaccttcgcataaactttttccagacaaggctaaatgtgcatgcttcataaccataattcttatttttctttaataaatatttttctacttgtaacactgtgcattatttcaaactgtttacctgtttgtaaagcttgtctcttaatcaaatttgtcttgaccaaataagtttcctgagggctggaattatgccttaactatatctatagtatttaacagtgaatcctttgtataatgaaagcatcaacagataattttaaattgataaataaaaagcacagtttcaaatggtaaaaaaaacaccacaacaaccaacaacacgttgtggggtgactcggccctggaaagagtttcaaacccatgcggtgggccgggccccatagcacgggcactggcatacgtggcaaagaacagcggctcagcacaggcgtggttccccccataaaaagccgcgggaacgcgggttggaaaccgagggtcggagcaaggtcaacaaggccggcctacctcccccgtgggaggtaaaagaatacacgaaatgacagaaaaaaaagcggacacagaagagaaaaaaaagaggaaagaaca

SEQ ID NO: 301181 - DNA, 4056 bp, Homo sapiens
ttagtttatccagttagaaagttaatgtgcccagttagacagttaatgtgcaattacttatataataaagtttgagctttctcaaaacccagtggtattctaaagtgatgttttggcatgacatgtggtaagttttaattgaggtaaactttttccatattaaattagaccattaatttgatgtttgttctttgaagattatttgaagcttgtaaagtttggttcaccttttaactttgtggatgtgttctttatgttacgctctttcttccttcttcttcccagggtatagttaataaagtgtcttctagccacattggctgtttagtacatgggtgtttcaatgcctccattcctaaacctgagcagttgtcagctgagcagtggcaaaccatggagataaacatgggtgatgaactagaatttgaagtatttcgtttagactcagatgctgctggagtattctgcattcggggaaaactaaatatcacaagtttacaattcaagcgctctgaagtttctgaagaagttacagaaaatggcactgaggaagctgctaaaaaacctaaaaagaagaaaaagaagaaagacccagagacatatgaagtggacagtggtaccacaaagctagcagatgatgcagatgacactccaatggaagagtcagccctgcagaatactaataatgcgaatggcatctgggaggaggagccaaagaaaaagaagaagaagaaaaagcaccaggaagttcaggaccaggaccctgttttccaaggcagtgactccagtggttaccaaagtgaccataaaaagaaaaaaaagaaaagaaaacacagtgaagaggccgaatttaccccacctttgaaatgctcaccaaaaagaaaagggaaaagtaattttctttagtgtattttaaacacgattcagtttttaaaagatcgatctacatacaatagatgaataaatgttttcagtgatatgaaaaggttaagtatgccagtagtttacaaaacagaaaatacttaactaggagtaggaggctttatatgctaaaaatgataaaactgactgtaaattaatttggggaaagccagtattgttaaaataccattttatacaaaataaaaagctgctctcactgtcagctctcatattcttccaggttttgcactctacataaaattatttctacaatgtcaagactagccaaaggactttataatacaatattatattactaaagaatgagttaagtttgagattttgatgatttgattttgtgtgtgtttaataggcttcaccttattacatgctattttattttgcttttttaaaaactcaggacattaactaattttaggttttcctttatcatggctttctacagtatttctattgtttaacataaaatagtttgccaaagaagtttctgaagtcttcacagctcttaaaagccaggccagtactgactgtgtggtggtaaatgctattcattattttcttttctttcttccaagtgcatgtgtgtccttgtcttcttaagtctgagaggttgctggaaaggactgttttcttgtacttgttcatttgtgcctcagccattctagttttgttgtgtgttggaggacagtctaatgaagacaggataaatgtgattctgactagtgggaaatttcagattactttttaatgattggaatgggctataagatattgtgctgaagagaaaacagttgttctgttcactgctttcattgagaaaatgtggaatgtctcttgactaattgacaaagtgtaatgaaatgacaagctggttgaagctggtaatcaatgcatggccatatttattcattttccacacacttgaccatctactttgtataacacattctgctaaggcccagggatacaatggcaaacaagatagatgtagttccttcccttgtggcatgtcataagagaaacagatgtgcatatacacacaataaataagaaaattaataattgtattaagtggtatgaaaaaaagggggaggattgttcactcactgttacctgtgttagtatctgcaaatgcatgaatggttgaactcccatgtcagcatttttgttgccatttatttagtaccagacatagtgctggtctcacagcttaatatttggtaatgaataaattctgctagtggtatatgttgatctgaacttacaatgatgggatatagaattggcagagtggcagatgttcacaattgtctacaagtagatgtgctagacaatggaaggatgcaggccaacctctttgattacaattgagattcatgtgactattgagccctggaaatgtagcttgtccaaattgagatgtgctgtcagtataaaatacataccagattttaaagatgtaccaaaaaatgtaaactatctcaatttttatattggtgaaatcaatatgtcttggtatagtggcttaaataaaacaattttagcctttctcagtttatttttctgcaaaaagattaaaaattgtacatgaagctcatgttaactttcttttggtcagtgctattttaaaggaagtatgagttgaaaaaaaattgaaataaactatatcatattactaggacttaatatagtggcatacccaggaaatgcttagtaagtgttcccttcacattttaaaatttgagtatacaatcatgtttgacaatatagaaatttaatttttagtgaaacaattctaaaccccttttccatagacacaagaaagatggcaaatttatgctattcctggaaaaatacattgtggcttagcaaataagcaagttcccacgttacttttgttttgcttcaagtaatacttctgccagttgtgttttatgaattaaacagggaacggcatgctgaacttgaaactagatttgttcctgcttttttcacaatgtgagtagttttgaaaagtcagatctggccatttgtctttcctagaatagcataactttgttcattgttttttttgtttgtctttctgacacagaaagactgatgatggtgtccactatgtattcttcaaaacatttggcacatgctgcactaacctagtctatcttttctatcttggaatttgctcatacaaaccctatagcctagactagatcccttaccctctctccagttcctatcattcacccatttcactgtgcaagacacctcactagtcaccagtgatacagaaatgacttttaagcagtttctgctcttaagggcttaccgttttgtctataagatacacaagtataaatgacaagtacaaataacaatgaatgtttaatgctttacgtttagtgtttaagcttgttgttggaagagcagcattttgacccttggagaagaaaaactagctgtggcattccaggtggagaacctgacagaggactaagaagttatctaatgtaaaagacctcaggcaccaccttcgcataaactttttccagacaaggctaaatgtgcatgcttcataaccataattcttatttttctttaataaatatttttctacttgtaacactgtgcattatttcaaactgtttacctgtttgtaaagcttgtctcttaatcaaatttgtcttgaccaaataagtttcctgagggctggaattatgccttaactatatctatagtatttaacagtgaatcctttgtataatgaaagcatcaacagataattttaaattgataaataaaaagcacagtttcaaatggtaaaaaaaacaccacaacaaccaacaacacgttgtggggtgactcggccctggaaagagtttcaaacccatgcggtgggccgggccccatagcacgggcactggcatacgtggcaaagaacagcggctcagcacaggcgtggttccccccataaaaagccgcgggaacgcgggttggaaaccgagggtcggagcaaggtcaacaaggccggcctacctcccccgtgggaggtaaaagaatacacgaaatgacagaaaaaaaagcggacacagaagagaaaaaaaagaggaaagaaca

SEQ ID NO: 301182 - DNA, 4105 bp, Homo sapiens
cgcgggtgggaaccttgacaagcagcatggctgcaggttgctcagaggcgccgcggccagcggcggcttctgatgggtctctggtagggcaggctggcgtcctgccttgcctagagttgccgacttatgccgctgcttgtgcgctggtgaacagtcgctactcatgcctggtggccgggccgcaccaaaggcacatcgcgctgtcgccccgctaccttaacaggaaacgcaccggcattcgagaacagcttgatgcggagctccttcgctattctgagagccttttaggtgtccctattgcatatgataacatcaaagttgtgggagagcttggagatatttatgatgatcaaggacacattcatcttaacattgaagccgattttgttattttctgccctgaaccagggcagaagcttatgggtatagttaataaagtgtcttctagccacattggctgtttagtacatgggtgtttcaatgcctccattcctaaacctgagcagttgtcagctgagcagtggcaaaccatggagataaacatgggtgatgaactagaatttgaatttctgaagaagttacagaaaatggcactgaggaagctgctaaaaaacctaaaaagaagaaaaagaagaaagacccagagacatatgaagtggacagtggtaccacaaagctagcagatgatgcagatgacactccaatggaagagtcagccctgcagaatactaataatgcgaatggcatctgggaggaggagccaaagaaaaagaagaagaagaaaaagcaccaggaagttcaggaccaggaccctgttttccaaggcagtgactccagtggttaccaaagtgaccataaaaagaaaaaaaagaaaagaaaacacagtgaagaggccgaatttaccccacctttgaaatgctcaccaaaaagaaaagggaaaagtaattttctttagtgtattttaaacacgattcagtttttaaaagatcgatctacatacaatagatgaataaatgttttcagtgatatgaaaaggttaagtatgccagtagtttacaaaacagaaaatacttaactaggagtaggaggctttatatgctaaaaatgataaaactgactgtaaattaatttggggaaagccagtattgttaaaataccattttatacaaaataaaaagctgctctcactgtcagctctcatattcttccaggttttgcactctacataaaattatttctacaatgtcaagactagccaaaggactttataatacaatattatattactaaagaatgagttaagtttgagattttgatgatttgattttgtgtgtgtttaataggcttcaccttattacatgctattttattttgcttttttaaaaactcaggacattaactaattttaggttttcctttatcatggctttctacagtatttctattgtttaacataaaatagtttgccaaagaagtttctgaagtcttcacagctcttaaaagccaggccagtactgactgtgtggtggtaaatgctattcattattttcttttctttcttccaagtgcatgtgtgtccttgtcttcttaagtctgagaggttgctggaaaggactgttttcttgtacttgttcatttgtgcctcagccattctagttttgttgtgtgttggaggacagtctaatgaagacaggataaatgtgattctgactagtgggaaatttcagattactttttaatgattggaatgggctataagatattgtgctgaagagaaaacagttgttctgttcactgctttcattgagaaaatgtggaatgtctcttgactaattgacaaagtgtaatgaaatgacaagctggttgaagctggtaatcaatgcatggccatatttattcattttccacacacttgaccatctactttgtataacacattctgctaaggcccagggatacaatggcaaacaagatagatgtagttccttcccttgtggcatgtcataagagaaacagatgtgcatatacacacaataaataagaaaattaataattgtattaagtggtatgaaaaaaagggggaggattgttcactcactgttacctgtgttagtatctgcaaatgcatgaatggttgaactcccatgtcagcatttttgttgccatttatttagtaccagacatagtgctggtctcacagcttaatatttggtaatgaataaattctgctagtggtatatgttgatctgaacttacaatgatgggatatagaattggcagagtggcagatgttcacaattgtctacaagtagatgtgctagacaatggaaggatgcaggccaacctctttgattacaattgagattcatgtgactattgagccctggaaatgtagcttgtccaaattgagatgtgctgtcagtataaaatacataccagattttaaagatgtaccaaaaaatgtaaactatctcaatttttatattggtgaaatcaatatgtcttggtatagtggcttaaataaaacaattttagcctttctcagtttatttttctgcaaaaagattaaaaattgtacatgaagctcatgttaactttcttttggtcagtgctattttaaaggaagtatgagttgaaaaaaaattgaaataaactatatcatattactaggacttaatatagtggcatacccaggaaatgcttagtaagtgttcccttcacattttaaaatttgagtatacaatcatgtttgacaatatagaaatttaatttttagtgaaacaattctaaaccccttttccatagacacaagaaagatggcaaatttatgctattcctggaaaaatacattgtggcttagcaaataagcaagttcccacgttacttttgttttgcttcaagtaatacttctgccagttgtgttttatgaattaaacagggaacggcatgctgaacttgaaactagatttgttcctgcttttttcacaatgtgagtagttttgaaaagtcagatctggccatttgtctttcctagaatagcataactttgttcattgttttttttgtttgtctttctgacacagaaagactgatgatggtgtccactatgtattcttcaaaacatttggcacatgctgcactaacctagtctatcttttctatcttggaatttgctcatacaaaccctatagcctagactagatcccttaccctctctccagttcctatcattcacccatttcactgtgcaagacacctcactagtcaccagtgatacagaaatgacttttaagcagtttctgctcttaagggcttaccgttttgtctataagatacacaagtataaatgacaagtacaaataacaatgaatgtttaatgctttacgtttagtgtttaagcttgttgttggaagagcagcattttgacccttggagaagaaaaactagctgtggcattccaggtggagaacctgacagaggactaagaagttatctaatgtaaaagacctcaggcaccaccttcgcataaactttttccagacaaggctaaatgtgcatgcttcataaccataattcttatttttctttaataaatatttttctacttgtaacactgtgcattatttcaaactgtttacctgtttgtaaagcttgtctcttaatcaaatttgtcttgaccaaataagtttcctgagggctggaattatgccttaactatatctatagtatttaacagtgaatcctttgtataatgaaagcatcaacagataattttaaattgataaataaaaagcacagtttcaaatggtaaaaaaaacaccacaacaaccaacaacacgttgtggggtgactcggccctggaaagagtttcaaacccatgcggtgggccgggccccatagcacgggcactggcatacgtggcaaagaacagcggctcagcacaggcgtggttccccccataaaaagccgcgggaacgcgggttggaaaccgagggtcggagcaaggtcaacaaggccggcctacctcccccgtgggaggtaaaagaatacacgaaatgacagaaaaaaaagcggacacagaagagaaaaaaaagaggaaagaaca

SEQ ID NO: 301183 - DNA, 2102 bp, Homo sapiens
cgcgggtgggaaccttgacaagcagcatggctgcaggttgctcagaggcgccgcggccagcggcggcttctgatgggtctctggtagggcaggctggcgtcctgccttgcctagagttgccgacttatgccgctgcttgtgcgctggtgaacagtcgctactcatgcctggtggccgggccgcaccaaaggcacatcgcgctgtcgccccgctaccttaacaggaaacgcaccggcattcgagaacagcttgatgcggagctccttcgctattctgagagccttttaggtgtccctattgcatatgataacatcaaagttgtgggagagcttggagatatttatgatgatcaaggacacattcatcttaacattgaagccgattttgttattttctgccctgaaccagggcagaagcttatgggtatagttaataaagtgtcttctagccacattggctgtttagtacatgggtgtttcaatgcctccattcctaaacctgagcagttgtcagctgagcagtggcaaaccatggagataaacatgggtgatgaactagaatttgaagtatttcgtttagactcagatgctgctggagtattctgcattcggggaaaactaaatatcacaagtttacaattcaagcgctctgaagtttctgaagaagttacagaaaatggcactgaggaagctgctaaaaaacctaaaaagaagaaaaagaagaaagacccagagacatatgaagtggacagtggtaccacaaagctagcagatgatgcagatgacactccaatggaagagtcagccctgcagaatactaataatgcgaatggcatctgggaggaggagccaaagaaaaagaagaagaagaaaaagcaccaggaagttcaggaccaggaccctgttttccaaggcagtgactccagtggttaccaaagtgaccataaaaagaaaaaaaagaaaagaaaacacagtgaagaggccgaatttaccccacctttgaaatgctcaccaaaaagaaaagggaaaagtaattttctttagtgtattttaaacacgattcagtttttaaaagatcgatctacatacaatagatgaataaatgttttcagtgatatgaaaaggttaagtatgccagtagtttacaaaacagaaaatacttaactaggagtaggaggctttatatgctaaaaatgataaaactgactgtaaattaatttggggaaagccagtattgttaaaataccattttatacaaaataaaaagctgctctcactgtcagctctcatattcttccaggttttgcactctacataaaattatttctacaatgtcaagactagccaaaggactttataatacaatattatattactaaagaatgagttaagtttgagattttgatgatttgattttgtgtgtgtttaataggcttcaccttattacatgctattttattttgcttttttaaaaactcaggacattaactaattttaggttttcctttatcatggctttctacagtatttctattgtttaacataaaatagtttgccaaagaagtttctgaagtcttcacagctcttaaaagccaggccagtactgactgtgtggtggtaaatgctattcattattttcttttctttcttccaagtgcatgtgtgtccttgtcttcttaagtctgagaggttgctggaaaggactgttttcttgtacttgttcatttgtgcctcagccattctagttttgttgtgtgttggaggacagtctaatgaagacaggataaatgtgattctgactagtgggaaatttcagattactttttaatgattggaatgggctataagatattgtgctgaagagaaaacagttgttctgttcactgctttcattgagaaaatgtggaatgtctcttgactaattgacaaagtgtaatgaaatgacaagctggttgaagctggtaatcaatgcatggccatatttattcattttccacacacttgaccatctactttgtatatgcacatctgtttctcttatgacatgccacaagggaaggaactacatctatcttgtttgccattgtaatccctgggccttag

SEQ ID NO: 301184 - DNA, 1343 bp, Homo sapiens
cgcgggtgggaaccttgacaagcagcatggctgcaggttgctcagaggcgccgcggccagcggcggcttctgatgggtctctggtagggcaggctggcgtcctgccttgcctagagttgccgacttatgccgctgcttgtgcgctggtgaacagtcgctactcatgcctggtggccgggccgcaccaaaggcacatcgcgctgtcgccccgctaccttaacaggaaacgcaccggcattcgagaacagcttgatgcggagctccttcgctattctgagagccttttaggtgtccctattgcatatgataacatcaaagttgtgggagagcttggagatatttatgatgatcaaggacacattcatcttaacattgaagccgattttgttattttctgccctgaaccagggcagaagcttatgggtatagttaataaagtgtcttctagccacattggctgtttagtacatgggtgtttcaatgcctccattcctaaacctgagcagttgtcagctgagcagtggcaaaccatggagataaacatgggtgatgaactagaatttgaagtatttcgtttagactcagatgctgctggagtattctgcattcggggaaaactaaatatcacaagtttacaattcaagcgctctgaagtttctgaagaagttacagaaaatggcactgaggaagctgctaaaaaacctaaaaagaagaaaaagaagaaagacccagagacatatgaagtggacagtggtaccacaaagctagcagatgatgcagatgacactccaatggaagagtcagccctgcagaatactaataatgcgaatggcatctgggaggaggagccaaagaaaaagaagaagaagaaaaagcaccaggaagttcaggaccaggaccctgttttccaaggcagtgactccagtggttaccaaagtgaccataaaaagaaaaaaaagaaaagaaaacacagtgaagaggccgaatttaccccacctttgaaatgctcaccaaaaagaaaagggaaaagtaattttctttagtgtattttaaacacgattcagtttttaaaagatcgatctacatacaatagatgaataaatgttttcagtgatatgaaaaggttaagtatgccagtagtttacaaaacagaaaatacttaactaggagtaggaggctttatatgctattgaaacttctaaaactcctagttttagaagtttcaatagcactctaccaaaggtgggggaacagtggggagaaacatcaactcatctttgaagaagctacatcttctctcatctctatcaggtctgatggcaacaccaacacatcagaacaca

SEQ ID NO: 301185 - DNA, 866 bp, Homo sapiens
cgtcgacagtgatacagaaatgacttttaagcagtttctgctcttaagggcttaccgtttctgctcttaagggcttaccgttttgtctataagatacacaagtataaatgacaagtacaaataacaatgaatgtttaatgctttacgtttagtgtttaagcttgttgttggaagagcagcattttgacccttggagaagaaaaactagctgtggcattccaggtggagaacctgacagaggactaagaagttatctaatgtaaaagacctcaggcaccaccttcgcataaactttttccagacaaggctaaatgtgcatgcttcataaccataattcttatttttctttaataaatatttttctacttgtaacactgtgcattatttcaaactgtttacctgtttgtaaagcttgtctcttaatcaaatttgtcttgaccaaataagtttcctgagggctggaattatgccttaactatatctatagtatttaacagtgaatcctttgtataatgaaagcatcaacagataattttaaattgataaataaaaagcacagtttcaaatggtaaaaaaaacaccacaacaaccaacaacacgttgtggggtgactcggccctggaaagagtttcaaacccatgcggtgggccgggccccatagcacgggcactggcatacgtggcaaagaacagcggctcagcacaggcgtggttccccccataaaaagccgcgggaacgcgggttggaaaccgagggtcggagcaaggtcaacaaggccggcctacctcccccgtgggaggtaaaagaatacacgaaatgacagaaaaaaaagcggacacagaagagaaaaaaaagaggaaagaaca

SEQ ID NO: 301186 - DNA, 4261 bp, Homo sapiens
cccaaaatggcggacacaatgagccggcgacgcgccggttgtccgtgaggtggctgtgaggacgaacggtcggcgaggctccacagtccaggcagaagaccctcgaccaagcaggaagaagaggaggaggcggcccaactgttggccgacttcccgctagccgccggcgcggcgcccgccccgcctgggttggcccctcggcagcccgcccgctcgccgccgggccccgccccggccctgcgccgccgctgccttccccagccgccgccatgaagctgaccgacagcgtgttgcggagcttccgcgtcgctaaggtgttccgcgaaaactcggacaagattaactgcttcgatttcagccccaacggcgagacggtcatctcgagtagcgacgacgactccatcgtgctctatgactgccaggagggcaaaccaaagagaaccctgtacagtaagaaatatggtgtggacctcatcagatacactcatgcagcaaacacagttgtttacagctctaacaaaatagacgatactattcgttacttgtccttgcatgacaacaaatacatcagatactttcctggacatagcaaaagggtggtggccttgtccatgtcacctgtggatgacactttcatttctgggtctcttgataagaccattcgactctgggatctccggtctcctaactgccagggcctcatgcatctgcaggggaagccagtttgttcttttgatccagaagggttaattttcgctgcaggtgtcaactctgaaatggtcaagctttatgaccttcgttcttttgataaggggccatttgctacctttaagatgcagtatgatcgaacttgtgagtggacaggacttaaattcagcaatgatggcaagctcatcctcatttccaccaacggcagcttcattcgtctgattgatgcattcaaaggagtggtgatgcacacatttgggggttatgccaacagcaaagctgtcacactggaggcttcatttactccagactctcagtttattatgattggttcagaggatggcaagatccatgtctggaatggagagagcggtataaaagtagctgtgttggatggtaaacacacaggcccgattacctgtttgcaattcaaccccaagttcatgacttttgccagtgcgtgttccaacatggccttttggttgcccaccattgatgactgaccctgttgctgcttggctatttctgtatagtgagggcggccagcaggaagaaactcagagggaactgagataatagtgggattggatcatttgactgggctggagaacatccttttacatggccttcccatggatgtgctgtacatctgctcaaaagaaaataattactttgatgagcgtcttcaaaaggactcttggtgcaacagactcaattggaactcagcttttctaactgtcactgcaccaagctctgctggaggagtgaccagactcacgatttggtatagtggggctctcaagcatcttcaatttgaatgtacatgctgctgaggagccggtgaagtcatcagttccgcacatcccttctaccctccaactgcatgggaagccaaagtcctggttttgaaatgcttgggcagctcagccgcttgccctcaccctgcatgtcttgttactgggtctccctgtgtacttgtggcattatccacaaccatcatgtttcttaggtgccaaacatttacagaaacattttcatatatcttggggtcagagaaagggacagatacagaaggaccttgcttgcaggaagccatgcagttagtttctgcagttagtcgtgtgaggctaggtggttgggcaggcctcgggctgtaggtgttgggtgggaaaaagacccaagggcctgaaagggagggaaaggggagggtagcgggagggtagcaggtgagttcctagggctggaaggtttagcagcagcctggtgcagtgccctgtcatcaagacaaacccacggtcctcctgggtgcctaccaagcttggtttgtacaaaagcaaggtgggagtctatttttgtacatgagatacatcacacttacctgtgggccagtattgtgaagtgagtctgagttgtttacactgatgccttccctgcccaccacaaattgtgtacatagtcttcagatgataccacccctttccccagctcccaaccaagagctggttctaggcctgtgttatatgtcatatttagcgtttttatatatgacctttgatttctgttgtttgtattttagcacagtgtatgcaccttcatttaaatacatctgtgtgcatacagatacgcatatatgtgtgtgcgtatgcatatatctctcatctgtagtttccaagagttcagctgaagcagatggagtcctgcagcccaggagacaccctgcatccctgctaatagtgtttgccacaagtattagtgagtcttccttattaatattttcatttcagaagactgaagcaaagctgatagtgtttgctgtttctttggcagctaagtgagggtcttgggatgacttgctgtgttcctcaagctgcactttggggccatctctgcagtattagccccctttttgcttggtggtactctgtctgtgcctgtgtgtgtgtgtgatagtcactcttgcatggcttccatgtctggtttgtggcatttggggataaggtgctgaagccagagcatttgcagtttgtttgaggcctcgttgccaatgatagatcactcctgttgacctggtatgtctgcttgcttgctgcttttccttgctttctcttggaagaggaaaggactctggtcaggcccaggctgagtgagatgagctgcagctggctcatggccttcttagagcagagagaggagtatgtcattttactaagttcctaaacaaacatttatgcaggcaacactccttgcagatccagaaactgaggcacaatagggttatgacttgctcaagaatatgtagctgctagggggtaaatcaaggcatcacaatttctgttcagcgggcaggaataggctgtgaattgctagcactttttttttttaagcaattactttttgacttgttcctctgaaagtgcaagaggcgtacacctttcccaaatgtagactagaatctgcaggatgccacccactgtatagttctgctttcccagagaggaagaacttttagaaaccaaatgatcttaattgttattgcccacccctggcttttccgggtagaaaattcacagtaggaatgattgttaagagagagtgcttggaaccatgggttaacaggaaaggctacctaacttcacatatctgcaaccagagcagccaccaagcattacttagcagcaggaaaatgattgtatttgagttcctgtgtgtccaaaactgaggcaccatgttctttgaaaacatgccacctcaaggctgggcgcggtggctcacacctgtaatcccagcactttgggaggccgaggcgggcggatcaccggaggtcgggagtttgagaccagcctgaccaacatggagaaaccccatctctactaaaaatacaaaattagccgggcgtggtggcatgcgcctataatctcagctacttgggaggctgaggcaggagaattgcttgaacccaggaggcggaggttgcggtgagttgagatcgtgccattgcactccggcctgggcaacaacagcaaaactccgtctcaaaaaaaaaaaaaaaaaaattgccacctcacagtctctatcgttgggccctgtggttgcaaagctgcctcctgaattaagaaggaaagggaaaagatatagctggaagcgagtggaagagatgctgagggctggggctgcacagacgtgctcagcagggctacaggtgctcaagccctattggggatgggtggggagtggggcagcggcgtttgccaccttaagaattggggccaaagccactgatgtttatttgacagtgacactgcactgggtacttaaagaaattatttcccgttgtaattataattactgcttattaaggaaaatatgggaattttagaaagaatcaagtttgccacccaaatgctaccactgttaatcttttggtgttaaatgttccccctagacatttctgtgcatagatttttggtgtgtttacatagtcgttattctgtatatacaattttatgtcccttttgtacttaacgtataaacattttttccatgttacagtctt

SEQ ID NO: 301187 - DNA, 3888 bp, Homo sapiens
atctcctactctggtgcgtcttatgacttgccagagaggtggcaatccaccgataaccctgttacagtaagaaatatggagtggacctcatcaaataccctcatgtcaacgaacacagttgtatagggcttctaacaaacatagacgatactatactgttgctttccttgtctgatagatcaacactacactcatgatagtcttcccggacatcccgatagcggtggtggccttgtccatgtcacctgtggatgacactttcatttctgggtctcttgataagaccattcgactctgggatctccggtctcctaactgccagggcctcatgcatctgcaggggaagccagtttgttcttttgatccagaagggttaattttcgctgcaggtgtcaactctgaaatggtcaagctttatgaccttcgttcttttgataaggggccatttgctacctttaagatgcagtatgatcgaacttgtgagtggacaggacttaaattcagcaatgatggcaagctcatcctcatttccaccaacggcagcttcattcgtctgattgatgcattcaaaggagtggtgatgcacacatttgggggttatgccaacagcaaagctgtcacactggaggcttcatttactccagactctcagtttattatgattggttcagaggatggcaagatccatgtctggaatggagagagcggtataaaagtagctgtgttggatggtaaacacacaggcccgattacctgtttgcaattcaaccccaagttcatgacttttgccagtgcgtgttccaacatggccttttggttgcccaccattgatgactgaccctgttgctgcttggctatttctgtatagtgagggcggccagcaggaagaaactcagagggaactgagataatagtgggattggatcatttgactgggctggagaacatccttttacatggccttcccatggatgtgctgtacatctgctcaaaagaaaataattactttgatgagcgtcttcaaaaggactcttggtgcaacagactcaattggaactcagcttttctaactgtcactgcaccaagctctgctggaggagtgaccagactcacgatttggtatagtggggctctcaagcatcttcaatttgaatgtacatgctgctgaggagccggtgaagtcatcagttccgcacatcccttctaccctccaactgcatgggaagccaaagtcctggttttgaaatgcttgggcagctcagccgcttgccctcaccctgcatgtcttgttactgggtctccctgtgtacttgtggcattatccacaaccatcatgtttcttaggtgccaaacatttacagaaacattttcatatatcttggggtcagagaaagggacagatacagaaggaccttgcttgcaggaagccatgcagttagtttctgcagttagtcgtgtgaggctaggtggttgggcaggcctcgggctgtaggtgttgggtgggaaaaagacccaagggcctgaaagggagggaaaggggagggtagcgggagggtagcaggtgagttcctagggctggaaggtttagcagcagcctggtgcagtgccctgtcatcaagacaaacccacggtcctcctgggtgcctaccaagcttggtttgtacaaaagcaaggtgggagtctatttttgtacatgagatacatcacacttacctgtgggccagtattgtgaagtgagtctgagttgtttacactgatgccttccctgcccaccacaaattgtgtacatagtcttcagatgataccacccctttccccagctcccaaccaagagctggttctaggcctgtgttatatgtcatatttagcgtttttatatatgacctttgatttctgttgtttgtattttagcacagtgtatgcaccttcatttaaatacatctgtgtgcatacagatacgcatatatgtgtgtgcgtatgcatatatctctcatctgtagtttccaagagttcagctgaagcagatggagtcctgcagcccaggagacaccctgcatccctgctaatagtgtttgccacaagtattagtgagtcttccttattaatattttcatttcagaagactgaagcaaagctgatagtgtttgctgtttctttggcagctaagtgagggtcttgggatgacttgctgtgttcctcaagctgcactttggggccatctctgcagtattagccccctttttgcttggtggtactctgtctgtgcctgtgtgtgtgtgtgatagtcactcttgcatggcttccatgtctggtttgtggcatttggggataaggtgctgaagccagagcatttgcagtttgtttgaggcctcgttgccaatgatagatcactcctgttgacctggtatgtctgcttgcttgctgcttttccttgctttctcttggaagaggaaaggactctggtcaggcccaggctgagtgagatgagctgcagctggctcatggccttcttagagcagagagaggagtatgtcattttactaagttcctaaacaaacatttatgcaggcaacactccttgcagatccagaaactgaggcacaatagggttatgacttgctcaagaatatgtagctgctagggggtaaatcaaggcatcacaatttctgttcagcgggcaggaataggctgtgaattgctagcactttttttttttaagcaattactttttgacttgttcctctgaaagtgcaagaggcgtacacctttcccaaatgtagactagaatctgcaggatgccacccactgtatagttctgctttcccagagaggaagaacttttagaaaccaaatgatcttaattgttattgcccacccctggcttttccgggtagaaaattcacagtaggaatgattgttaagagagagtgcttggaaccatgggttaacaggaaaggctacctaacttcacatatctgcaaccagagcagccaccaagcattacttagcagcaggaaaatgattgtatttgagttcctgtgtgtccaaaactgaggcaccatgttctttgaaaacatgccacctcaaggctgggcgcggtggctcacacctgtaatcccagcactttgggaggccgaggcgggcggatcaccggaggtcgggagtttgagaccagcctgaccaacatggagaaaccccatctctactaaaaatacaaaattagccgggcgtggtggcatgcgcctataatctcagctacttgggaggctgaggcaggagaattgcttgaacccaggaggcggaggttgcggtgagttgagatcgtgccattgcactccggcctgggcaacaacagcaaaactccgtctcaaaaaaaaaaaaaaaaaaattgccacctcacagtctctatcgttgggccctgtggttgcaaagctgcctcctgaattaagaaggaaagggaaaagatatagctggaagcgagtggaagagatgctgagggctggggctgcacagacgtgctcagcagggctacaggtgctcaagccctattggggatgggtggggagtggggcagcggcgtttgccaccttaagaattggggccaaagccactgatgtttatttgacagtgacactgcactgggtacttaaagaaattatttcccgttgtaattataattactgcttattaaggaaaatatgggaattttagaaagaatcaagtttgccacccaaatgctaccactgttaatcttttggtgttaaatgttccccctagacatttctgtgcatagatttttggtgtgtttacatagtcgttattctgtatatacaattttatgtcccttttgtacttaacgtataaacattttttccatgttacagtctt

SEQ ID NO: 301188 - DNA, 4436 bp, Homo sapiens
cccaaaatggcggacacaatgagccggcgacgcgccggttgtccgtgaggtggctgtgaggacgaacggtcggcgaggctccacagtccaggcagaagaccctcgaccaagcaggaagaagaggaggaggcggcccaactgttggccgacttcccgctagccgccggcgcggcgcccgccccgcctgggttggcccctcggcagcccgcccgctcgccgccgggccccgccccggccctgcgccgccgctgccttccccagccgccgccatgaagctgaccgacagcgtgttgcggagcttccgcgtcgctaaggtgttccgcgaaaactcggacaagattaactgcttcgatttcagccccaacggcgagacggtcatctcgagtagcgacgacgactccatcgtgctctatgactgccaggagggcaaaccaaagagaaccctgtacagtaagaaatatggtgtggacctcatcagatacactcatgcagcaaacacagttgtttacagctctaacaaaatagacgatactattcgttacttgtccttgcatgacaacaaatacatcagatactttcctggacatagcaaaagggtggtggccttgtccatgtcacctgtggatgacactttcatttctgggtctcttgataagaccattcgactctgggatctccggtctcctaactgccagggcctcatgcatctgcaggggaagccagtttgttcttttgatccagaagggttaattttcgctgcaggtgtcaactctgaaatggtcaagctttatgaccttcgttcttttgataaggggccatttgctacctttaagatgcagtatgatcgaacttgtgagtggacaggacttaaattcagcaatgatggcaagctcatcctcatttccaccaacggcagcttcattcgtctgattgatgcattcaaaggagtggtgatgcacacatttgggggttatgccaacagcaaagctgtcacactggaggcttcatttactccagactctcagtttattatgattggttcagaggatggcaagatccatgtctggaatggagagagcggtataaaagtagctgtgttggatggtaaacacacaggcccgattacctgtttgcaattcaaccccaagttcatgacttttgccagtgcgtgttccaacatggccttttggttgcccaccattgatgactgaccctgttgctgcttggctatttctgtatagtgagggcggccagcaggaagaaactcagagggaactgagataatagtgggattggatcatttgactgggctggagaacatccttttacatggccttcccatggatgtgctgtacatctgctcaaaagaaaataattactttgatgagcgtcttcaaaaggactcttggtgcaacagactcaattggaactcagcttttctaactgtcactgcaccaagctctgctggaggagtgaccagactcacgatttggtatagtggggctctcaagcatcttcaatttgaatgtacatgctgctgaggagccggtgaagtcatcagttccgcacatcccttctaccctccaactgcatgggaagccaaagtcctggttttgaaatgcttgggcagctcagccgcttgccctcaccctgcatgtcttgttactgggtctccctgtgtacttgtggcattatccacaaccatcatgtttcttaggtgccaaacatttacagaaacattttcatatatcttggggtcagagaaagggacagatacagaaggaccttgcttgcaggaagccatgcagttagtttctgcagttagtcgtgtgaggctaggtggttgggcaggcctcgggctgtaggtgttgggtgggaaaaagacccaagggcctgaaagggagggaaaggggagggtagcgggagggtagcaggtgagttcctagggctggaaggtttagcagcagcctggtgcagtgccctgtcatcaagacaaacccacggtcctcctgggtgcctaccaagcttggtttgtacaaaagcaaggtgggagtctatttttgtacatgagatacatcacacttacctgtgggccagtattgtgaagtgagtctgagttgtttacactgatgccttccctgcccaccacaaattgtgtacatagtcttcagatgataccacccctttccccagctcccaaccaagagctggttctaggcctgtgttatatgtcatatttagcgtttttatatatgacctttgatttctgttgtttgtattttagcacagtgtatgcaccttcatttaaatacatctgtgtgcatacagatacgcatatatgtgtgtgcgtatgcatatatctctcatctgtagtttccaagagttcagctgaagcagatggagtcctgcagcccaggagacaccctgcatccctgctaatagtgtttgccacaagtattagtgagtcttccttattaatattttcatttcagaagactgaagcaaagctgatagtgtttgctgtttctttggcagctaagtgagggtcttgggatgacttgctgtgttcctcaagctgcactttggggccatctctgcagtattagccccctttttgcttggtggtactctgtctgtgcctgtgtgtgtgtgtgatagtcactcttgcatggcttccatgtctggtttgtggcatttggggataaggtgctgaagccagagcatttgcagtttgtttgaggcctcgttgccaatgatagatcactcctgttgacctggtatgtctgcttgcttgctgcttttccttgctttctcttggaagaggaaaggactctggtcaggcccaggctgagtgagatgagctgcagctggctcatggccttcttagagcagagagaggagtatgtcattttactaagttcctaaacaaacatttatgcaggcaacactccttgcagatccagaaactgaggcacaatagggttatgacttgctcaagaatatgtagctgctagggggtaaatcaaggcatcacaatttctgttcagcgggcaggaataggctgtgaattgctagcactttttttttttaagcaattactttttgacttgttcctctgaaagtgcaagaggcgtacacctttcccaaatgtagactagaatctgcaggatgccacccactgtatagttctgctttcccagagaggaagaacttttagaaaccaaatgatcttaattgttattgcccacccctggcttttccgggtagaaaattcacagtaggaatgattgttaagagagagtgcttggaaccatgggttaacaggaaaggctacctaacttcacatatctgcaaccagagcagccaccaagcattacttagcagcaggaaaatgattgtatttgagttcctgtgtgtccaaaactgaggcaccatgttctttgaaaacatgccacctcaaggctgggcgcggtggctcacacctgtaatcccagcactttgggaggccgaggcgggcggatcaccggaggtcgggagtttgagaccagcctgaccaacatggagaaaccccatctctactaaaaatacaaaattagccgggcgtggtggcatgcgcctataatctcagctacttgggaggctgaggcaggagaattgcttgaacccaggaggcggaggttgcggtgagttgagatcgtgccattgcactccggcctgggcaacaacagcaaaactccgtctcaaaaaaaaaaaaaaaaaaattgccacctcacagtctctatcgttgggccctgtggttgcaaagctgcctcctgaattaagaaggaaagggaaaagatatagctggaagcgagtggaagagatgctgagggctggggctgcacagacgtgctcagcagggctacaggtgctcaagccctattggggatgggtggggagtggggcagcggcgtttgccaccttaagaattggggccaaagccactgatgtttatttgacagtgacactgcactgggtacttaaagaaattatttcccgttgtaattataattactgcttattaaggaaaatatgggaattttagaaagaatcaagtttgccacccaaatgctaccactgttaatcttttggtgttaaatgttccccctagacatttctgtgcatagatttttggtgtgtttacatagtcgttattctgtatatacaattttatgtcccttttgtacttaacgtataaacattttttccatgttacagtcttaaacagaattttatggctgcagcctcttcgatttgagtttctgtagcatggtttgcctggttcccagagctggagggaggcttgggttgtctcctgttagttctggctcacactgcagcttgctgtaatgctgtgtagacggattgctgggctccctgggactgcctctgactgc

SEQ ID NO: 301189 - DNA, 4514 bp, Homo sapiens
cccaaaatggcggacacaatgagccggcgacgcgccggttgtccgtgaggtggctgtgaggacgaacggtcggcgaggctccacagtccaggcagaagaccctcgaccaagcaggaagaagaggaggaggcggcccaactgttggccgacttcccgctagccgccggcgcggcgcccgccccgcctgggttggcccctcggcagcccgcccgctcgccgccgggccccgccccggccctgcgccgccgctgccttccccagccgccgccatgaagctgaccgacagcgtgttgcggagcttccgcgtcgctaaggtgttccgcgaaaactcggacaagattaactgcttcgatttcagccccaacggcgagacggtcatctcgagtagcgacgacgactccatcgtgctctatgactgccaggagggcaaaccaaagagaaccctgtacagtaagaaatatggtgtggacctcatcagatacactcatgcagcaaacacagttgtttacagctctaacaaaatagacgatactattcgttacttgtccttgcatgacaacaaatacatcagatactttcctggacatagcaaaagggtggtggccttgtccatgtcacctgtggatgacactttcatttctgggtctcttgataagaccattcgactctgggatctccggtctcctaactgccagggcctcatgcatctgcaggggaagccagtttgttcttttgatccagaagggttaattttcgctgcaggtgtcaactctgaaatggtcaagctttatgaccttcgttcttttgataaggggccatttgctacctttaagatgcagtatgatcgaacttgtgagtggacaggacttaaattcagcaatgatggcaagctcatcctcatttccaccaacggcagcttcattcgtctgattgatgcattcaaaggagtggtgatgcacacatttgggggttatgccaacagcaaagctgtcacactggaggcttcatttactccagactctcagtttattatgattggttcagaggatggcaagatccatgtctggaatggagagagcggtataaaagtagctgtgttggatggtaaacacacaggcccgattacctgtttgcaattcaaccccaagttcatgacttttgccagtgcgtgttccaacatggccttttggttgcccaccattgatgactgaccctgttgctgcttggctatttctgtatagtgagggcggccagcaggaagaaactcagagggaactgagataatagtgggattggatcatttgactgggctggagaacatccttttacatggccttcccatggatgtgctgtacatctgctcaaaagaaaataattactttgatgagcgtcttcaaaaggactcttggtgcaacagactcaattggaactcagcttttctaactgtcactgcaccaagctctgctggaggagtgaccagactcacgatttggtatagtggggctctcaagcatcttcaatttgaatgtacatgctgctgaggagccggtgaagtcatcagttccgcacatcccttctaccctccaactgcatgggaagccaaagtcctggttttgaaatgcttgggcagctcagccgcttgccctcaccctgcatgtcttgttactgggtctccctgtgtacttgtggcattatccacaaccatcatgtttcttaggtgccaaacatttacagaaacattttcatatatcttggggtcagagaaagggacagatacagaaggaccttgcttgcaggaagccatgcagttagtttctgcagttagtcgtgtgaggctaggtggttgggcaggcctcgggctgtaggtgttgggtgggaaaaagacccaagggcctgaaagggagggaaaggggagggtagcgggagggtagcaggtgagttcctagggctggaaggtttagcagcagcctggtgcagtgccctgtcatcaagacaaacccacggtcctcctgggtgcctaccaagcttggtttgtacaaaagcaaggtgggagtctatttttgtacatgagatacatcacacttacctgtgggccagtattgtgaagtgagtctgagttgtttacactgatgccttccctgcccaccacaaattgtgtacatagtcttcagatgataccacccctttccccagctcccaaccaagagctggttctaggcctgtgttatatgtcatatttagcgtttttatatatgacctttgatttctgttgtttgtattttagcacagtgtatgcaccttcatttaaatacatctgtgtgcatacagatacgcatatatgtgtgtgcgtatgcatatatctctcatctgtagtttccaagagttcagctgaagcagatggagtcctgcagcccaggagacaccctgcatccctgctaatagtgtttgccacaagtattagtgagtcttccttattaatattttcatttcagaagactgaagcaaagctgatagtgtttgctgtttctttggcagctaagtgagggtcttgggatgacttgctgtgttcctcaagctgcactttggggccatctctgcagtattagccccctttttgcttggtggtactctgtctgtgcctgtgtgtgtgtgtgatagtcactcttgcatggcttccatgtctggtttgtggcatttggggataaggtgctgaagccagagcatttgcagtttgtttgaggcctcgttgccaatgatagatcactcctgttgacctggtatgtctgcttgcttgctgcttttccttgctttctcttggaagaggaaaggactctggtcaggcccaggctgagtgagatgagctgcagctggctcatggccttcttagagcagagagaggagtatgtcattttactaagttcctaaacaaacatttatgcaggcaacactccttgcagatccagaaactgaggcacaatagggttatgacttgctcaagaatatgtagctgctagggggtaaatcaaggcatcacaatttctgttcagcgggcaggaataggctgtgaattgctagcactttttttttttaagcaattactttttgacttgttcctctgaaagtgcaagaggcgtacacctttcccaaatgtagactagaatctgcaggatgccacccactgtatagttctgctttcccagagaggaagaacttttagaaaccaaatgatcttaattgttattgcccacccctggcttttccgggtagaaaattcacagtaggaatgattgttaagagagagtgcttggaaccatgggttaacaggaaaggctacctaacttcacatatctgcaaccagagcagccaccaagcattacttagcagcaggaaaatgattgtatttgagttcctgtgtgtccaaaactgaggcaccatgttctttgaaaacatgccacctcaaggctgggcgcggtggctcacacctgtaatcccagcactttgggaggccgaggcgggcggatcaccggaggtcgggagtttgagaccagcctgaccaacatggagaaaccccatctctactaaaaatacaaaattagccgggcgtggtggcatgcgcctataatctcagctacttgggaggctgaggcaggagaattgcttgaacccaggaggcggaggttgcggtgagttgagatcgtgccattgcactccggcctgggcaacaacagcaaaactccgtctcaaaaaaaaaaaaaaaaaaattgccacctcacagtctctatcgttgggccctgtggttgcaaagctgcctcctgaattaagaaggaaagggaaaagatatagctggaagcgagtggaagagatgctgagggctggggctgcacagacgtgctcagcagggctacaggtgctcaagccctattggggatgggtggggagtggggcagcggcgtttgccaccttaagaattggggccaaagccactgatgtttatttgacagtgacactgcactgggtacttaaagaaattatttcccgttgtaattataattactgcttattaaggaaaatatgggaattttagaaagaatcaagtttgccacccaaatgctaccactgttaatcttttggtgttaaatgttccccctagacatttctgtgcatagatttttggtgtgtttacatagtcgttattctgtatatacaattttatgtcccttttgtacttaacgtataaacattttttccatgttacagtcttaaaagaaaacgagacaacgagagatagcaaacgaaaacacccaagcatggatcatacgtaagtgccgcacaaaaaaacaatacaaagagggaacgcagagaaagataagaacaagaaagactgactcagacgcaaagaacagacgccagcccgcaaccatgagacaagcgaaacaacatcacgggaggggggggacgcgccctcaaaaacattaccgccctcgggcggagcgccgaccggagcggcgcaacag

SEQ ID NO: 301190 - DNA, 4588 bp, Homo sapiens
cccaaaatggcggacacaatgagccggcgacgcgccggttgtccgtgaggtggctgtgaggacgaacggtcggcgaggctccacagtccaggcagaagaccctcgaccaagcaggaagaagaggaggaggcggcccaactgttggccgacttcccgctagccgccggcgcggcgcccgccccgcctgggttggcccctcggcagcccgcccgctcgccgccgggccccgccccggccctgcgccgccgctgccttccccagccgccgccatgaagctgaccgacagcgtgttgcggagcttccgcgtcgctaaggtgttccgcgaaaactcggacaagattaactgcttcgatttcagccccaacggcgagacggtcatctcgagtagcgacgacgactccatcgtgctctatgactgccaggagggcaaaccaaagagaaccctgtacagtaagaaatatggtgtggacctcatcagatacactcatgcagcaaacacagttgtttacagctctaacaaaatagacgatactattcgttacttgtccttgcatgacaacaaatacatcagatactttcctggacatagcaaaagggtggtggccttgtccatgtcacctgtggatgacactttcatttctgggtctcttgataagaccattcgactctgggatctccggtctcctaactgccagggcctcatgcatctgcaggggaagccagtttgttcttttgatccagaagggttaattttcgctgcaggtgtcaactctgaaatggtcaagctttatgaccttcgttcttttgataaggggccatttgctacctttaagatgcagtatgatcgaacttgtgagtggacaggacttaaattcagcaatgatggcaagctcatcctcatttccaccaacggcagcttcattcgtctgattgatgcattcaaaggagtggtgatgcacacatttgggggttatgccaacagcaaagctgtcacactggaggcttcatttactccagactctcagtttattatgattggttcagaggatggcaagatccatgtctggaatggagagagcggtataaaagtagctgtgttggatggtaaacacacaggcccgattacctgtttgcaattcaaccccaagttcatgacttttgccagtgcgtgttccaacatggccttttggttgcccaccattgatgactgaccctgttgctgcttggctatttctgtatagtgagggcggccagcaggaagaaactcagagggaactgagataatagtgggattggatcatttgactgggctggagaacatccttttacatggccttcccatggatgtgctgtacatctgctcaaaagaaaataattactttgatgagcgtcttcaaaaggactcttggtgcaacagactcaattggaactcagcttttctaactgtcactgcaccaagctctgctggaggagtgaccagactcacgatttggtatagtggggctctcaagcatcttcaatttgaatgtacatgctgctgaggagccggtgaagtcatcagttccgcacatcccttctaccctccaactgcatgggaagccaaagtcctggttttgaaatgcttgggcagctcagccgcttgccctcaccctgcatgtcttgttactgggtctccctgtgtacttgtggcattatccacaaccatcatgtttcttaggtgccaaacatttacagaaacattttcatatatcttggggtcagagaaagggacagatacagaaggaccttgcttgcaggaagccatgcagttagtttctgcagttagtcgtgtgaggctaggtggttgggcaggcctcgggctgtaggtgttgggtgggaaaaagacccaagggcctgaaagggagggaaaggggagggtagcgggagggtagcaggtgagttcctagggctggaaggtttagcagcagcctggtgcagtgccctgtcatcaagacaaacccacggtcctcctgggtgcctaccaagcttggtttgtacaaaagcaaggtgggagtctatttttgtacatgagatacatcacacttacctgtgggccagtattgtgaagtgagtctgagttgtttacactgatgccttccctgcccaccacaaattgtgtacatagtcttcagatgataccacccctttccccagctcccaaccaagagctggttctaggcctgtgttatatgtcatatttagcgtttttatatatgacctttgatttctgttgtttgtattttagcacagtgtatgcaccttcatttaaatacatctgtgtgcatacagatacgcatatatgtgtgtgcgtatgcatatatctctcatctgtagtttccaagagttcagctgaagcagatggagtcctgcagcccaggagacaccctgcatccctgctaatagtgtttgccacaagtattagtgagtcttccttattaatattttcatttcagaagactgaagcaaagctgatagtgtttgctgtttctttggcagctaagtgagggtcttgggatgacttgctgtgttcctcaagctgcactttggggccatctctgcagtattagccccctttttgcttggtggtactctgtctgtgcctgtgtgtgtgtgtgatagtcactcttgcatggcttccatgtctggtttgtggcatttggggataaggtgctgaagccagagcatttgcagtttgtttgaggcctcgttgccaatgatagatcactcctgttgacctggtatgtctgcttgcttgctgcttttccttgctttctcttggaagaggaaaggactctggtcaggcccaggctgagtgagatgagctgcagctggctcatggccttcttagagcagagagaggagtatgtcattttactaagttcctaaacaaacatttatgcaggcaacactccttgcagatccagaaactgaggcacaatagggttatgacttgctcaagaatatgtagctgctagggggtaaatcaaggcatcacaatttctgttcagcgggcaggaataggctgtgaattgctagcactttttttttttaagcaattactttttgacttgttcctctgaaagtgcaagaggcgtacacctttcccaaatgtagactagaatctgcaggatgccacccactgtatagttctgctttcccagagaggaagaacttttagaaaccaaatgatcttaattgttattgcccacccctggcttttccgggtagaaaattcacagtaggaatgattgttaagagagagtgcttggaaccatgggttaacaggaaaggctacctaacttcacatatctgcaaccagagcagccaccaagcattacttagcagcaggaaaatgattgtatttgagttcctgtgtgtccaaaactgaggcaccatgttctttgaaaacatgccacctcaaggctgggcgcggtggctcacacctgtaatcccagcactttgggaggccgaggcgggcggatcaccggaggtcgggagtttgagaccagcctgaccaacatggagaaaccccatctctactaaaaatacaaaattagccgggcgtggtggcatgcgcctataatctcagctacttgggaggctgaggcaggagaattgcttgaacccaggaggcggaggttgcggtgagttgagatcgtgccattgcactccggcctgggcaacaacagcaaaactccgtctcaaaaaaaaaaaaaaaaaaattgccacctcacagtctctatcgttgggccctgtggttgcaaagctgcctcctgaattaagaaggaaagggaaaagatatagctggaagcgagtggaagagatgctgagggctggggctgcacagacgtgctcagcagggctacaggtgctcaagccctattggggatgggtggggagtggggcagcggcgtttgccaccttaagaattggggccaaagccactgatgtttatttgacagtgacactgcactgggtacttaaagaaattatttcccgttgtaattataattactgcttattaaggaaaatatgggaattttagaaagaatcaagtttgccacccaaatgctaccactgttaatcttttggtgttaaatgttccccctagacatttctgtgcatagatttttggtgtgtttacatagtcgttattctgtatatacaattttatgtcccttttgtacttaacgtataaacattttttccatgttacagtcttaaaaaaaaaaaaaaaaaaaaaaaaaaaaaaaaaaaaaaaaaaaactgggcaccccgcgtgggccccgaaagaactctttaaaaaacactctcagaagagagccgcgtggggcccgagggggccacctaagaggggcaaaagagcgttcaccaagagagacaccggggaaaatcaaccgggaagcaagaaagatgctcgcgagaataataaaaaccgagagagagacccccggggagccataagaacgactccaaaaagagccccaaaggaggacaaggggggactaccaggggcgagcaccgagaggcccacaagagacggaaaacc

SEQ ID NO: 301191 - DNA, 4117 bp, Homo sapiens
cccaaaatggcggacacaatgagccggcgacgcgccggttgtccgtgaggtggctgtgaggacgaacggtcggcgaggctccacagtccaggcagaagaccctcgaccaagcaggaagaagaggaggaggcggcccaactgttggccgacttcccgctagccgccggcgcggcgcccgccccgcctgggttggcccctcggcagcccgcccgctcgccgccgggccccgccccggccctgcgccgccgctgccttccccagccgccgccatgaagctgaccgacagcgtgttgcggagcttccgcgtcgctaaggtgttccgcgaaaactcggacaagattaactgcttcgatttcagccccaacggcgagacggtcatctcgagtagcgacgacgactccatcgtgctctatgactgccaggagggcaaaccaaagagaaccctgtacagtaagaaatatggtgtggacctcatcagatacactcatgcagcaaacacagttgtttacagctctaacaaaatagacgatactattcgttacttgtccttgcatgacaacaaatacatcagatactttcctggacatagcaaaagggtggtggccttgtccatgtcacctgtggatgacactttcatttctgggtctcttgataagaccattcgactctgggatctccggtctcctaactgccagggcctcatgcatctgcaggggaagccagtttgttcttttgatccagaagggttaattttcgctgcaggtgtcaactctgaaatggtcaagctttatgaccttcgttcttttgataaggggccatttgctacctttaagatgcagtatgatcgaacttgtgagtggacaggacttaaattcagcaatgatggcaagctcatcctcatttccaccaacggcagcttcattcgtctgattgatgcattcaaaggagtggtgatgcacacatttgggggttatgccaacagcaaagctgtcacactggaggcttcatttactccagactctcagtttattatgattggttcagaggatggcaagatccatgtctggaatggagagagcggtataaaagtagctgtgttggatggtaaacacacaggcccgattacctgtttgcaattcaaccccaagttcatgacttttgccagtgcgtgttccaacatggccttttggttgcccaccattgatgactgaccctgttgctgcttggctatttctgtatagtgagggcggccagcaggaagaaactcagagggaactgagataatagtgggattggatcatttgactgggctggagaacatccttttacatggccttcccatggatgtgctgtacatctgctcaaaagaaaataattactttgatgagcgtcttcaaaaggactcttggtgcaacagactcaattggaactcagcttttctaactgtcactgcaccaagctctgctggaggagtgaccagactcacgatttggtatagtggggctctcaagcatcttcaatttgaatgtacatgctgctgaggagccggtgaagtcatcagttccgcacatcccttctaccctccaactgcatgggaagccaaagtcctggttttgaaatgcttgggcagctcagccgcttgccctcaccctgcatgtcttgttactgggtctccctgtgtacttgtggcattatccacaaccatcatgtttcttaggtgccaaacatttacagaaacattttcatatatcttggggtcagagaaagggacagatacagaaggaccttgcttgcaggaagccatgcagttagtttctgcagttagtcgtgtgaggctaggtggttgggcaggcctcgggctgtaggtgttgggtgggaaaaagacccaagggcctgaaagggagggaaaggggagggtagcgggagggtagcaggtgagttcctagggctggaaggtttagcagcagcctggtgcagtgccctgtcatcaagacaaacccacggtcctcctgggtgcctaccaagcttggtttgtacaaaagcaaggtgggagtctatttttgtacatgagatacatcacacttacctgtgggccagtattgtgaagtgagtctgagttgtttacactgatgccttccctgcccaccacaaattgtgtacatagtcttcagatgataccacccctttccccagctcccaaccaagagctggttctaggcctgtgttatatgtcatatttagcgtttttatatatgacctttgatttctgttgtttgtattttagcacagtgtatgcaccttcatttaaatacatctgtgtgcatacagatacgcatatatgtgtgtgcgtatgcatatatctctcatctgtagtttccaagagttcagctgaagcagatggagtcctgcagcccaggagacaccctgcatccctgctaatagtgtttgccacaagtattagtgagtcttccttattaatattttcatttcagaagactgaagcaaagctgatagtgtttgctgtttctttggcagctaagtgagggtcttgggatgacttgctgtgttcctcaagctgcactttggggccatctctgcagtattagccccctttttgcttggtggtactctgtctgtgcctgtgtgtgtgtgtgatagtcactcttgcatggcttccatgtctggtttgtggcatttggggataaggtgctgaagccagagcatttgcagtttgtttgaggcctcgttgccaatgatagatcactcctgttgacctggtatgtctgcttgcttgctgcttttccttgctttctcttggaagaggaaaggactctggtcaggcccaggctgagtgagatgagctgcagctggctcatggccttcttagagcagagagaggagtatgtcattttactaagttcctaaacaaacatttatgcaggcaacactccttgcagatccagaaactgaggcacaatagggttatgacttgctcaagaataaatgtagactagaatctgcaggatgccacccactgtatagttctgctttcccagagaggaagaacttttagaaaccaaatgatcttaattgttattgcccacccctggcttttccgggtagaaaattcacagtaggaatgattgttaagagagagtgcttggaaccatgggttaacaggaaaggctacctaacttcacatatctgcaaccagagcagccaccaagcattacttagcagcaggaaaatgattgtatttgagttcctgtgtgtccaaaactgaggcaccatgttctttgaaaacatgccacctcaaggctgggcgcggtggctcacacctgtaatcccagcactttgggaggccgaggcgggcggatcaccggaggtcgggagtttgagaccagcctgaccaacatggagaaaccccatctctactaaaaatacaaaattagccgggcgtggtggcatgcgcctataatctcagctacttgggaggctgaggcaggagaattgcttgaacccaggaggcggaggttgcggtgagttgagatcgtgccattgcactccggcctgggcaacaacagcaaaactccgtctcaaaaaaaaaaaaaaaaaaattgccacctcacagtctctatcgttgggccctgtggttgcaaagctgcctcctgaattaagaaggaaagggaaaagatatagctggaagcgagtggaagagatgctgagggctggggctgcacagacgtgctcagcagggctacaggtgctcaagccctattggggatgggtggggagtggggcagcggcgtttgccaccttaagaattggggccaaagccactgatgtttatttgacagtgacactgcactgggtacttaaagaaattatttcccgttgtaattataattactgcttattaaggaaaatatgggaattttagaaagaatcaagtttgccacccaaatgctaccactgttaatcttttggtgttaaatgttccccctagacatttctgtgcatagatttttggtgtgtttacatagtcgttattctgtatatacaattttatgtcccttttgtacttaacgtataaacattttttccatgttacagtctt

SEQ ID NO: 301192 - DNA, 5368 bp, Homo sapiens
cccaaaatggcggacacaatgagccggcgacgcgccggttgtccgtgaggtggctgtgaggacgaacggtcggcgaggctccacagtccaggcagaagaccctcgaccaagcaggaagaagaggaggaggcggcccaactgttggccgacttcccgctagccgccggcgcggcgcccgccccgcctgggttggcccctcggcagcccgcccgctcgccgccgggccccgccccggccctgcgccgccgctgccttccccagccgccgccatgaagctgaccgacagcgtgttgcggagcttccgcgtcgctaaggtgttccgcgaaaactcggacaagattaactgcttcgatttcagccccaacggcgagacggtcatctcgagtagcgacgacgactccatcgtgctctatgactgccaggagggcaaaccaaagagaaccctgtacagtaagaaatatggtgtggacctcatcagatacactcatgcagcaaacacagttgtttacagctctaacaaaatagacgatactattcgttacttgtccttgcatgacaacaaatacatcagatactttcctggacatagcaaaagggtggtggccttgtccatgtcacctgtggatgacactttcatttctgggtctcttgataagaccattcgactctgggatctccggtctcctaactgccagggcctcatgcatctgcaggggaagccagtttgttcttttgatccagaagggttaattttcgctgcaggtgtcaactctgaaatggtcaagctttatgaccttcgttcttttgataaggggccatttgctacctttaagatgcagtatgatcgaacttgtgagtggacaggacttaaattcagcaatgatggcaagctcatcctcatttccaccaacggcagcttcattcgtctgattgatgcattcaaaggagtggtgatgcacacatttgggggttatgccaacagcaaagctgtcacactggaggcttcatttactccagactctcagtttattatgattggttcagaggatggcaagatccatgtctggaatggagagagcggtataaaagtagctgtgttggatggtaaacacacaggcccgattacctgtttgcaattcaaccccaagttcatgacttttgccagtgcgtgttccaacatggccttttggttgcccaccattgatgactgaccctgttgctgcttggctatttctgtatagtgagggcggccagcaggaagaaactcagagggaactgagataatagtgggattggatcatttgactgggctggagaacatccttttacatggccttcccatggatgtgctgtacatctgctcaaaagaaaataattactttgatgagcgtcttcaaaaggactcttggtgcaacagactcaattggaactcagcttttctaactgtcactgcaccaagctctgctggaggagtgaccagactcacgatttggtatagtggggctctcaagcatcttcaatttgaatgtacatgctgctgaggagccggtgaagtcatcagttccgcacatcccttctaccctccaactgcatgggaagccaaagtcctggttttgaaatgcttgggcagctcagccgcttgccctcaccctgcatgtcttgttactgggtctccctgtgtacttgtggcattatccacaaccatcatgtttcttaggtgccaaacatttacagaaacattttcatatatcttggggtcagagaaagggacagatacagaaggaccttgcttgcaggaagccatgcagttagtttctgcagttagtcgtgtgaggctaggtggttgggcaggcctcgggctgtaggtgttgggtgggaaaaagacccaagggcctgaaagggagggaaaggggagggtagcgggagggtagcaggtgagttcctagggctggaaggtttagcagcagcctggtgcagtgccctgtcatcaagacaaacccacggtcctcctgggtgcctaccaagcttggtttgtacaaaagcaaggtgggagtctatttttgtacatgagatacatcacacttacctgtgggccagtattgtgaagtgagtctgagttgtttacactgatgccttccctgcccaccacaaattgtgtacatagtcttcagatgataccacccctttccccagctcccaaccaagagctggttctaggcctgtgttatatgtcatatttagcgtttttatatatgacctttgatttctgttgtttgtattttagcacagtgtatgcaccttcatttaaatacatctgtgtgcatacagatacgcatatatgtgtgtgcgtatgcatatatctctcatctgtagtttccaagagttcagctgaagcagatggagtcctgcagcccaggagacaccctgcatccctgctaatagtgtttgccacaagtattagtgagtcttccttattaatattttcatttcagaagactgaagcaaagctgatagtgtttgctgtttctttggcagctaagtgagggtcttgggatgacttgctgtgttcctcaagctgcactttggggccatctctgcagtattagccccctttttgcttggtggtactctgtctgtgcctgtgtgtgtgtgtgatagtcactcttgcatggcttccatgtctggtttgtggcatttggggataaggtgctgaagccagagcatttgcagtttgtttgaggcctcgttgccaatgatagatcactcctgttgacctggtatgtctgcttgcttgctgcttttccttgctttctcttggaagaggaaaggactctggtcaggcccaggctgagtgagatgagctgcagctggctcatggccttcttagagcagagagaggagtatgtcattttactaagttcctaaacaaacatttatgcaggcaacactccttgcagatccagaaactgaggcacaatagggttatgacttgctcaagaatatgtagctgctagggggtaaatcaaggcatcacaatttctgttcagcgggcaggaataggctgtgaattgctagcactttttttttttaagcaattactttttgacttgttcctctgaaagtgcaagaggcgtacacctttcccaaatgtagactagaatctgcaggatgccacccactgtatagttctgctttcccagagaggaagaacttttagaaaccaaatgatcttaattgttattgcccacccctggcttttccgggtagaaaattcacagtaggaatgattgttaagagagagtgcttggaaccatgggttaacaggaaaggctacctaacttcacatatctgcaaccagagcagccaccaagcattacttagcagcaggaaaatgattgtatttgagttcctgtgtgtccaaaactgaggcaccatgttctttgaaaacatgccacctcaaggctgggattacaggcgtgagccaccaccgcacccagcctagatcaagcattttattctctagtgtgtctcaagagttttctcttccagatgtgtgaataagagtactcatgaattcaagccacagagtggagcagagatcaaagaaggtaatgtttaattataataaatgtgtttctgtccagattcctctgtatcactcagaggtgtattttgtggctgtggtttatgaaggcttcaggccttaatgaacctgagtgttagatttcctattcttagagtataggttatttatccctgaaccatttcaaataaatgtagaaatccacttgttagtctcatcttctttaacattctttggaaatgtaatttgtgaatacatttctagtaaatttctcaggaaattaatccaaaacagagtcatctttagtatgttaggtaggaaaggttatcaaaagtttaattaggagtgttacactgttattcggtactactttgttagaggcatttgcataggagataagtcttataaataataagatgcacaggttgggctttcacttctccgctgtgtgactgggacattttttttctggacagtttggtgaggaggagggctgtttgaaatagctggaggttcattaactgaaccaagacttactgagcctgctctgtaggtgccaggcactgttatacatagttagggatgaagtcatgaacaaaaaatctccacccacacagagggggaaagaaatgtactattggagttatggggttgaaatttcagtcaaggtgatatttgggtaaagggctaaagttagggagctaccatgccattagcttgggcaacttttcagacagagggaatattaagtgctaagccctcaagcaggaaaatctctgatatattctaagcacagcaaagggaccaatgtggggaggtaagcagggagaggaggaaggtgaggcctgaccaaacaggacccaggctgtgcagggccttgtattctatgcctgactgcagtggaatgagatgggaagccaatcttaagatttacattgtgactatgaacttgggatacagtggcactaagggtataatttatgacaaagttgctaatctggtataatccagaccaaccactcaatctctctcagccttcatttccttttctgtaaaaggataattttcacctcatttacttcataggactattataaagataaaaatgaaatatatgaaagcactataatactggaaattcttagtgataatttttaacaatgacaaactgttttaattgtaacttacttaaattgtgtgtcttttaagttattctgatttccctactgataccacattttgtctccatttctttgctagggtgtgaaacacataaggttgccaacacaagttcttttcacacaactccaaacacatcactgggaatggttcaggcaacgccatccaaagtgcagccatcacccaccgtgcacacaaaagaagcattaggtaaagtattttatctgagtgtgtagcacctgatgacaagttaatgaaagctcttttgcaacctgtttacaattattctttttgttctttaaggtttcatcatgaatatgtttcaggctcctacacttcctgatatttctgatgacaaagatgaatggcaatctctagatcaaaatgaagatgcatttgaagcccagtttcaaagtaataactatttaaaagctactaagtgcatagcattataggtggttatcacagaaaatatcaagaattatttaagaggtgaccctgcccttgattagcttgtcacataaaggcagggaatgcatgaaataaaaataagacagttcttgacaaggtactcaatgtgtgtgatagatttgcttgattaaaggg

SEQ ID NO: 301193 - DNA, 3248 bp, Homo sapiens
cccaaaatggcggacacaatgagccggcgacgcgccggttgtccgtgaggtggctgtgaggacgaacggtcggcgaggctccacagtccaggcagaagaccctcgaccaagcaggaagaagaggaggaggcggcccaactgttggccgacttcccgctagccgccggcgcggcgcccgccccgcctgggttggcccctcggcagcccgcccgctcgccgccgggccccgccccggccctgcgccgccgctgccttccccagccgccgccatgaagctgaccgacagcgtgttgcggagcttccgcgtcgctaaggtgttccgcgaaaactcggacaagattaactgcttcgatttcagccccaacggcgagacggtcatctcgagtagcgacgacgactccatcgtgctctatgactgccaggagggcaaaccaaagagaaccctgtacagtaagaaatatggtgtggacctcatcagatacactcatgcagcaaacacagttgtttacagctctaacaaaatagacgatactattcgttacttgtccttgcatgacaacaaatacatcagatactttcctggacatagcaaaagggtggtggccttgtccatgtcacctgtggatgacactttcatttctgggtctcttgataagaccattcgactctgggatctccggtctcctaactgccagggcctcatgcatctgcaggggaagccagtttgttcttttgatccagaagggttaattttcgctgcaggtgtcaactctgaaatggtcaagctttatgaccttcgttcttttgataaggggccatttgctacctttaagatgcagtatgatcgaacttgtgagtggacaggacttaaattcagcaatgatggcaagctcatcctcatttccaccaacggcagcttcattcgtctgattgatgcattcaaaggagtggtgatgcacacatttgggggttatgccaacagcaaagctgtcacactggaggcttcatttactccagactctcagtttattatgattggttcagaggatggcaagatccatgtctggaatggagagagcggtataaaagtagctgtgttggatggtaaacacacaggcccgattacctgtttgcaattcaaccccaagttcatgacttttgccagtgcgtgttccaacatggccttttggttgcccaccattgatgactgaccctgttgctgcttggctatttctgtatagtgagggcggccagcaggaagaaactcagagggaactgagataatagtgggattggatcatttgactgggctggagaacatccttttacatggccttcccatggatgtgctgtacatctgctcaaaagaaaataattactttgatgagcgtcttcaaaaggactcttggtgcaacagactcaattggaactcagcttttctaactgtcactgcaccaagctctgctggaggagtgaccagactcacgatttggtatagtggggctctcaagcatcttcaatttgaatgtacatgctgctgaggagccggtgaagtcatcagttccgcacatcccttctaccctccaactgcatgggaagccaaagtcctggttttgaaatgcttgggcagctcagccgcttgccctcaccctgcatgtcttgttactgggtctccctgtgtacttgtggcattatccacaaccatcatgtttcttaggtgccaaacatttacagaaacattttcatatatcttggggtcagagaaagggacagatacagaaggaccttgcttgcaggaagccatgcagttagtttctgcagttagtcgtgtgaggctaggtggttgggcaggcctcgggctgtaggtgttgggtgggaaaaagacccaagggcctgaaagggagggaaaggggagggtagcgggagggtagcaggtgagttcctagggctggaaggtttagcagcagcctggtgcagtgccctgtcatcaagacaaacccacggtcctcctgggtgcctaccaagcttggtttgtacaaaagcaaggtgggagtctatttttgtacatgagatacatcacacttacctgtgggccagtattgtgaagtgagtctgagttgtttacactgatgccttccctgcccaccacaaattgtgtacatagtcttcagatgataccacccctttccccagctcccaaccaagagctggttctaggcctgtgttatatgtcatatttagcgtttttatatatgacctttgatttctgttgtttgtattttagcacagtgtatgcaccttcatttaaatacatctgtgtgcatacagatacgcatatatgtgtgtgcgtatgcatatatctctcatctgtagtttccaagagttcagctgaagcagatggagtcctgcagcccaggagacaccctgcatccctgctaatagtgtttgccacaagtattagtgagtcttccttattaatattttcatttcagaagactgaagcaaagctgatagtgtttgctgtttctttggcagctaagtgagggtcttgggatgacttgctgtgttcctcaagctgcactttggggccatctctgcagtattagccccctttttgcttggtggtactctgtctgtgcctgtgtgtgtgtgtgatagtcactcttgcatggcttccatgtctggtttgtggcatttggggataaggtgctgaagccagagcatttgcagtttgtttgaggcctcgttgccaatgatagatcactcctgttgacctggtatgtctgcttgcttgctgcttttccttgctttctcttggaagaggaaaggactctggtcaggcccaggctgagtgagatgagctgcagctggctcatggccttcttagagcagagagaggagtatgtcattttactaagttcctaaacaaacatttatgcaggcaacactccttgcagatccagaaactgaggcacaatagggttatgacttgctcaagaatatgtagctgctagggggtaaatcaaggcatcacaatttctgttcagcgggcaggaataggctgtgaattgctagcactttttttttttaagcaattactttttgacttgttcctctgaaagtgcaagaggcgtacacctttcccaaatgtagactagaatctgcaggatgccacccactgccccatcctcccagagcagttaaaactgtctgaacttttcacaacaatgcgtccgcaaatgtggcgt

SEQ ID NO: 301194 - DNA, 3261 bp, Homo sapiens
cccaaaatggcggacacaatgagccggcgacgcgccggttgtccgtgaggtggctgtgaggacgaacggtcggcgaggctccacagtccaggcagaagaccctcgaccaagcaggaagaagaggaggaggcggcccaactgttggccgacttcccgctagccgccggcgcggcgcccgccccgcctgggttggcccctcggcagcccgcccgctcgccgccgggccccgccccggccctgcgccgccgctgccttccccagccgccgccatgaagctgaccgacagcgtgttgcggagcttccgcgtcgctaaggtgttccgcgaaaactcggacaagattaactgcttcgatttcagccccaacggcgagacggtcatctcgagtagcgacgacgactccatcgtgctctatgactgccaggagggcaaaccaaagagaaccctgtacagtaagaaatatggtgtggacctcatcagatacactcatgcagcaaacacagttgtttacagctctaacaaaatagacgatactattcgttacttgtccttgcatgacaacaaatacatcagatactttcctggacatagcaaaagggtggtggccttgtccatgtcacctgtggatgacactttcatttctgggtctcttgataagaccattcgactctgggatctccggtctcctaactgccagggcctcatgcatctgcaggggaagccagtttgttcttttgatccagaagggttaattttcgctgcaggtgtcaactctgaaatggtcaagctttatgaccttcgttcttttgataaggggccatttgctacctttaagatgcagtatgatcgaacttgtgagtggacaggacttaaattcagcaatgatggcaagctcatcctcatttccaccaacggcagcttcattcgtctgattgatgcattcaaaggagtggtgatgcacacatttgggggttatgccaacagcaaagctgtcacactggaggcttcatttactccagactctcagtttattatgattggttcagaggatggcaagatccatgtctggaatggagagagcggtataaaagtagctgtgttggatggtaaacacacaggcccgattacctgtttgcaattcaaccccaagttcatgacttttgccagtgcgtgttccaacatggccttttggttgcccaccattgatgactgaccctgttgctgcttggctatttctgtatagtgagggcggccagcaggaagaaactcagagggaactgagataatagtgggattggatcatttgactgggctggagaacatccttttacatggccttcccatggatgtgctgtacatctgctcaaaagaaaataattactttgatgagcgtcttcaaaaggactcttggtgcaacagactcaattggaactcagcttttctaactgtcactgcaccaagctctgctggaggagtgaccagactcacgatttggtatagtggggctctcaagcatcttcaatttgaatgtacatgctgctgaggagccggtgaagtcatcagttccgcacatcccttctaccctccaactgcatgggaagccaaagtcctggttttgaaatgcttgggcagctcagccgcttgccctcaccctgcatgtcttgttactgggtctccctgtgtacttgtggcattatccacaaccatcatgtttcttaggtgccaaacatttacagaaacattttcatatatcttggggtcagagaaagggacagatacagaaggaccttgcttgcaggaagccatgcagttagtttctgcagttagtcgtgtgaggctaggtggttgggcaggcctcgggctgtaggtgttgggtgggaaaaagacccaagggcctgaaagggagggaaaggggagggtagcgggagggtagcaggtgagttcctagggctggaaggtttagcagcagcctggtgcagtgccctgtcatcaagacaaacccacggtcctcctgggtgcctaccaagcttggtttgtacaaaagcaaggtgggagtctatttttgtacatgagatacatcacacttacctgtgggccagtattgtgaagtgagtctgagttgtttacactgatgccttccctgcccaccacaaattgtgtacatagtcttcagatgataccactatagttctgctttcccagagaggaagaacttttagaaaccaaatgatcttaattgttattgcccacccctggcttttccgggtagaaaattcacagtaggaatgattgttaagagagagtgcttggaaccatgggttaacaggaaaggctacctaacttcacatatctgcaaccagagcagccaccaagcattacttagcagcaggaaaatgattgtatttgagttcctgtgtgtccaaaactgaggcaccatgttctttgaaaacatgccacctcaaggctgggcgcggtggctcacacctgtaatcccagcactttgggaggccgaggcgggcggatcaccggaggtcgggagtttgagaccagcctgaccaacatggagaaaccccatctctactaaaaatacaaaattagccgggcgtggtggcatgcgcctataatctcagctacttgggaggctgaggcaggagaattgcttgaacccaggaggcggaggttgcggtgagttgagatcgtgccattgcactccggcctgggcaacaacagcaaaactccgtctcaaaaaaaaaaaaaaaaaaattgccacctcacagtctctatcgttgggccctgtggttgcaaagctgcctcctgaattaagaaggaaagggaaaagatatagctggaagcgagtggaagagatgctgagggctggggctgcacagacgtgctcagcagggctacaggtgctcaagccctattggggatgggtggggagtggggcagcggcgtttgccaccttaagaattggggccaaagccactgatgtttatttgacagtgacactgcactgggtacttaaagaaattatttcccgttgtaattataattactgcttattaaggaaaatatgggaattttagaaagaatcaagtttgccacccaaatgctaccactgttaatcttttggtgttaaatgttccccctagacatttctgtgcatagatttttggtgtgtttacatagtcgttattctgtatatacaattttatgtcccttttgtacttaacgtataaacattttttccatgttacagtctt

SEQ ID NO: 301195 - DNA, 3346 bp, Homo sapiens
cccaaaatggcggacacaatgagccggcgacgcgccggttgtccgtgaggtggctgtgaggacgaacggtcggcgaggctccacagtccaggcagaagaccctcgaccaagcaggaagaagaggaggaggcggcccaactgttggccgacttcccgctagccgccggcgcggcgcccgccccgcctgggttggcccctcggcagcccgcccgctcgccgccgggccccgccccggccctgcgccgccgctgccttccccagccgccgccatgaagctgaccgacagcgtgttgcggagcttccgcgtcgctaaggtgttccgcgaaaactcggacaagattaactgcttcgatttcagccccaacggcgagacggtcatctcgagtagcgacgacgactccatcgtgctctatgactgccaggagggcaaaccaaagagaaccctgtacagtaagaaatatggtgtggacctcatcagatacactcatgcagcaaacacagttgtttacagctctaacaaaatagacgatactattcgttacttgtccttgcatgacaacaaatacatcagatactttcctggacatagcaaaagggtggtggccttgtccatgtcacctgtggatgacactttcatttctgggtctcttgataagaccattcgactctgggatctccggtctcctaactgccagggcctcatgcatctgcaggggaagccagtttgttcttttgatccagaagggttaattttcgctgcaggtgtcaactctgaaatggtcaagctttatgaccttcgttcttttgataaggggccatttgctacctttaagatgcagtatgatcgaacttgtgagtggacaggacttaaattcagcaatgatggcaagctcatcctcatttccaccaacggcagcttcattcgtctgattgatgcattcaaaggagtggtgatgcacacatttgggggttatgccaacagcaaagctgtcacactggaggcttcatttactccagactctcagtttattatgattggttcagaggatggcaagatccatgtctggaatggagagagcggtataaaagtagctgtgttggatggtaaacacacaggcccgattacctgtttgcaattcaaccccaagttcatgacttttgccagtgcgtgttccaacatggccttttggttgcccaccattgatgactgaccctgttgctgcttggctatttctgtatagtgagggcggccagcaggaagaaactcagagggaactgagataatagtgggattggatcatttgactgggctggagaacatccttttacatggccttcccatggatgtgctgtacatctgctcaaaagaaaataattactttgatgagcgtcttcaaaaggactcttggtgcaacagactcaattggaactcagcttttctaactgtcactgcaccaagctctgctggaggagtgaccagactcacgatttggtatagtggggctctcaagcatcttcaatttgaatgtacatgctgctgaggagccggtgaagtcatcagttccgcacatcccttctaccctccaactgcatgggaagccaaagtcctggttttgaaatgcttgggcagctcagccgcttgccctcaccctgcatgtcttgttactgggtctccctgtgtacttgtggcattatccacaaccatcatgtttcttaggtgccaaacatttacagaaacattttcatatatcttggggtcagagaaagggacagatacagaaggaccttgcttgcaggaagccatgcagttagtttctgcagttagtcgtgtgaggctaggtggttgggcaggcctcgggctgtaggtgttgggtgggaaaaagacccaagggcctgaaagggagggaaaggggagggtagcgggagggtagcaggtgagttcctagggctggaaggtttagcagcagcctggtgcagtgccctgtcatcaagacaaacccacggtcctcctgggtgcctaccaagcttggtttgtacaaaagcaaggtgggagtctatttttgtacatgagatacatcacacttacctgtgggccagtattgtgaagtgagtctgagttgtttacactgatgccttccctgcccaccacaaattgtgtacatagtcttcagatgataccacccctttccccagctcccaaccaagagctggttctaggcctgtgttatatgtcatatttagcgtttttatatatgacctttgatttctgttgtttgtattttagcacagtgtatgcaccttcatttaaatacatctgtgtgcatacagatacgcatatatgtgtgtgcgtatgcatatatctctcatctgtagtttccaagagttcagctgaagcagatggagtcctgcagcccaggagacaccctgcatccctgctaatagtgtttgccacaagtattagtgagtcttccttattaatattttcatttcagaagactgaagcaaagctgatagtgtttgctgtttctttggcagctaagtgagggtcttgggatgacttgctgtgttcctcaagctgcactttggggccatctctgcagtattagccccctttttgcttggtggtactctgtctgtgcctgtgtgtgtgtgtgatagtcactcttgcatggcttccatgtctggtttgtggcatttggggataaggtgctgaagccagagcatttgcagtttgtttgaggcctcgttgccaatgatagatcactcctgttgacctggtatgtctgcttgcttgctgcttttccttgctttctcttggaagaggaaaggactctggtcaggcccaggctgagtgagatgagctgcagctggctcatggccttcttagagcagagagaggagtatgtcattttactaagttcctaaacaaacatttatgcaggcaacactccttgcagatccagaaactgaggcacaatagggttatgacttgctcaagaatccctattggggatgggtggggagtggggcagcggcgtttgccaccttaagaattggggccaaagccactgatgtttatttgacagtgacactgcactgggtacttaaagaaattatttcccgttgtaattataattactgcttattaaggaaaatatgggaattttagaaagaatcaagtttgccacccaaatgctaccactgttaatcttttggtgttaaatgttccccctagacatttctgtgcatagatttttggtgtgtttacatagtcgttattctgtatatacaattttatgtcccttttgtacttaacgtataaacattttttccatgttacagtctt

SEQ ID NO: 301196 - DNA, 3034 bp, Homo sapiens
cccaaaatggcggacacaatgagccggcgacgcgccggttgtccgtgaggtggctgtgaggacgaacggtcggcgaggctccacagtccaggcagaagaccctcgaccaagcaggaagaagaggaggaggcggcccaactgttggccgacttcccgctagccgccggcgcggcgcccgccccgcctgggttggcccctcggcagcccgcccgctcgccgccgggccccgccccggccctgcgccgccgctgccttccccagccgccgccatgaagctgaccgacagcgtgttgcggagcttccgcgtcgctaaggtgttccgcgaaaactcggacaagattaactgcttcgatttcagccccaacggcgagacggtcatctcgagtagcgacgacgactccatcgtgctctatgactgccaggagggcaaaccaaagagaaccctgtacagtaagaaatatggtgtggacctcatcagatacactcatgcagcaaacacagttgtttacagctctaacaaaatagacgatactattcgttacttgtccttgcatgacaacaaatacatcagatactttcctggacatagcaaaagggtggtggccttgtccatgtcacctgtggatgacactttcatttctgggtctcttgataagaccattcgactctgggatctccggtctcctaactgccagggcctcatgcatctgcaggggaagccagtttgttcttttgatccagaagggttaattttcgctgcaggtgtcaactctgaaatggtcaagctttatgaccttcgttcttttgataaggggccatttgctacctttaagatgcagtatgatcgaacttgtgagtggacaggacttaaattcagcaatgatggcaagctcatcctcatttccaccaacggcagcttcattcgtctgattgatgcattcaaaggagtggtgatgcacacatttgggggttatgccaacagcaaagctgtcacactggaggcttcatttactccagactctcagtttattatgattggttcagaggatggcaagatccatgtctggaatggagagagcggtataaaagtagctgtgttggatggtaaacacacaggcccgattacctgtttgcaattcaaccccaagttcatgacttttgccagtgcgtgttccaacatggccttttggttgcccaccattgatgactgaccctgttgctgcttggctatttctgtatagtgagggcggccagcaggaagaaactcagagggaactgagataatagtgggattggatcatttgactgggctggagaacatccttttacatggccttcccatggatgtgctgtacatctgctcaaaagaaaataattactttgatgagcgtcttcaaaaggactcttggtgcaacagactcaattggaactcagcttttctaactgtcactgcaccaagctctgctggaggagtgaccagactcacgatttggtatagtggggctctcaagcatcttcaatttgaatgtacatgctgctgaggagccggtgaagtcatcagttccgcacatcccttctaccctccaactgcatgggaagccaaagtcctggttttgaaatgcttgggcagctcagccgcttgccctcaccctgcatgtcttgttactgggtctccctgtgtacttgtggcattatccacaaccatcatgtttcttaggtgccaaacatttacagaaacattttcatatatcttggggtcagagaaagggacagatacagaaggaccttgcttgcaggaagccatgcagttagtttctgcagttagtcgtgtgaggctaggtggttgggcaggcctcgggctgtaggtgttgggtgggaaaaagacccaagggcctgaaagggagggaaaggggagggtagcgggagggtagcaggtgagttcctagggctggaaggtttagcagcagcctggtgcagtgccctgtcatcaagacaaacccacggtcctcctgggtgcctaccaagcttggtttgtacaaaagcaaggtgggagtctatttttgtacatgagatacatcacacttacctgtgggccagtattgtgaagtgagtctgagttgtttacactgatgccttccctgcccaccacaaattgtgtacatagtcttcagatgataccacccctttccccagctcccaaccaagagctggttctaggcctgtgttatatgtcatatttagcgtttttatatatgacctttgatttctgttgtttgtattttagcacagtgtatgcaccttcatttaaatacatctgtgtgcatacagatacgcatatatgtgtgtgcgtatgcatatatctctcatctgtagtttccaagagttcagctgaagcagatggagtcctgcagcccaggagacaccctgcatccctgctaatagtgtttgccacaagtattagtgagtcttccttattaatattttcatttcagaagactgaacaaaactccgtctcaaaaaaaaaaaaaaaaaaattgccacctcacagtctctatcgttgggccctgtggttgcaaagctgcctcctgaattaagaaggaaagggaaaagatatagctggaagcgagtggaagagatgctgagggctggggctgcacagacgtgctcagcagggctacaggtgctcaagccctattggggatgggtggggagtggggcagcggcgtttgccaccttaagaattggggccaaagccactgatgtttatttgacagtgacactgcactgggtacttaaagaaattatttcccgttgtaattataattactgcttattaaggaaaatatgggaattttagaaagaatcaagtttgccacccaaatgctaccactgttaatcttttggtgttaaatgttccccctagacatttctgtgcatagatttttggtgtgtttacatagtcgttattctgtatatacaattttatgtcccttttgtacttaacgtataaacattttttccatgttacagtctt

SEQ ID NO: 301197 - DNA, 928 bp, Homo sapiens
aaaactccgtctcaaaaaaaaaaaaaaaaaaaatgccacctcacggtctctatcgttgggccctgtatttgagttcctgtgtgtccaaaactgaggcaccatgttctttgaaaacatgccacctcaaggctgggcgcggtggctcacacctgtaatcccagcactttgggaggccgaggcgggcggatcaccggaggtcgggagtttgagaccagcctgaccaacatggagaaaccccatctctactaaaaatacaaaattagccgggcgtggtggcatgcgcctataatctcagctacttgggaggctgaggcaggagaattgcttgaacccaggaggcggaggttgcggtgagttgagatcgtgccattgcactccggcctgggcaacaacagcaaaactccgtctcaaaaaaaaaaaaaaaaaaattgccacctcacagtctctatcgttgggccctgtggttgcaaagctgcctcctgaattaagaaggaaagggaaaagatatagctggaagcgagtggaagagatgctgagggctggggctgcacagacgtgctcagcagggctacaggtgctcaagccctattggggatgggtggggagtggggcagcggcgtttgccaccttaagaattggggccaaagccactgatgtttatttgacagtgacactgcactgggtacttaaagaaattatttcccgttgtaattataattactgcttattaaggaaaatatgggaattttagaaagaatcaagtttgccacccaaatgctaccactgttaatcttttggtgttaaatgttccccctagacatttctgtgcatagatttttggtgtgtttacatagtcgttattctgtatatacaattttatgtcccttttgtacttaacgtataaacattttttccatgttacagtctt

SEQ ID NO: 301198 - DNA, 2365 bp, Homo sapiens
cccaaaatggcggacacaatgagccggcgacgcgccggttgtccgtgaggtggctgtgaggacgaacggtcggcgaggctccacagtccaggcagaagaccctcgaccaagcaggaagaagaggaggaggcggcccaactgttggccgacttcccgctagccgccggcgcggcgcccgccccgcctgggttggcccctcggcagcccgcccgctcgccgccgggccccgccccggccctgcgccgccgctgccttccccagccgccgccatgaagctgaccgacagcgtgttgcggagcttccgcgtcgctaaggtgttccgcgaaaactcggacaagattaactgcttcgatttcagccccaacggcgagacggtcatctcgagtagcgacgacgactccatcgtgctctatgactgccaggagggcaaaccaaagagaaccctgtacagtaagaaatatggtgtggacctcatcagatacactcatgcagcaaacacagttgtttacagctctaacaaaatagacgatactattcgttacttgtccttgcatgacaacaaatacatcagatactttcctggacatagcaaaagggtggtggccttgtccatgtcacctgtggatgacactttcatttctgggtctcttgataagaccattcgactctgggatctccggtctcctaactgccagggcctcatgcatctgcaggggaagccagtttgttcttttgatccagaagggttaattttcgctgcaggtgtcaactctgaaatggtcaagctttatgaccttcgttcttttgataaggggccatttgctacctttaagatgcagtatgatcgaacttgtgagtggacaggacttaaattcagcaatgatggcaagctcatcctcatttccaccaacggcagcttcattcgtctgattgatgcattcaaaggagtggtgatgcacacatttgggggttatgccaacagcaaagctgtcacactggaggcttcatttactccagactctcagtttattatgattggttcagaggatggcaagatccatgtctggaatggagagagcggtataaaagtagctgtgttggatggtaaacacacaggcccgattacctgtttgcaattcaaccccaagttcatgacttttgccagtgcgtgttccaacatggccttttggttgcccaccattgatgactgaccctgttgctgcttggctatttctgtatagtgagggcggccagcaggaagaaactcagagggaactgagataatagtgggattggatcatttgactgggctggagaacatccttttacatggccttcccatggatgtgctgtacatctgctcaaaagaaaataattactttgatgagcgtcttcaaaaggactcttggtgcaacagactcaattggaactcagcttttctaactgtcactgcaccaagctctgctggaggagtgaccagactcacgatttggtatagtggggctctcaagcatcttcaatttgaatgtacatgctgctgaggagccggtgaagtcatcagttccgcacatcccttctaccctccaactgcatgggaagccaaagtcctggttttgaaatgcttgggcagctcagccgcttgccctcaccctgcatgtcttgttactgggtctccctgtgtacttgtggcattatccacaaccatcatgtttcttaggtgccaaacatttacagaaacattttcatatatcttggggtcagagaaagggacagatacagaaggaccttgcttgcaggaagccatgcagttagtttctgcagttagtcgtgtgaggctaggtggttgggcaggcctcgggctgtaggtgttgggtgggaaaaagacccaagggcctgaaagggagggaaaggggagggtagcgggagggtagcaggtgagttcctagggctggaaggtttagcagcagcctggtgcagtgccctgtcatcaagacaaacccacggtcctcctgggtgcctaccaagcttggtttgtacaaaagcaaggtgggagtctatttttgtacatgagatacatcacacttacctgtgggccagtattgtagtgacactgcactgggtacttaaagaaattatttcccgttgtaattataattactgcttattaaggaaaatatgggaattttagaaagaatcaagtttgccacccaaatgctaccactgttaatcttttggtgttaaatgttccccctagacatttctgtgcatagatttttggtgtgtttacatagtcgttattctgtatatacaattttatgtcccttttgtacttaacgtataaacattttttccatgttacagtctt

SEQ ID NO: 301199 - DNA, 2136 bp, Homo sapiens
cccaaaatggcggacacaatgagccggcgacgcgccggttgtccgtgaggtggctgtgaggacgaacggtcggcgaggctccacagtccaggcagaagaccctcgaccaagcaggaagaagaggaggaggcggcccaactgttggccgacttcccgctagccgccggcgcggcgcccgccccgcctgggttggcccctcggcagcccgcccgctcgccgccgggccccgccccggccctgcgccgccgctgccttccccagccgccgccatgaagctgaccgacagcgtgttgcggagcttccgcgtcgctaaggtgttccgcgaaaactcggacaagattaactgcttcgatttcagccccaacggcgagacggtcatctcgagtagcgacgacgactccatcgtgctctatgactgccaggagggcaaaccaaagagaaccctgtacagtaagaaatatggtgtggacctcatcagatacactcatgcagcaaacacagttgtttacagctctaacaaaatagacgatactattcgttacttgtccttgcatgacaacaaatacatcagatactttcctggacatagcaaaagggtggtggccttgtccatgtcacctgtggatgacactttcatttctgggtctcttgataagaccattcgactctgggatctccggtctcctaactgccagggcctcatgcatctgcaggggaagccagtttgttcttttgatccagaagggttaattttcgctgcaggtgtcaactctgaaatggtcaagctttatgaccttcgttcttttgataaggggccatttgctacctttaagatgcagtatgatcgaacttgtgagtggacaggacttaaattcagcaatgatggcaagctcatcctcatttccaccaacggcagcttcattcgtctgattgatgcattcaaaggagtggtgatgcacacatttgggggttatgccaacagcaaagctgtcacactggaggcttcatttactccagactctcagtttattatgattggttcagaggatggcaagatccatgtctggaatggagagagcggtataaaagtagctgtgttggatggtaaacacacaggcccgattacctgtttgcaattcaaccccaagttcatgacttttgccagtgcgtgttccaacatggccttttggttgcccaccattgatgactgaccctgttgctgcttggctatttctgtatagtgagggcggccagcaggaagaaactcagagggaactgagataatagtgggattggatcatttgactgggctggagaacatccttttacatggccttcccatggatgtgctgtacatctgctcaaaagaaaataattactttgatgagcgtcttcaaaaggactcttggtgcaacagactcaattggaactcagcttttctaactgtcactgcaccaagctctgctggaggagtgaccagactcacgatttggtatagtggggctctcaagcatcttcaatttgaatgtacatgctgctgaggagccggtgaagtcatcagttccgcacatcccttctaccctccaactgcatgggaagccaaagtcctggttttgaaatgcttgggcagctcagccgcttgccctcaccctgcatgtcttgttactgggtctccctgtgtacttgtggcattatccacaaccatcatgtttcttaggtgccaaacatttacagaaacattttcatatatcttggggtcagagaaagggacagatacagaaggaccttgcttgcaggaagccatgcagttagtttctgcagttagtcgtgtgaggctaggtggttgggcaggcctcgggctgtaggtgttgggtgggaaaaagacccaagggcctgaaagggagggaaaggggagggtagcgggagggtagcaggtgagttcctagggctggaaggtttagcagcagcctggtgcagtgccctgtcatcaagacaaacccacggtcctcctgggtgcctaccaagcttggtttgtacaaaagcaaggtgggagtctatttttgtacatgagatacatcacacttacctgtgggccagtattgtatgtattaagctgcttgggggtcctctagatat

SEQ ID NO: 301200 - DNA, 2139 bp, Homo sapiens
cccaaaatggcggacacaatgagccggcgacgcgccggttgtccgtgaggtggctgtgaggacgaacggtcggcgaggctccacagtccaggcagaagaccctcgaccaagcaggaagaagaggaggaggcggcccaactgttggccgacttcccgctagccgccggcgcggcgcccgccccgcctgggttggcccctcggcagcccgcccgctcgccgccgggccccgccccggccctgcgccgccgctgccttccccagccgccgccatgaagctgaccgacagcgtgttgcggagcttccgcgtcgctaaggtgttccgcgaaaactcggacaagattaactgcttcgatttcagccccaacggcgagacggtcatctcgagtagcgacgacgactccatcgtgctctatgactgccaggagggcaaaccaaagagaaccctgtacagtaagaaatatggtgtggacctcatcagatacactcatgcagcaaacacagttgtttacagctctaacaaaatagacgatactattcgttacttgtccttgcatgacaacaaatacatcagatactttcctggacatagcaaaagggtggtggccttgtccatgtcacctgtggatgacactttcatttctgggtctcttgataagaccattcgactctgggatctccggtctcctaactgccagggcctcatgcatctgcaggggaagccagtttgttcttttgatccagaagggttaattttcgctgcaggtgtcaactctgaaatggtcaagctttatgaccttcgttcttttgataaggggccatttgctacctttaagatgcagtatgatcgaacttgtgagtggacaggacttaaattcagcaatgatggcaagctcatcctcatttccaccaacggcagcttcattcgtctgattgatgcattcaaaggagtggtgatgcacacatttgggggttatgccaacagcaaagctgtcacactggaggcttcatttactccagactctcagtttattatgattggttcagaggatggcaagatccatgtctggaatggagagagcggtataaaagtagctgtgttggatggtaaacacacaggcccgattacctgtttgcaattcaaccccaagttcatgacttttgccagtgcgtgttccaacatggccttttggttgcccaccattgatgactgaccctgttgctgcttggctatttctgtatagtgagggcggccagcaggaagaaactcagagggaactgagataatagtgggattggatcatttgactgggctggagaacatccttttacatggccttcccatggatgtgctgtacatctgctcaaaagaaaataattactttgatgagcgtcttcaaaaggactcttggtgcaacagactcaattggaactcagcttttctaactgtcactgcaccaagctctgctggaggagtgaccagactcacgatttggtatagtggggctctcaagcatcttcaatttgaatgtacatgctgctgaggagccggtgaagtcatcagttccgcacatcccttctaccctccaactgcatgggaagccaaagtcctggttttgaaatgcttgggcagctcagccgcttgccctcaccctgcatgtcttgttactgggtctccctgtgtacttgtggcattatccacaaccatcatgtttcttaggtgccaaacatttacagaaacattttcatatatcttggggtcagagaaagggacagatacagaaggaccttgcttgcaggaagccatgcagttagtttctgcagttagtcgtgtgaggctaggtggttgggcaggcctcgggctgtaggtgttgggtgggaaaaagacccaagggcctgaaagggagggaaaggggagggtagcgggagggtagcaggtgagttcctagggctggaaggtttagcagcagcctggtgcagtgccctgtcatcaagacaaacccacggtcctcctgggtgcctaccaagcttggtttgtacaaaagcaaggtgggagtctatttttgtacatgagatacatcacacttacctgtgggccagtattgtactgtgagtcaattaaacgtgtttactttataaatt

SEQ ID NO: 301201 - DNA, 1369 bp, Homo sapiens
cccaaaatggcggacacaatgagccggcgacgcgccggttgtccgtgaggtggctgtgaggacgaacggtcggcgaggctccacagtccaggcagaagaccctcgaccaagcaggaagaagaggaggaggcggcccaactgttggccgacttcccgctagccgccggcgcggcgcccgccccgcctgggttggcccctcggcagcccgcccgctcgccgccgggccccgccccggccctgcgccgccgctgccttccccagccgccgccatgaagctgaccgacagcgtgttgcggagcttccgcgtcgctaaggtgttccgcgaaaactcggacaagattaactgcttcgatttcagccccaacggcgagacggtcatctcgagtagcgacgacgactccatcgtgctctatgactgccaggagggcaaaccaaagagaaccctgtacagtaagaaatatggtgtggacctcatcagatacactcatgcagcaaacacagttgtttacagctctaacaaaatagacgatactattcgttacttgtccttgcatgacaacaaatacatcagatactttcctggacatagcaaaagggtggtggccttgtccatgtcacctgtggatgacactttcatttctgggtctcttgataagaccattcgactctgggatctccggtctcctaactgccagggcctcatgcatctgcaggggaagccagtttgttcttttgatccagaagggttaattttcgctgcaggtgtcaactctgaaatggtcaagctttatgaccttcgttcttttgataaggggccatttgctacctttaagatgcagtatgatcgaacttgtgagtggacaggacttaaattcagcaatgatggcaagctcatcctcatttccaccaacggcagcttcattcgtctgattgatgcattcaaaggagtggtgatgcacacatttgggagatgctgagggctggggctgcacagacgtgctcagcagggctacaggtgctcaagccctattggggatgggtggggagtggggcagcggcgtttgccaccttaagaattggggccaaagccactgatgtttatttgacagtgacactgcactgggtacttaaagaaattatttcccgttgtaattataattactgcttattaaggaaaatatgggaattttagaaagaatcaagtttgccacccaaatgctaccactgttaatcttttggtgttaaatgttccccctagacatttctgtgcatagatttttggtgtgtttacatagtcgttattctgtatatacaattttatgtcccttttgtacttaacgtataaacattttttccatgttacagtctt

SEQ ID NO: 301202 - DNA, 898 bp, Homo sapiens
cccaaaatggcggacacaatgagccggcgacgcgccggttgtccgtgaggtggctgtgaggacgaacggtcggcgaggctccacagtccaggcagaagaccctcgaccaagcaggaagaagaggaggaggcggcccaactgttggccgacttcccgctagccgccggcgcggcgcccgccccgcctgggttggcccctcggcagcccgcccgctcgccgccgggccccgccccggccctgcgccgccgctgccttccccagccgccgccatgaagctgaccgacagcgtgttgcggagcttccgcgtcgctaaggtgttccgcgaaaactcggacaagattaactgcttcgatttcagccccaacggcgagacggtcatctcgagtagcgacgacgactccatcgtgctctatgactgccaggagggcaaaccaaagagaaccctgtacagtaagaaatatggtgtggacctcatcagatacactcatgcagcaaacacagttgtttacagctctaacaaaatagacgatactattcgttacttgtccttgcatgacaacaaatacatcagatactttcctggacatagcaaaagggtggtggccttgtccatgtcacctgtggatgacactttcatttctgggtctcttgataagaccattcgactctgggatctccggtctcctaactgccaggtaatggtacctcacagttatactttttgagcattttctttggtaggcactgtaatgaactctacctctcaaagaagggagaaaacagtggttccattctgggatcacagggtctttttaaactttggagaaaatctgtttttttagttggtagctgctaagcacataccctaatctagtgcagattgcattgtactctgtgg

SEQ ID NO: 301203 - DNA, 335 bp, Homo sapiens
agtcagggttttaccatgttggccaggctagtctcaaaacccgacctcaaatgatccacccgcctcagcctcccaaagtgctgggattacaagcgtgagccaccacgtgagccaggggaagtttttaaatttaccactttttaacaattccatttaggaaagttcagttgagctgttggacttggacaactttgtacctctcatctttgtccttgtcatctagtcattacctcctaagcagggacatcatgggtgtcatgaagcattcatgtgtgatggcatttctttgcttctcatttcttcatgtgtttgacatttctcctagctccaaactg

SEQ ID NO: 301204 - DNA, 2426 bp, Homo sapiens
  misc_feature (3)..(3): n is a, c, g, or t
  misc_feature (1922)..(1922): n is a, c, g, or t
  misc_feature (1936)..(1936): n is a, c, g, or t
ggngtctcgagcatgtatctctagcatgttggcctatgggctgggacttgagagcggccaggccagcctcggagccagcagggagctgggagctgggggaaacgacgccaggaaagctatcgcgccagagagggcgacgggggctcgggaagcctgacagggcttttgcgcacagctgccggctggctgctacccgcccgcgccagcccccgagaacgcgcgaccaggcacccagtccggtcaccgcagcggagagctcgccgctcgctgcagcgaggcccggagcggccccgcaggaccctccccagaccgcctgggccgcccggatgtgcactaaaatggaacagcccttctaccacgacgactcatacacagctacgggatacggccgggcccctggtggcctctctctacacgactacaaactcctgaaaccgagcctggcggtcaacctggccgacccctaccggagtctcaaagcgcctggggctcgcggacccggcccagagggcggcggtggcggcagctacttttctggtcagggctcggacaccggcgcgtctctcaagctcgcctcttcggagctggaacgcctgattgtccccaacagcaacggcgtgatcacgacgacgcctacacccccgggacagtacttttacccccgcgggggtggcagcggtggaggtgcagggggcgcagggggcggcgtcaccgaggagcaggagggcttcgccgacggctttgtcaaagccctggacgatctgcacaagatgaaccacgtgacaccccccaacgtgtccctgggcgctaccggggggcccccggctgggcccgggggcgtctacgccggcccggagccacctcccgtttacaccaacctcagcagctactccccagcctctgcgtcctcgggaggcgccggggctgccgtcgggaccgggagctcgtacccgacgaccaccatcagctacctcccacacgcgccgcccttcgccggtggccacccggcgcagctgggcttgggccgcggcgcctccaccttcaaggaggaaccgcagaccgtgccggaggcgcgcagccgggacgccacgccgccggtgtcccccatcaacatggaagaccaagagcgcatcaaagtggagcgcaagcggctgcggaaccggctggcggccaccaagtgccggaagcggaagctggagcgcatcgcgcgcctggaggacaaggtgaagacgctcaaggccgagaacgcggggctgtcgagtaccgccggcctcctccgggagcaggtggcccagctcaaacagaaggtcatgacccacgtcagcaacggctgtcagctgctgcttggggtcaagggacacgccttctgaacgtcccctgcccctttacggacaccccctcgcttggacggctgggcacacgcctcccactggggtccagggagcaggcggtgggcacccaccctgggacctaggggcgccgcaaaccacactggactccggccctcctaccctgcgcccagtccttccacctcgacgtttacaagcccccccttccacttttttttgtatgttttttttctgctggaaacagactcgattcatattgaatataatatatttgtgtatttaacagggaggggaagagggggcgatcgcggcggagctggccccgccgcctggtactcaagcccgcggggacattgggaaggggacccccgccccctgccctcccctctctgcaccgtactgtggaaaagaaacacgcacttagtctctaaagagtttattttaagacgtgtttgtgtttgtgtgtgtttgttctttttattgaatctatttaagtaaaaaaaaaattggttctttattaaaaaaaaaaaaaaaaaaaaaaaaaaaaaaaaaaaaaaaaaaaaaacaaaaaanaaaaaaaaaaaaanaaaaaaaaaaagtcgctattcccaacataaaaaaacttgtcaaacattcaacattattctcagctttctgtatttctaaaaaggccggcactcgcacgccttttccaacatttttccaatcgtgcctggcaatctcaaacttgtttgcgcaaatcattgctaacaggtcacctaatttactgttaaatcaggtaattctctacccaaagggtcgacaaaggcaaatcccgcttttaatccttttaaccgagatacgtacttttgacattccaatttgtaaccatagtcccttattttagaacgtgttctccaacatcctttgtgggcacatcctcttttaaggcataggctccttttgctggaatgatccctcttattccaagtatatgggctctcttgtccgttcaatctgtcaattcgttcctttggaacccctctttaatagcttgcgccctataaggccttgctctgccctgtctttcggtctcct

SEQ ID NO: 301205 - DNA, 1927 bp, Homo sapiens
  misc_feature (3)..(3): n is a, c, g, or t
ggngtctcgagcatgtatctctagcatgttggcctatgggctgggacttgagagcggccaggccagcctcggagccagcagggagctgggagctgggggaaacgacgccaggaaagctatcgcgccagagagggcgacgggggctcgggaagcctgacagggcttttgcgcacagctgccggctggctgctacccgcccgcgccagcccccgagaacgcgcgaccaggcacccagtccggtcaccgcagcggagagctcgccgctcgctgcagcgaggcccggagcggccccgcaggaccctccccagaccgcctgggccgcccggatgtgcactaaaatggaacagcccttctaccacgacgactcatacacagctacgggatacggccgggcccctggtggcctctctctacacgactacaaactcctgaaaccgagcctggcggtcaacctggccgacccctaccggagtctcaaagcgcctggggctcgcggacccggcccagagggcggcggtggcggcagctacttttctggtcagggctcggacaccggcgcgtctctcaagctcgcctcttcggagctggaacgcctgattgtccccaacagcaacggcgtgatcacgacgacgcctacacccccgggacagtacttttacccccgcgggggtggcagcggtggaggtgcagggggcgcagggggcggcgtcaccgaggagcaggagggcttcgccgacggctttgtcaaagccctggacgatctgcacaagatgaaccacgtgacaccccccaacgtgtccctgggcgctaccggggggcccccggctgggcccgggggcgtctacgccggcccggagccacctcccgtttacaccaacctcagcagctactccccagcctctgcgtcctcgggaggcgccggggctgccgtcgggaccgggagctcgtacccgacgaccaccatcagctacctcccacacgcgccgcccttcgccggtggccacccggcgcagctgggcttgggccgcggcgcctccaccttcaaggaggaaccgcagaccgtgccggaggcgcgcagccgggacgccacgccgccggtgtcccccatcaacatggaagaccaagagcgcatcaaagtggagcgcaagcggctgcggaaccggctggcggccaccaagtgccggaagcggaagctggagcgcatcgcgcgcctggaggacaaggtgaagacgctcaaggccgagaacgcggggctgtcgagtaccgccggcctcctccgggagcaggtggcccagctcaaacagaaggtcatgacccacgtcagcaacggctgtcagctgctgcttggggtcaagggacacgccttctgaacgtcccctgcccctttacggacaccccctcgcttggacggctgggcacacgcctcccactggggtccagggagcaggcggtgggcacccaccctgggacctaggggcgccgcaaaccacactggactccggccctcctaccctgcgcccagtccttccacctcgacgtttacaagcccccccttccacttttttttgtatgttttttttctgctggaaacagactcgattcatattgaatataatatatttgtgtatttaacagggaggggaagagggggcgatcgcggcggagctggccccgccgcctggtactcaagcccgcggggacattgggaaggggacccccgccccctgccctcccctctctgcaccgtactgtggaaaagaaacacgcacttagtctctaaagagtttattttaagacgtgtttgtgtttgtgtgtgtttgttctttttattgaatctatttaagtaaaaaaaaaattggttctttattaaaaaaaaaacgtacttgtacagccctttatattccttatccccgtgtgtacaagaaca

SEQ ID NO: 301206 - DNA, 2409 bp, Homo sapiens
  misc_feature (3)..(3): n is a, c, g, or t
  misc_feature (1899)..(1899): n is a, c, g, or t
ggngtctcgagcatgtatctctagcatgttggcctatgggctgggacttgagagcggccaggccagcctcggagccagcagggagctgggagctgggggaaacgacgccaggaaagctatcgcgccagagagggcgacgggggctcgggaagcctgacagggcttttgcgcacagctgccggctggctgctacccgcccgcgccagcccccgagaacgcgcgaccaggcacccagtccggtcaccgcagcggagagctcgccgctcgctgcagcgaggcccggagcggccccgcaggaccctccccagaccgcctgggccgcccggatgtgcactaaaatggaacagcccttctaccacgacgactcatacacagctacgggatacggccgggcccctggtggcctctctctacacgactacaaactcctgaaaccgagcctggcggtcaacctggccgacccctaccggagtctcaaagcgcctggggctcgcggacccggcccagagggcggcggtggcggcagctacttttctggtcagggctcggacaccggcgcgtctctcaagctcgcctcttcggagctggaacgcctgattgtccccaacagcaacggcgtgatcacgacgacgcctacacccccgggacagtacttttacccccgcgggggtggcagcggtggaggtgcagggggcgcagggggcggcgtcaccgaggagcaggagggcttcgccgacggctttgtcaaagccctggacgatctgcacaagatgaaccacgtgacaccccccaacgtgtccctgggcgctaccggggggcccccggctgggcccgggggcgtctacgccggcccggagccacctcccgtttacaccaacctcagcagctactccccagcctctgcgtcctcgggaggcgccggggctgccgtcgggaccgggagctcgtacccgacgaccaccatcagctacctcccacacgcgccgcccttcgccggtggccacccggcgcagctgggcttgggccgcggcgcctccaccttcaaggaggaaccgcagaccgtgccggaggcgcgcagccgggacgccacgccgccggtgtcccccatcaacatggaagaccaagagcgcatcaaagtggagcgcaagcggctgcggaaccggctggcggccaccaagtgccggaagcggaagctggagcgcatcgcgcgcctggaggacaaggtgaagacgctcaaggccgagaacgcggggctgtcgagtaccgccggcctcctccgggagcaggtggcccagctcaaacagaaggtcatgacccacgtcagcaacggctgtcagctgctgcttggggtcaagggacacgccttctgaacgtcccctgcccctttacggacaccccctcgcttggacggctgggcacacgcctcccactggggtccagggagcaggcggtgggcacccaccctgggacctaggggcgccgcaaaccacactggactccggccctcctaccctgcgcccagtccttccacctcgacgtttacaagcccccccttccacttttttttgtatgttttttttctgctggaaacagactcgattcatattgaatataatatatttgtgtatttaacagggaggggaagagggggcgatcgcggcggagctggccccgccgcctggtactcaagcccgcggggacattgggaaggggacccccgccccctgccctcccctctctgcaccgtactgtggaaaagaaacacgcacttagtctctaaagagtttattttaagacgtgtttgtgtttgtgtgtgtttgttctttttattgaatctatttaagtaaaaaaaaaattggttctttattaaaaaaaaaaaaaaaaaaaaaaaaaaaaaanaaaaaaaaaaaaaaaaaaataaaaaaaaaaaaaaaaacaaaaaataaaaaaaaaaacaaaaaaataaacataaaaaaaaaaactaaaaaaaaaaatgaaaaaaaaaatctcttcggggcgggggaatttaaaccgttatatttgattacgccccaaaaaggggggcccccttaacccccttttttttttattaccccccgttaattaaagggggggggttcctgaaaaacccaaaaaaaagggggggtccaccccttaaaaaaaagttcaaaaaaaaaaaaaaaaccccccgcgggagaactacctttcctaacaaaccttcaccaggggccctcttaacgaacctctggaaaatttaggggcgaatgtcacctgatttcttcacaacccttgttgtgtagtgaccccccttaaaattggaaacacaccattttacccttttttggagcaaaaatattacacaagggactttttttcaaaaaataataaaaaaaagttgcccccgcggcc

SEQ ID NO: 301207 - DNA, 2186 bp, Homo sapiens
  misc_feature (3)..(3): n is a, c, g, or t
ggngtctcgagcatgtatctctagcatgttggcctatgggctgggacttgagagcggccaggccagcctcggagccagcagggagctgggagctgggggaaacgacgccaggaaagctatcgcgccagagagggcgacgggggctcgggaagcctgacagggcttttgcgcacagctgccggctggctgctacccgcccgcgccagcccccgagaacgcgcgaccaggcacccagtccggtcaccgcagcggagagctcgccgctcgctgcagcgaggcccggagcggccccgcaggaccctccccagaccgcctgggccgcccggatgtgcactaaaatggaacagcccttctaccacgacgactcatacacagctacgggatacggccgggcccctggtggcctctctctacacgactacaaactcctgaaaccgagcctggcggtcaacctggccgacccctaccggagtctcaaagcgcctggggctcgcggacccggcccagagggcggcggtggcggcagctacttttctggtcagggctcggacaccggcgcgtctctcaagctcgcctcttcggagctggaacgcctgattgtccccaacagcaacggcgtgatcacgacgacgcctacacccccgggacagtacttttacccccgcgggggtggcagcggtggaggtgcagggggcgcagggggcggcgtcaccgaggagcaggagggcttcgccgacggctttgtcaaagccctggacgatctgcacaagatgaaccacgtgacaccccccaacgtgtccctgggcgctaccggggggcccccggctgggcccgggggcgtctacgccggcccggagccacctcccgtttacaccaacctcagcagctactccccagcctctgcgtcctcgggaggcgccggggctgccgtcgggaccgggagctcgtacccgacgaccaccatcagctacctcccacacgcgccgcccttcgccggtggccacccggcgcagctgggcttgggccgcggcgcctccaccttcaaggaggaaccgcagaccgtgccggaggcgcgcagccgggacgccacgccgccggtgtcccccatcaacatggaagaccaagagcgcatcaaagtggagcgcaagcggctgcggaaccggctggcggccaccaagtgccggaagcggaagctggagcgcatcgcgcgcctggaggacaaggtgaagacgctcaaggccgagaacgcggggctgtcgagtaccgccggcctcctccgggagcaggtggcccagctcaaacagaaggtcatgacccacgtcagcaacggctgtcagctgctgcttggggtcaagggacacgccttctgaacgtcccctgcccctttacggacaccccctcgcttggacggctgggcacacgcctcccactggggtccagggagcaggcggtgggcacccaccctgggacctaggggcgccgcaaaccacactggactccggccctcctaccctgcgcccagtccttccacctcgacgtttacaagcccccccttccacttttttttgtatgttttttttctgctggaaacagactcgattcatattgaatataatatatttgtgtatttaacagggaggggaagagggggcgatcgcggcggagctggccccgccgcctggtactcaagcccgcggggacattgggaaggggacccccgccccctgccctcccctctctgcaccgtactgtggaaaagaaacacgcacttagtctctaaagagtttattttaagacgtgtttgtgtttgtgtgtgtttgttctttttattgaatctatttaagtaaaaaaaaaattggttctttattaaaaaaaaaaaaaaaaaactcgagctaacgcttcacgcactaatttcagtagtcacacaaaccaatcaggtggtagtgaactcaggcaaagggaggggcaacggtttggagcagcacatgtttgggaaaatggggctagaagtaatgttacagtgaggaatacaaaccaaagattagagccaataagattacgatctacttccaatagtcgaagccgttcaccaattcagagacagagtggcactgtttatcataattcccaaagggaaagtagaccagtacagcaaaccactagaagatctgttaggaggagaggta

SEQ ID NO: 301208 - DNA, 2182 bp, Homo sapiens
  misc_feature (3)..(3): n is a, c, g, or t
  misc_feature (1877)..(1877): n is a, c, g, or t
  misc_feature (1891)..(1891): n is a, c, g, or t
  misc_feature (1931)..(1931): n is a, c, g, or t
ggngtctcgagcatgtatctctagcatgttggcctatgggctgggacttgagagcggccaggccagcctcggagccagcagggagctgggagctgggggaaacgacgccaggaaagctatcgcgccagagagggcgacgggggctcgggaagcctgacagggcttttgcgcacagctgccggctggctgctacccgcccgcgccagcccccgagaacgcgcgaccaggcacccagtccggtcaccgcagcggagagctcgccgctcgctgcagcgaggcccggagcggccccgcaggaccctccccagaccgcctgggccgcccggatgtgcactaaaatggaacagcccttctaccacgacgactcatacacagctacgggatacggccgggcccctggtggcctctctctacacgactacaaactcctgaaaccgagcctggcggtcaacctggccgacccctaccggagtctcaaagcgcctggggctcgcggacccggcccagagggcggcggtggcggcagctacttttctggtcagggctcggacaccggcgcgtctctcaagctcgcctcttcggagctggaacgcctgattgtccccaacagcaacggcgtgatcacgacgacgcctacacccccgggacagtacttttacccccgcgggggtggcagcggtggaggtgcagggggcgcagggggcggcgtcaccgaggagcaggagggcttcgccgacggctttgtcaaagccctggacgatctgcacaagatgaaccacgtgacaccccccaacgtgtccctgggcgctaccggggggcccccggctgggcccgggggcgtctacgccggcccggagccacctcccgtttacaccaacctcagcagctactccccagcctctgcgtcctcgggaggcgccggggctgccgtcgggaccgggagctcgtacccgacgaccaccatcagctacctcccacacgcgccgcccttcgccggtggccacccggcgcagctgggcttgggccgcggcgcctccaccttcaaggaggaaccgcagaccgtgccggaggcgcgcagccgggacgccacgccgccggtgtcccccatcaacatggaagaccaagagcgcatcaaagtggagcgcaagcggctgcggaaccggctggcggccaccaagtgccggaagcggaagctggagcgcatcgcgcgcctggaggacaaggtgaagacgctcaaggccgagaacgcggggctgtcgagtaccgccggcctcctccgggagcaggtggcccagctcaaacagaaggtcatgacccacgtcagcaacggctgtcagctgctgcttggggtcaagggacacgccttctgaacgtcccctgcccctttacggacaccccctcgcttggacggctgggcacacgcctcccactggggtccagggagcaggcggtgggcacccaccctgggacctaggggcgccgcaaaccacactggactccggccctcctaccctgcgcccagtccttccacctcgacgtttacaagcccccccttccacttttttttgtatgttttttttctgctggaaacagactcgattcatattgaatataatatatttgtgtatttaacagggaggggaagagggggcgatcgcggcggagctggccccgccgcctggtactcaagcccgcggggacattgggaaggggacccccgccccctgccctcccctctctgcaccgtactgtggaaaagaaacacgcacttagtctctaaagagtttattttaagacgtgtttgtgtttgtgtgtgtttgttctttttattgaatctatttaagtaaaaaaaaaattggttctttattaaaaaaaanaaaaaaaaaaaaanaaaaaaaaaaaaaaaaaaaaaaaaaaaaaaaaaaaaaaanaaaaaaaaaaaaaaaacctcggggccaccgttttcaaaaacctgaatttcaaattcgccccaaaagggggaaacccttaattcccttttttttccttttaacctgggttaatcccaggggggtttttcgccaaaatccccccaaaattggggttcctaatggtttaaaaatttgggaaaaaaaaatttcaaaaccttgggggtaaatgcctttggcaaagatttttaacaggggccctttgaaaaaccttg

SEQ ID NO: 301209 - DNA, 2372 bp, Homo sapiens
  misc_feature (3)..(3): n is a, c, g, or t
  misc_feature (1868)..(1868): n is a, c, g, or t
  misc_feature (1882)..(1882): n is a, c, g, or t
ggngtctcgagcatgtatctctagcatgttggcctatgggctgggacttgagagcggccaggccagcctcggagccagcagggagctgggagctgggggaaacgacgccaggaaagctatcgcgccagagagggcgacgggggctcgggaagcctgacagggcttttgcgcacagctgccggctggctgctacccgcccgcgccagcccccgagaacgcgcgaccaggcacccagtccggtcaccgcagcggagagctcgccgctcgctgcagcgaggcccggagcggccccgcaggaccctccccagaccgcctgggccgcccggatgtgcactcgggcccctggtggcctctctctacacgactacaaactcctgaaaccgagcctggcggtcaacctggccgacccctaccggagtctcaaagcgcctggggctcgcggacccggcccagagggcggcggtggcggcagctacttttctggtcagggctcggacaccggcgcgtctctcaagctcgcctcttcggagctggaacgcctgattgtccccaacagcaacggcgtgatcacgacgacgcctacacccccgggacagtacttttacccccgcgggggtggcagcggtggaggtgcagggggcgcagggggcggcgtcaccgaggagcaggagggcttcgccgacggctttgtcaaagccctggacgatctgcacaagatgaaccacgtgacaccccccaacgtgtccctgggcgctaccggggggcccccggctgggcccgggggcgtctacgccggcccggagccacctcccgtttacaccaacctcagcagctactccccagcctctgcgtcctcgggaggcgccggggctgccgtcgggaccgggagctcgtacccgacgaccaccatcagctacctcccacacgcgccgcccttcgccggtggccacccggcgcagctgggcttgggccgcggcgcctccaccttcaaggaggaaccgcagaccgtgccggaggcgcgcagccgggacgccacgccgccggtgtcccccatcaacatggaagaccaagagcgcatcaaagtggagcgcaagcggctgcggaaccggctggcggccaccaagtgccggaagcggaagctggagcgcatcgcgcgcctggaggacaaggtgaagacgctcaaggccgagaacgcggggctgtcgagtaccgccggcctcctccgggagcaggtggcccagctcaaacagaaggtcatgacccacgtcagcaacggctgtcagctgctgcttggggtcaagggacacgccttctgaacgtcccctgcccctttacggacaccccctcgcttggacggctgggcacacgcctcccactggggtccagggagcaggcggtgggcacccaccctgggacctaggggcgccgcaaaccacactggactccggccctcctaccctgcgcccagtccttccacctcgacgtttacaagcccccccttccacttttttttgtatgttttttttctgctggaaacagactcgattcatattgaatataatatatttgtgtatttaacagggaggggaagagggggcgatcgcggcggagctggccccgccgcctggtactcaagcccgcggggacattgggaaggggacccccgccccctgccctcccctctctgcaccgtactgtggaaaagaaacacgcacttagtctctaaagagtttattttaagacgtgtttgtgtttgtgtgtgtttgttctttttattgaatctatttaagtaaaaaaaaaattggttctttattaaaaaaaaaaaaaaaaaaaaaaaaaaaaaaaaaaaaaaaaaaaaaacaaaaaanaaaaaaaaaaaaanaaaaaaaaaaagtcgctattcccaacataaaaaaacttgtcaaacattcaacattattctcagctttctgtatttctaaaaaggccggcactcgcacgccttttccaacatttttccaatcgtgcctggcaatctcaaacttgtttgcgcaaatcattgctaacaggtcacctaatttactgttaaatcaggtaattctctacccaaagggtcgacaaaggcaaatcccgcttttaatccttttaaccgagatacgtacttttgacattccaatttgtaaccatagtcccttattttagaacgtgttctccaacatcctttgtgggcacatcctcttttaaggcataggctccttttgctggaatgatccctcttattccaagtatatgggctctcttgtccgttcaatctgtcaattcgttcctttggaacccctctttaatagcttgcgccctataaggccttgctctgccctgtctttcggtctcct

SEQ ID NO: 301210 - DNA, 2293 bp, Homo sapiens
  misc_feature (3)..(3): n is a, c, g, or t
  misc_feature (1783)..(1783): n is a, c, g, or t
ggngtctcgagcatgtatctctagcatgttggcctatgggctgggacttgagagcggccaggccagcctcggagccagcagggagctgggagctgggggaaacgacgccaggaaagctatcgcgccagagagggcgacgggggctcgggaagcctgacagggcttttgcgcacagctgccggctggctgctacccgcccgcgccagcccccgagaacgcgcgaccaggcacccagtccggtcaccgcagcggagagctcgccgctcgctgcagcgaggcccggagcggccccgcaggaccctccccagaccgcctgggccgcccggatgtgcactaaaatggaacagcccttctaccacgacgactcatacacagctacgggatacggccgggcccctggtggcctctctctacacgactacaaactcctgaaaccgagcctggcggtcaacctggccgacccctaccggagtctcaaagcgcctggggctcgcggacccggcccagagggcggcggtggcggcagctacttttctggtcagggctcggacaccggcgcgtctctcaagctcgcctcttcggagctggaacgcctgattgtccccaacagcaacggcgtgatcacgacgacgcctacacccccgggacagtacttttacccccgcgggggtggcagcggtggaggtgcagggggcgcagggggcggcgtcaccgaggagcaggagggcttcgccgacggctttgtcaaagccctggacgatctgcacaagatgaaccacgtgacaccccccaacgtgtccctgggcgctaccggggggcccccggctgggcccgggggcgtctacgccggcccggagccacctcccgtttacaccaacctcagcagctactccccagcctctgcgtcctcgggaggcgccggggctgccgtcgggaccgggagctcgtacccgacgaccaccatcagctacctcccacacgcgccgcccttcgccggtggccacccggcgcagctgggcttgggccgcggcgcctccaccttcaaggaggaaccgcagaccgtgccggaggcgcgcagccgggacgccacgccgccggtgtcccccatcaacatggaagaccaagagcgcatcaaagtggagcgcaagcggctgcggaaccggctggcggccaccaagtgccggaagcggaagctggagcgcatcgcgcgcctggaggacaaggtgaagacgctcaaggccgagaacgcggggctgtcgagtaccgccggcctcctccgggagcaggtggcccagctcaaacagaaggtcatgacccacgtcagcaacggctgtcagctgctgcttggggtcaagggacacgccttctgaacgtcccctgcccctgccctcctaccctgcgcccagtccttccacctcgacgtttacaagcccccccttccacttttttttgtatgttttttttctgctggaaacagactcgattcatattgaatataatatatttgtgtatttaacagggaggggaagagggggcgatcgcggcggagctggccccgccgcctggtactcaagcccgcggggacattgggaaggggacccccgccccctgccctcccctctctgcaccgtactgtggaaaagaaacacgcacttagtctctaaagagtttattttaagacgtgtttgtgtttgtgtgtgtttgttctttttattgaatctatttaagtaaaaaaaaaattggttctttattaaaaaaaaaaaaaaaaaaaaaaaaaaaaaanaaaaaaaaaaaaaaaaaaataaaaaaaaaaaaaaaaacaaaaaataaaaaaaaaaacaaaaaaataaacataaaaaaaaaaactaaaaaaaaaaatgaaaaaaaaaatctcttcggggcgggggaatttaaaccgttatatttgattacgccccaaaaaggggggcccccttaacccccttttttttttattaccccccgttaattaaagggggggggttcctgaaaaacccaaaaaaaagggggggtccaccccttaaaaaaaagttcaaaaaaaaaaaaaaaaccccccgcgggagaactacctttcctaacaaaccttcaccaggggccctcttaacgaacctctggaaaatttaggggcgaatgtcacctgatttcttcacaacccttgttgtgtagtgaccccccttaaaattggaaacacaccattttacccttttttggagcaaaaatattacacaagggactttttttcaaaaaataataaaaaaaagttgcccccgcggcc

SEQ ID NO: 301211 - DNA, 1913 bp, Homo sapiens
  misc_feature (3)..(3): n is a, c, g, or t
ggngtctcgagcatgtatctctagcatgttggcctatgggctgggacttgagagcggccaggccagcctcggagccagcagggagctgggagctgggggaaacgacgccaggaaagctatcgcgccagagagggcgacgggggctcgggaagcctgacagggcttttgcgcacagctgccggctggctgctacccgcccgcgccagcccccgagaacgcgcgaccaggcacccagtccggtcaccgcagcggagagctcgccgctcgctgcagcgaggcccggagcggccccgcaggaccctccccagaccgcctgggccgcccggatgtgcactaaaatggaacagcccttctaccacgacgactcatacacagctacgggatacggccgggcccctggtggcctctctctacacgactacaaactcctgaaaccgagcctggcggtcaacctggccgacccctaccggagtctcaaagcgcctggggctcgcggacccggcccagagggcggcggtggcggcagctacttttctggtcagggctcggacaccggcgcgtctctcaagctcgcctcttcggagctggaacgcctgattgtccccaacagcaacggcgtgatcacgacgacgcctacacccccgggacagtacttttacccccgcgggggtggcagcggtggaggtgcagggggcgcagggggcggcgtcaccgaggagcaggagggcttcgccgacggctttgtcaaagccctggacgatctgcacaagatgaaccacgtgacaccccccaacgtgtccctgggcgctaccggggggcccccggctgggcccgggggcgtctacgccggcccggagccacctcccgtttacaccaacctcagcagctactccccagcctctgcgtcctcgggaggcgccggggctgccgtcgggaccgggagctcgtacccgacgaccaccatcagctacctcccacacgcgccgcccttcgccggtggccacccggcgcagctgggcttgggccgcggcgcctccaccttcaaggaggaaccgcagaccgtgccggaggcgcgcagccgggacgccacgccgccggtgtcccccatcaacatggaagaccaagagcgcatcaaagtggagcgcaagcggctgcggaaccggctggcggccaccaagtgccggaagcggaagctggagcgcatcgcgcgcctggaggacaaggtgaagacgctcaaggccgagaacgcggggctgtcgagtaccgccggcctcctccgggagcaggtggcccagctcaaacagaaggtcatgacccacgtcagcaacggctgtcagctgctgcttggggtcaagggacacgccttctgaacgtcccctgcccctttacggacaccccctcgcttggacggctgggcacacgcctcccactggggtccagggagcaggcggtgggcacccaccctgggacctaggggcgccgcaaaccacactggactccggccctcctaccctgcgcccagtccttccacctcgacgtttacaagcccccccttccacttttttttgtatgttttttttctgctggaaacagactcgattcatattgaatataatatatttgtgtatttaacagggaggggaagagggggcaccggttttccttctgtttctgtcgtcttgtgctctttttcctgcgctttcctctcttttctagtcacccccttcttcttatcttatcctttggacatcactttccttctctttcctgtctttatatctctgctactctatgtcgctctgtagactctctctttctctgtactttcctgtcttatacggtctccattgtctatgctcctctactctctgcattctccatctcttgtttctcttgtctctctctcaaacccc

SEQ ID NO: 301212 - DNA, 1880 bp, Homo sapiens
  misc_feature (3)..(3): n is a, c, g, or t
  misc_feature (1655)..(1655): n is a, c, g, or t
  misc_feature (1670)..(1670): n is a, c, g, or t
ggngtctcgagcatgtatctctagcatgttggcctatgggctgggacttgagagcggccaggccagcctcggagccagcagggagctgggagctgggggaaacgacgccaggaaagctatcgcgccagagagggcgacgggggctcgggaagcctgacagggcttttgcgcacagctgccggctggctgctacccgcccgcgccagcccccgagaacgcgcgaccaggcacccagtccggtcaccgcagcggagagctcgccgctcgctgcagcgaggcccggagcggccccgcaggaccctccccagaccgcctgggccgcccggatgtgcactaaaatggaacagcccttctaccacgacgactcatacacagctacgggatacggccgggcccctggtggcctctctctacacgactacaaactcctgaaaccgagcctggcggtcaacctggccgacccctaccggagtctcaaagcgcctggggctcgcggacccggcccagagggcggcggtggcggcagctacttttctggtcagggctcggacaccggcgcgtctctcaagctcgcctcttcggagctggaacgcctgattgtccccaacagcaacggcgtgatcacgacgacgcctacacccccgggacagtacttttacccccgcgggggtggcagcggtggaggtgcagggggcgcagggggcggcgtcaccgaggagcaggagggcttcgccgacggctttgtcaaagccctggacgatctgcacaagatgaaccacgtgacaccccccaacgtgtccctgggcgctaccggggggcccccggctgggcccgggggcgtctacgccggcccggagccacctcccgtttacaccaacctcagcagctactccccagcctctgcgtcctcgggaggcgccggggctgccgtcgggaccgggagctcgtacccgacgaccaccatcagctacctcccacacgcgccgcccttcgccggtggccacccggcgcagctgggcttgggccgcggcgcctccaccttcaaggaggaaccgcagaccgtgccggaggcgcgcagccgggacgccacgccgccggtgtcccccatcaacatggaagaccaagagcgcatcaaagtggagcgcaagcggctgcggaaccggctggcggccaccaagtgccggaagcggaagctggagcgcatcgcgcgcctggaggacaaggtgaagacgctcaaggccgagaacgcggggctgtcgagtaccgccggcctcctccgggagcaggtggcccagctcaaacagaaggtcatgacccacgtcagcaacggctgtcagctgctgcttggggtcaagggacacgccttctgaacgtcccctgcccctttacggacaccccctcgcttggacggctgggcacacgcctcccactggggtccagggagcaggcggtgggcacccaccctgggacctaggggcgccgcaaaccacactggactccggccctcctaccctgcgcccagtccttccacctcgacgtttacaagcccccccttccacttttttttgtatgttttttttctgctggaaacagactcgattcatattgaatataatatatttgtgtatttaacagggaggggaagagggggctgnaacaatccacacaanactatcccccacacctaatactctaaccccctattacattaagaaactacccctatcccctacccttccctgtttacacctgtctaactgaaaaaaacacacacttagtctcttaaaaacttatttgaacaccggtttgtatcgatatccctttaccctttctattaaacctatgcaatttctaaaatatactttgtcgttctttaaaat

SEQ ID NO: 301213 - DNA, 1787 bp, Homo sapiens
  misc_feature (3)..(3): n is a, c, g, or t
ggngtctcgagcatgtatctctagcatgttggcctatgggctgggacttgagagcggccaggccagcctcggagccagcagggagctgggagctgggggaaacgacgccaggaaagctatcgcgccagagagggcgacgggggctcgggaagcctgacagggcttttgcgcacagctgccggctggctgctacccgcccgcgccagcccccgagaacgcgcgaccaggcacccagtccggtcaccgcagcggagagctcgccgctcgctgcagcgaggcccggagcggccccgcaggaccctccccagaccgcctgggccgcccggatgtgcactaaaatggaacagcccttctaccacgacgactcatacacagctacgggatacggccgggcccctggtggcctctctctacacgactacaaactcctgaaaccgagcctggcggtcaacctggccgacccctaccggagtctcaaagcgcctggggctcgcggacccggcccagagggcggcggtggcggcagctacttttctggtcagggctcggacaccggcgcgtctctcaagctcgcctcttcggagctggaacgcctgattgtccccaacagcaacggcgtgatcacgacgacgcctacacccccgggacagtacttttacccccgcgggggtggcagcggtggaggtgcagggggcgcagggggcggcgtcaccgaggagcaggagggcttcgccgacggctttgtcaaagccctggacgatctgcacaagatgaaccacgtgacaccccccaacgtgtccctgggcgctaccggggggcccccggctgggcccgggggcgtctacgccggcccggagccacctcccgtttacaccaacctcagcagctactccccagcctctgcgtcctcgggaggcgccggggctgccgtcgggaccgggagctcgtacccgacgaccaccatcagctacctcccacacgcgccgcccttcgccggtggccacccggcgcagctgggcttgggccgcggcgcctccaccttcaaggaggaaccgcagaccgtgccggaggcgcgcagccgggacgccacgccgccggtgtcccccatcaacatggaagaccaagagcgcatcaaagtggagcgcaagcggctgcggaaccggctggcggccaccaagtgccggaagcggaagctggagcgcatcgcgcgcctggaggacaaggtgaagacgctcaaggccgagaacgcggggctgtcgagtaccgccggcctcctccgggagcaggtggcccagctcaaacagaaggtcatgacccacgtcagcaacggctgtcagctgctgcttggggtcaagggacacgccttctgaacgtcccctgcccctttacggacaccccctcgcttggacggctgggcacacgcctcccactggggtccagggagcaggcggtgggcacccaccctgggacctaggggcgccgcaaaccacactggactccggccctcctaccctgcgcccagtccttccacctcgacgtttacaagcccccccttccacttttttttgtatgttttttttctgctggaaacagactcgattcatattgaatataatatatttgtgtatttaacagggaggggaagagggggccgcccgcacgccctccgtgaccgagactatatgccctcggcttcccagggacgtgacccatctcgcatcgtgcccctgtctctgtgcataggactgtgctacagtaccctgccccttagcctctatcggcctctt

SEQ ID NO: 301214 - DNA, 1793 bp, Homo sapiens
  misc_feature (3)..(3): n is a, c, g, or t
ggngtctcgagcatgtatctctagcatgttggcctatgggctgggacttgagagcggccaggccagcctcggagccagcagggagctgggagctgggggaaacgacgccaggaaagctatcgcgccagagagggcgacgggggctcgggaagcctgacagggcttttgcgcacagctgccggctggctgctacccgcccgcgccagcccccgagaacgcgcgaccaggcacccagtccggtcaccgcagcggagagctcgccgctcgctgcagcgaggcccggagcggccccgcaggaccctccccagaccgcctgggccgcccggatgtgcactaaaatggaacagcccttctaccacgacgactcatacacagctacgggatacggccgggcccctggtggcctctctctacacgactacaaactcctgaaaccgagcctggcggtcaacctggccgacccctaccggagtctcaaagcgcctggggctcgcggacccggcccagagggcggcggtggcggcagctacttttctggtcagggctcggacaccggcgcgtctctcaagctcgcctcttcggagctggaacgcctgattgtccccaacagcaacggcgtgatcacgacgacgcctacacccccgggacagtacttttacccccgcgggggtggcagcggtggaggtgcagggggcgcagggggcggcgtcaccgaggagcaggagggcttcgccgacggctttgtcaaagccctggacgatctgcacaagatgaaccacgtgacaccccccaacgtgtccctgggcgctaccggggggcccccggctgggcccgggggcgtctacgccggcccggagccacctcccgtttacaccaacctcagcagctactccccagcctctgcgtcctcgggaggcgccggggctgccgtcgggaccgggagctcgtacccgacgaccaccatcagctacctcccacacgcgccgcccttcgccggtggccacccggcgcagctgggcttgggccgcggcgcctccaccttcaaggaggaaccgcagaccgtgccggaggcgcgcagccgggacgccacgccgccggtgtcccccatcaacatggaagaccaagagcgcatcaaagtggagcgcaagcggctgcggaaccggctggcggccaccaagtgccggaagcggaagctggagcgcatcgcgcgcctggaggacaaggtgaagacgctcaaggccgagaacgcggggctgtcgagtaccgccggcctcctccgggagcaggtggcccagctcaaacagaaggtcatgacccacgtcagcaacggctgtcagctgctgcttggggtcaagggacacgccttctgaacgtcccctgcccctttacggacaccccctcgcttggacggctgggcacacgcctcccactggggtccagggagcaggcggtgggcacccaccctgggacctaggggcgccgcaaaccacactggactccggccctcctaccctgcgcccagtccttccacctcgacgtttacaagcccccccttccacttttttttgtatgttttttttctgctggaaacagactcgattcatattgaatataatatatttgtgtatttaacagggaggggaagagggggctatacttatttgtgtataagattataattattttatatttcattttataattatattataattttattattataattaactgttattattctaataatattactatctaatttaattatttttttattttctttaatcttt

SEQ ID NO: 301215 - DNA, 2083 bp, Homo sapiens
  misc_feature (3)..(3): n is a, c, g, or t
  misc_feature (1579)..(1579): n is a, c, g, or t
  misc_feature (1593)..(1593): n is a, c, g, or t
ggngtctcgagcatgtatctctagcatgttggcctatgggctgggacttgagagcggccaggccagcctcggagccagcagggagctgggagctgggggaaacgacgccaggaaagctatcgcgccagagagggcgacgggggctcgggaagcctgacagggcttttgcgcacagctgccggctggctgctacccgcccgcgccagcccccgagaacgcgcgaccaggcacccagtccggtcaccgcagcggagagctcgccgctcgctgcagcgaggcccggagcggccccgcaggaccctccccagaccgcctgggccgcccggatgtgcactaaaatggaacagcccttctaccacgacgactcatacacagctacgggatacggccgggcccctggtggcctctctctacacgactacaaactcctgaaaccgagcctggcggtcaacctggccgacccctaccggagtctcaaagcgcctggggctcgcggacccggcccagagggcggcggtggcggcagctacttttctggtcagggctcggacaccggcgcgtctctcaagctcgcctcttcggagctggaacgcctgattgtccccaacagcaacggcgtgatcacgacgacgcctacacccccgggacagtacttttacccccgcgggggtggcagcggtggaggtgcagggggcgcagggggcggcgtcaccgaggagcaggagggcttcgccgacggctttgtcaaagccctggacgatctgcacaagatgaaccacgtgacaccccccaacgtgtccctgggcgctaccggggggcccccggctgggcccgggggcgtctacgccggcccggagccacctcccgtttacaccaacctcagcagctactccccagcctctgcgtcctcgggaggcgccggggctgccgtcgggaccgggagctcgtacccgacgaccaccatcagctacctcccacacgcgccgcccttcgccggtggccacccggcgcagctgggcttgggccgcggcgcctccaccttcaaggaggaaccgcagaccgtgccggaggcgcgcagccgggacgccacgccgccggtgtcccccatcaacatggaagaccaagagcgcatcaaagtggagcgcaagcggctgcggaaccggctggcggccaccaagtgccggaagcggaagctggagcgcatcgcgcgcctggaggacaaggtgaagacgctcaaggccgagaacgcggggctgtcgagtaccgccggcctcctccgggagcaggtggcccagctcaaacagaaggtcatgacccacgtcagcaacggctgtcagctgctgcttggggtcaagggacacgccttctgaacgtcccctgcccctttacggacaccccctcgcttggacggctgggcacacgcctcccactggggtccagggagcaggcggtgggcacccaccctgggacctaggggcgccgcaaaccacactggactccgtaaaaaaaaaattggttctttattaaaaaaaaaaaaaaaaaaaaaaaaaaaaaaaaaaaaaaaaaaaaaacaaaaaanaaaaaaaaaaaaanaaaaaaaaaaagtcgctattcccaacataaaaaaacttgtcaaacattcaacattattctcagctttctgtatttctaaaaaggccggcactcgcacgccttttccaacatttttccaatcgtgcctggcaatctcaaacttgtttgcgcaaatcattgctaacaggtcacctaatttactgttaaatcaggtaattctctacccaaagggtcgacaaaggcaaatcccgcttttaatccttttaaccgagatacgtacttttgacattccaatttgtaaccatagtcccttattttagaacgtgttctccaacatcctttgtgggcacatcctcttttaaggcataggctccttttgctggaatgatccctcttattccaagtatatgggctctcttgtccgttcaatctgtcaattcgttcctttggaacccctctttaatagcttgcgccctataaggccttgctctgccctgtctttcggtctcct

SEQ ID NO: 301216 - DNA, 1649 bp, Homo sapiens
  misc_feature (3)..(3): n is a, c, g, or t
ggngtctcgagcatgtatctctagcatgttggcctatgggctgggacttgagagcggccaggccagcctcggagccagcagggagctgggagctgggggaaacgacgccaggaaagctatcgcgccagagagggcgacgggggctcgggaagcctgacagggcttttgcgcacagctgccggctggctgctacccgcccgcgccagcccccgagaacgcgcgaccaggcacccagtccggtcaccgcagcggagagctcgccgctcgctgcagcgaggcccggagcggccccgcaggaccctccccagaccgcctgggccgcccggatgtgcactaaaatggaacagcccttctaccacgacgactcatacacagctacgggatacggccgggcccctggtggcctctctctacacgactacaaactcctgaaaccgagcctggcggtcaacctggccgacccctaccggagtctcaaagcgcctggggctcgcggacccggcccagagggcggcggtggcggcagctacttttctggtcagggctcggacaccggcgcgtctctcaagctcgcctcttcggagctggaacgcctgattgtccccaacagcaacggcgtgatcacgacgacgcctacacccccgggacagtacttttacccccgcgggggtggcagcggtggaggtgcagggggcgcagggggcggcgtcaccgaggagcaggagggcttcgccgacggctttgtcaaagccctggacgatctgcacaagatgaaccacgtgacaccccccaacgtgtccctgggcgctaccggggggcccccggctgggcccgggggcgtctacgccggcccggagccacctcccgtttacaccaacctcagcagctactccccagcctctgcgtcctcgggaggcgccggggctgccgtcgggaccgggagctcgtacccgacgaccaccatcagctacctcccacacgcgccgcccttcgccggtggccacccggcgcagctgggcttgggccgcggcgcctccaccttcaaggaggaaccgcagaccgtgccggaggcgcgcagccgggacgccacgccgccggtgtcccccatcaacatggaagaccaagagcgcatcaaagtggagcgcaagcggctgcggaaccggctggcggccaccaagtgccggaagcggaagctggagcgcatcgcgcgcctggaggacaaggtgaagacgctcaaggccgagaacgcggggctgtcgagtaccgccggcctcctccgggagcaggtggcccagctcaaacagaaggtcatgacccacgtcagcaacggctgtcagctgctgcttggggtcaagggacacgccttctgaacgtcccctgcccctgcgccatcgtggctacgaagcgcacggatggcgcgtctccttatgagcggacgcagtgattataggcttacggctctaagattaaaaatgccctagcccatttcctaccacaaggcacacttacacccattatccccatactagttattatcgaaaccatcagcctactcattcaaccaatagccctggccgtacgcttaaccgctaacattactgcaggccaactactcatgcacctaattggacgcgccatcgtgcgctgag

SEQ ID NO: 301217 - DNA, 1282 bp, Homo sapiens
  misc_feature (778)..(778): n is a, c, g, or t
  misc_feature (792)..(792): n is a, c, g, or t
ggaaacaaggctatgaaccatgattagcgaaggtcgagactcgggaaccctggggttgtgggcgcgcctggaggacaaggtgaagacgctcaaggccgagaacgcggggctgtcgagtaccgccggcctcctccgggagcaggtggcccagctcaaacagaaggtcatgacccacgtcagcaacggctgtcagctgctgcttggggtcaagggacacgccttctgaacgtcccctgcccctttacggacaccccctcgcttggacggctgggcacacgcctcccactggggtccagggagcaggcggtgggcacccaccctgggacctaggggcgccgcaaaccacactggactccggccctcctaccctgcgcccagtccttccacctcgacgtttacaagcccccccttccacttttttttgtatgttttttttctgctggaaacagactcgattcatattgaatataatatatttgtgtatttaacagggaggggaagagggggcgatcgcggcggagctggccccgccgcctggtactcaagcccgcggggacattgggaaggggacccccgccccctgccctcccctctctgcaccgtactgtggaaaagaaacacgcacttagtctctaaagagtttattttaagacgtgtttgtgtttgtgtgtgtttgttctttttattgaatctatttaagtaaaaaaaaaattggttctttattaaaaaaaaaaaaaaaaaaaaaaaaaaaaaaaaaaaaaaaaaaaaaacaaaaaanaaaaaaaaaaaaanaaaaaaaaaaagtcgctattcccaacataaaaaaacttgtcaaacattcaacattattctcagctttctgtatttctaaaaaggccggcactcgcacgccttttccaacatttttccaatcgtgcctggcaatctcaaacttgtttgcgcaaatcattgctaacaggtcacctaatttactgttaaatcaggtaattctctacccaaagggtcgacaaaggcaaatcccgcttttaatccttttaaccgagatacgtacttttgacattccaatttgtaaccatagtcccttattttagaacgtgttctccaacatcctttgtgggcacatcctcttttaaggcataggctccttttgctggaatgatccctcttattccaagtatatgggctctcttgtccgttcaatctgtcaattcgttcctttggaacccctctttaatagcttgcgccctataaggccttgctctgccctgtctttcggtctcct

SEQ ID NO: 301218 - DNA, 1068 bp, Homo sapiens
  misc_feature (3)..(3): n is a, c, g, or t
ggngtctcgagcatgtatctctagcatgttggcctatgggctgggacttgagagcggccaggccagcctcggagccagcagggagctgggagctgggggaaacgacgccaggaaagctatcgcgccagagagggcgacgggggctcgggaagcctgacagggcttttgcgcacagctgccggctggctgctacccgcccgcgccagcccccgagaacgcgcgaccaggcacccagtccggtcaccgcagcggagagctcgccgctcgctgcagcgaggcccggagcggccccgcaggaccctccccagaccgcctgggccgcccggatgtgcactaaaatggaacagcccttctaccacgacgactcatacacagctacgggatacggccgggcccctggtggcctctctctacacgactacaaactcctgaaaccgagcctggcggtcaacctggccgacccctaccggagtctcaaagcgcctggggctcgcggacccggcccagagggcggcggtggcggcagctacttttctggtcagggctcggacaccggcgcgtctctcaagctcgcctcttcggagctggaacgcctgattgtccccaacagcaacggcgtgatcacgacgacgcctacacccccgggacagtacttttacccccgcgggggtggcagcggtggaggtgcagggggcgcagggggcggcgtcaccgaggagcaggagggcttcgccgacggctttgtcaaagccctggacgatctgcacaagatgaaccacgtgacaccccccaacgtgtccctgggcgctaccggggggcccccggctgggcccgggggcgtctacgccggcccggagccacctcccgtttacaccaacctcagcagctactccccagcctctgcgtcctcgggaggcgccggggctgccgtcgggaccgggagctcgtacccgacgaccaccatcagctacctcccacacgcgccgcccttcgccggccggggcatgggttggcggggctccacttcaggggacggaaggcggaggcaaacggagccaccccgtgacc

SEQ ID NO: 301219 - DNA, 1251 bp, Homo sapiens
  misc_feature (3)..(3): n is a, c, g, or t
  misc_feature (747)..(747): n is a, c, g, or t
  misc_feature (761)..(761): n is a, c, g, or t
ggngtctcgagcatgtatctctagcatgttggcctatgggctgggacttgagagcggccaggccagcctcggagccagcagggagctgggagctgggggaaacgacgccaggaaagctatcgcgccagagagggcgacgggggctcgggaagcctgacagggcttttgcgcacagctgccggctggctgctacccgcccgcgccagcccccgagaacgcgcgaccaggcacccagtccggtcaccgcagcggagagctcgccgctcgctgcagcgaggcccggagcggccccgcaggaccctccccagaccgcctgggccgcccggatgtgcactaaaatggaacagcccttctaccacgacgtttacaagcccccccttccacttttttttgtatgttttttttctgctggaaacagactcgattcatattgaatataatatatttgtgtatttaacagggaggggaagagggggcgatcgcggcggagctggccccgccgcctggtactcaagcccgcggggacattgggaaggggacccccgccccctgccctcccctctctgcaccgtactgtggaaaagaaacacgcacttagtctctaaagagtttattttaagacgtgtttgtgtttgtgtgtgtttgttctttttattgaatctatttaagtaaaaaaaaaattggttctttattaaaaaaaaaaaaaaaaaaaaaaaaaaaaaaaaaaaaaaaaaaaaaacaaaaaanaaaaaaaaaaaaanaaaaaaaaaaagtcgctattcccaacataaaaaaacttgtcaaacattcaacattattctcagctttctgtatttctaaaaaggccggcactcgcacgccttttccaacatttttccaatcgtgcctggcaatctcaaacttgtttgcgcaaatcattgctaacaggtcacctaatttactgttaaatcaggtaattctctacccaaagggtcgacaaaggcaaatcccgcttttaatccttttaaccgagatacgtacttttgacattccaatttgtaaccatagtcccttattttagaacgtgttctccaacatcctttgtgggcacatcctcttttaaggcataggctccttttgctggaatgatccctcttattccaagtatatgggctctcttgtccgttcaatctgtcaattcgttcctttggaacccctctttaatagcttgcgccctataaggccttgctctgccctgtctttcggtctcct

SEQ ID NO: 301220 - DNA, 1282 bp, Homo sapiens
actccagcctggccccgccccggcccagctacattcccgggccagcttctgtactgccaggtccgggtcggcggctgcactgcggatgagaccggtgcgactcatgaaggtgttcgtcacccgcaggatacccgccgagggtagggtcgcgctcgcccgggcggcagactgtgaggtggagcagtgggactcggatgagcccatccctgccaaggagctagagcgaggtgtggcgggggcccacggcctgctctgcctcctctccgaccacgtggacaagaggatcctggatgctgcaggggccaatctcaaagtcatcagcaccatgtctgtgggcatcgaccacttggctttggatgaaatcaagaagcgtgggatccgagttggctacaccccagatgtcctgacagataccaccgccgaactcgcagtctccctgctacttaccacctgccgccggttgccggaggccatcgaggaagtgaagaatggtggctggacctcgtggaagcccctctggctgtgtggctatggactcacgcagagcactgtcggcatcatcgggctggggcgcataggccaggccattgctcggcgtctgaaaccattcggtgtccagagatttctgtacacagggcgccagcccaggcctgaggaagcagcggaattccaggcagagtttgtgtctacccctgagctggctgcccaatctgatttcatcgtcgtggcctgctccttaacacctgcaaccgagggactctgcaacaaggacttcttccagaagatgaaggaaacagctgtgttcatcaacatcagcaggggcgacgtcgtaaaccaggacgacctgtaccaggccttggccagtggtaagattgcagctgctggactggatgtgacgagcccagaaccactgcctacaaaccaccctctcctgaccctgaagaactgtgtgattctgccccacattggcagtgccacccacagaacccgcaacaccatgtccttgttggcagctaacaacttgctggctggcctgagaggggagccgatgcctagtgaactcaagctgtagccaaacagtagagatggagggccgggaagcaaaccgtgccctggtattgtcagacacacccaggcttgatttggatccacaggcagagccaagggaaggtgtgattctctgaggaaagagtgattctgatatatgtacttgtcacattggtgttggacacatttgcgccaaaagtatggtaattctattattaaataattctctgagaaa

SEQ ID NO: 301221 - DNA, 5048 bp, Homo sapiens
  misc_feature (2242)..(2242): n is a, c, g, or t
  misc_feature (2924)..(2924): n is a, c, g, or t
cagacactgcagagggtgatgtgtggaatctaccacgtgcgccatgctgcctttctaaaggccaaacagttttaaaatctagcctgaaggtttcagatcagggatttcggcctgtatatcaagagttagagttggccgggcacggtggctcacacctgtaatcccagcactttgggaggccgaggcgggcagattgtttgagcctcaggagttggagaacagcttgggcaatgtggcaaaagtctgtctctacaaaaaatacaaaaattaggcaggcgtggtgttacacgcctgtagtcccaactactcgggaggctgaggtgggaggattgcttgaacccaggaggcagaggctgcagtgaaccgagatcatgtcactgtactccagtctgggcgacacagcaagaccctgtctccaaaaaaaaaaaaaaaaaagttgggggaagcattccatgtgcagatggagggactggcccgagtcaaggtgggaggcgtgcaaacgcaggctctcacagtgcgtggccagcagcgtgggccccggcacggggcatggagcagagtagacagtgctgagtcctgctcactgtcctgtctggggagtcatcacatctactggaggtggctcagggcaggctccatctcttgcccagggcagcagggtgggccctgtggctgtactctttgttgctgccctaaagtgccaagagaacttgttttggaatcataaatcctgagtttgcagcctgttgctctcaactcttccctggttgtgtgacctcaggcaagtcaccctttctggtttgttttcccatctgcaaaacaggatgagagccagtaaggccccttcccgccctcaagttctatgtctctggtggctttaaaggtggagtcgtttctgctgctcatctgcagtgccgagtggcagtgcctcatcccactctcagtccgtgacctggagggtgggtttataccttggaccacagtcagaggtgccgggttctcagcggcccccatcttggtccaaggctgggcctctcacctgcccctctctctcccctcagtggtggctggacctcgtggaagcccctctggctgtgtggctatggactcacgcagagcactgtcggcatcatcgggctggggcgcataggtgaggctcccaccggcccgcttgcccgccccggctctcacagcgtggtttgcatccctggcaccacgtgtctgaaggctgagaagacccacatgctgtcagggcactttgcttgcagtagagatatctctaatgagggatacagctttgtaaaacacaggcaaatacataaataaaccaaagcaggattccttaagaactcaccaggtgataaaagcaagttgcctaagggtcagggggcttcatgattccggctccataaagaacagatgaagactacaaatgtgttggggccgttaggagtggttaccgtgagagagcccattcccccgacacctactccggcttgcgttctggaaggtatgtgactcacaaagccctaactcgggccggagggctcagtgggcagagttgatctgcagttctgcagatgaggcagagacacttttcttccagtggcccttatttggagaagcctggcagaagggcgtgagcctagccaagcagctatctattggtggttctctgtcatcctgcctggtgcaggggtgcgggtgagggtggagagtgtggagaacctgtctagccaacgaacagccctgcctctcactagagagttgcttggaggaacccaacagctttggggcacgttctgagcctgaaaatccaactgtacaaatctgtctcagcagcagcttacatgaaaattgtaagtttggggtgagctggcagtttggcagtgccaccaaaaagtcaaatggggtctgagactgcattcacagaagcagagggtccaggacaaaggaggggactgcttgaccaggtgtctcctttgtgaaaacctctccagttctcagaggttaggaaaaacctgagtggctttccagatggcttggaccatgtgaggacagcatcagccagtcacagtctcaggggagctgaggtgctgtctccagatccctggggcagtgtgggctggctgggggctagttacagtggggcagccagccccccacccgctttggaggagacaggagcaggcaactcgggctgtgctgatgaaaagggtctgccctgagggccgctgttccngaaatgctgggtggtgtccctaccctttgcgggactgggaacgagacatggactctccttgctctaggccaggccattgctcggcgtctgaaaccattcggtgtccagagatttctgtacacagggcgccagcccaggcctgaggaagcagcggaattccaggcagagtttggtaagtgaagccttgatttccacaggagcctatctgtgcccagttgagaggctgtattttctctcaatggtggcattttcaggcagagggcaggagctccaggcatgtccaggggctgctgtctggtagatgtttaatctacctgcccctggacactggcccactcagggagcacagggacttacccaggtcctctccgagccagcagagcagtccagggctcccgtctttcagagtcctttgttaccattccccattgtgggcggagcagcggggatggtggtgggtgtgaggaagggctgggcactttcactgtcttttccttcataaactggcaagcactaccctagcctttgtgtgcgccccttagtccaggcggatccagcacctggcgggtccacagcctggtgagcagatggcaggctggatctcaagcattccccacgcccctgggcactttgggccctgaaggtagttaaagccagagtggtccagatcccactgtgtgtnatttgactttgtgcactcatgagagttgtccaggtagagactcggccttcaggaagcatcttgggagtttctgttagggagtcgggagcaaggggctggtctcccgccatctggttgtccctagcctgggactcagtgcctgatggagtcctgccctccctcagtgtctacccctgagctggctgcccaatctgatttcatcgtcgtggcctgctccttaacacctgcaaccgagggactctgcaacaaggacttcttccagaagatgaaggaaacagctgtgttcatcaacatcagcaggtatcctagggccaccttacccagcaagcctggagaggagccatccccactgctgccatctggagattttcttccccgtgggttgttggtgagaccccaggctgagcttgctggtttccataaaccaaacaaccaactcagaaattcgtgggaatacacgagacctccgtacagggaagaagagccgtcagagtgggcctggcctgtctgcttctcagcagtggcccccacccggcggggcctggcacacagcagcgtggcttcagggagtgttcccagggagcctctgcaggcccattatcctccaccacaaagggctggacttgaggatctgaagggccctctggaggccgcctcccacactgctgagcctggctttgtctggctgtggttcagtgatactttgaaccttatgctcctgggcggacagaccctaaaactcacgtggtcgtagctcctcacactgtccctaggggtgccttcaggccactgggcatgtatggaggtcagaccttccttctctgccactccaagcccttcctagctggtgccccttgagcctgtttacatcagtttaggggaagggggattgggtgaggtcatcctgaggactcgtccaccccaaaggtacctgtaattaccaacatttagctacaaaacaggtgacctgggaatggaagagtgaaacatgcaggaccacagggctcgcactgctggctggcagcagtcacagctgccgtgtactgggtgcctgcgtgtacccaggacagcccaggaccgtgtattactcattagtgcacaagtattacttagtgcacaatatacagtctctagaagatgacttcttgccttcagtcgccgctccctttgatggctgtggttaggggtgtgctcgttcctctgccctggtttagacaggtacctgatagcacactgtggtgcttctcagtgggggtctgggggtcaaccagatcagaaacacttggatggggcctaacacagatgcccttctgggccctgttcatgcagtagagcatgtaagaaagctttaatcctcccaacatgcctgggagttaggtggtattctccttatctcacagagtagataatttgagacacagataattcgaggcacagagaatttgagacacttgcccaaggtcacacagctagaaggaggcagggctggagttctctgagtatataagacttacagacatactgtaagtatacctaagacttactgctttaaaagtcagtgccaagtgagtggaaaaattcattctgtaggttgttctgcctcaaaggtggcctgggcggagggatcttcggggtacccatgtcaccactgtcattcccaggggcgacgtcgtaaaccaggacgacctgtaccaggccttggccagtggtaagattgcagctgctggactggatgtgacgagcccagaaccactgcctacaaaccaccctctcctgaccctgaagaactgtgtgattctgccccacattggcagtgccacccacagaacccgcaacaccatgtccttgttggcagctaacaacttgctggctggcctgagaggggagccgatgcctagtgaactcaagctgtagccaaacagtagagatggagggccgggaagcaaaccgtgccctggtattgtcagacacacccaggcttgatttggatccacaggcagagccaagggaaggtgtgattctctgaggaaagagtgattctgatatatgtacttgtcacattggtgttggacacatttgcgccaaaagtatggtaattctattattaaataattctctgagaaa

SEQ ID NO: 301222 - DNA, 408 bp, Homo sapiens
agccatgaaaacagcccagctgaaggctgctgaaccacccttcttatctccctctctctctctctctcctttccagtgattctgccccacattggcagtgccacccacagaacccgcaacaccatgtccttgttggcagctaacaacttgctggctggcctgagaggggagccgatgcctagtgaactcaagctgtagccaaacagtagagatggagggccgggaagcaaaccgtgccctggtattgtcagacacacccaggcttgatttggatccacaggcagagccaagggaaggtgtgattctctgaggaaagagtgattctgatatatgtacttgtcacattggtgttggacacatttgcgccaaaagtatggtaattctattattaaataattctctgagaaa

SEQ ID NO: 301223 - DNA, 1254 bp, Homo sapiens
actccagcctggccccgccccggcccagctacattcccgggccagcttctgtactgccaggtccgggtcggcggctgcactgcggatgagaccggtgcgactcatgaaggtgttcgtcacccgcaggatacccgccgaggctgtgaggtggagcagtgggactcggatgagcccatccctgccaaggagctagagcgaggtgtggcgggggcccacggcctgctctgcctcctctccgaccacgtggacaagaggatcctggatgctgcaggggccaatctcaaagtcatcagcaccatgtctgtgggcatcgaccacttggctttggatgaaatcaagaagcgtgggatccgagttggctacaccccagatgtcctgacagataccaccgccgaactcgcagtctccctgctacttaccacctgccgccggttgccggaggccatcgaggaagtgaagaatggtggctggacctcgtggaagcccctctggctgtgtggctatggactcacgcagagcactgtcggcatcatcgggctggggcgcataggccaggccattgctcggcgtctgaaaccattcggtgtccagagatttctgtacacagggcgccagcccaggcctgaggaagcagcggaattccaggcagagtttgtgtctacccctgagctggctgcccaatctgatttcatcgtcgtggcctgctccttaacacctgcaaccgagggactctgcaacaaggacttcttccagaagatgaaggaaacagctgtgttcatcaacatcagcaggggcgacgtcgtaaaccaggacgacctgtaccaggccttggccagtggtaagattgcagctgctggactggatgtgacgagcccagaaccactgcctacaaaccaccctctcctgaccctgaagaactgtgtgattctgccccacattggcagtgccacccacagaacccgcaacaccatgtccttgttggcagctaacaacttgctggctggcctgagaggggagccgatgcctagtgaactcaagctgtagccaaacagtagagatggagggccgggaagcaaaccgtgccctggtattgtcagacacacccaggcttgatttggatccacaggcagagccaagggaaggtgtgattctctgaggaaagagtgattctgatatatgtacttgtcacattggtgttggacacatttgcgccaaaagtatggtaattctattattaaataattctctgagaaa

SEQ ID NO: 301224 - DNA, 1707 bp, Homo sapiens
actccagcctggccccgccccggcccagctacattcccgggccagcttctgtactgccaggtccgggtcggcggctgcactgcggatgagaccggtgcgactcatgaaggtgttcgtcacccgcaggatacccgccgagggtagggtcgcgctcgcccgggcggcagactgtgaggtggagcagtgggactcggatgagcccatccctgccaaggagctagagcgaggtgtggcgggggcccacggcctgctctgcctcctctccgaccacgtggacaagaggatcctggatgctgcaggggccaatctcaaagtcatcagcaccatgtctgtgggcatcgaccacttggctttggatgaaatcaagaagcgtgggatccgagttggctacaccccagatgtcctgacagataccaccgccgaactcgcagtctccctgctacttaccacctgccgccggttgccggaggccatcgaggaagtgaagaatggtggctggacctcgtggaagcccctctggctgtgtggctatggactcacgcagagcactgtcggcatcatcgggctggggcgcataggccaggccattgctcggcgtctgaaaccattcggtgtccagagatttctgtacacagggcgccagcccaggcctgaggaagcagcggaattccaggcagagtttgtgtctacccctgagctggctgcccaatctgatttcatcgtcgtggcctgctccttaacacctgcaaccgagggactctgcaacaaggacttcttccagaagatgaaggaaacagctgtgttcatcaacatcagcaggggcgacgtcgtaaaccaggacgacctgtaccaggccttggccagtggtaagattgcagctgctggactggatgtgacgagcccagaaccactgcctacaaaccaccctctcctgaccctgaagaactgtgtgattctgccccacattggcagtgccacccacagaacccgcaacaccatgtccttgttggcagctaacaacttgctggctggcctgagaggggagccgatgcctagtgaactcaagctgtagccaaacagtagagatggagggccgggaagcaaaccgtgccctggtattgtcagacacacccaggcttgatttggatccacaggcagagccaagggaaggtgtgattctctgaggaaagagtgattctgatatatgtacttgtcacattggtgttggacacatttgcgccaaaagtatggtaattctattattaaataattctctgagaaaaaaaaaaaaaaaaaaaaaaaaaaaaaaaaaaaaaaaaaaaaaaaaaaaaaaaaaaaaaaaaaaaaaaaaaaaaaaaacctgtgtgcgcggcgcgcccgccgcgcgcgccccgaaaaaacttaaaacaccaccgggggggcggcgcgggccaccacaggacgagaacagaagagaacgaggggcataacacgaggtgcttccaagagagaacatctgggaggcacaacaagacagggggaggggtgactctctccacaaagagaataaaaaaagcgcggcgggtgagacaacaacgacgagggtagtaagaaaaaaacaacaaacagagggggtcttcggagggaggaactcaacggggggggttactaccacagcgaggggcccacaagagagggggcgcaaaacaagaaaggccgccgccgggg

SEQ ID NO: 301225 - DNA, 1707 bp, Homo sapiens
actccagcctggccccgccccggcccagctacattcccgggccagcttctgtactgccaggtccgggtcggcggctgcactgcggatgagaccggtgcgactcatgaaggtgttcgtcacccgcaggatacccgccgagggtagggtcgcgctcgcccgggcggcagactgtgaggtggagcagtgggactcggatgagcccatccctgccaaggagctagagcgaggtgtggcgggggcccacggcctgctctgcctcctctccgaccacgtggacaagaggatcctggatgctgcaggggccaatctcaaagtcatcagcaccatgtctgtgggcatcgaccacttggctttggatgaaatcaagaagcgtgggatccgagttggctacaccccagatgtcctgacagataccaccgccgaactcgcagtctccctgctacttaccacctgccgccggttgccggaggccatcgaggaagtgaagaatggtggctggacctcgtggaagcccctctggctgtgtggctatggactcacgcagagcactgtcggcatcatcgggctggggcgcataggccaggccattgctcggcgtctgaaaccattcggtgtccagagatttctgtacacagggcgccagcccaggcctgaggaagcagcggaattccaggcagagtttgtgtctacccctgagctggctgcccaatctgatttcatcgtcgtggcctgctccttaacacctgcaaccgagggactctgcaacaaggacttcttccagaagatgaaggaaacagctgtgttcatcaacatcagcaggggcgacgtcgtaaaccaggacgacctgtaccaggccttggccagtggtaagattgcagctgctggactggatgtgacgagcccagaaccactgcctacaaaccaccctctcctgaccctgaagaactgtgtgattctgccccacattggcagtgccacccacagaacccgcaacaccatgtccttgttggcagctaacaacttgctggctggcctgagaggggagccgatgcctagtgaactcaagctgtagccaaacagtagagatggagggccgggaagcaaaccgtgccctggtattgtcagacacacccaggcttgatttggatccacaggcagagccaagggaaggtgtgattctctgaggaaagagtgattctgatatatgtacttgtcacattggtgttggacacatttgcgccaaaagtatggtaattctattattaaataattctctgagaaaaaaaaaaaaaaaaaaaaaaaaaaaaaaaaaaaaaaaaaaaaaaaaaaaaaaaaaaaaaaaaaaaaaaaaaaaaaatttgggggcccccccccccccaaaaaatttagaaaagaccacaagggtgggggggcgagcacgcgcgcggccccacgaaatagagagaaaaacagcgcggacgcaaaagcgggggtctcccaaagaagagaccaacctgggtggcaaaagaaacggggggcggtgaagaaggcccacaaccacaaagaaaaaaacagccccgccgcggggagaaaaaacagggcgggctgttgcagaagaaacaaacctgcagggagggtctaccgaaggagctacaaaggcggtggtcctcactacaggggagcggcccaacagaggcccaaaataaaaaagcgccccggggagcgagt

SEQ ID NO: 301226 - DNA, 1313 bp, Homo sapiens
actccagcctggccccgccccggcccagctacattcccgggccagcttctgtactgccaggtccgggtcggcggctgcactgcggatgagaccggtgcgactcatgaaggtgttcgtcacccgcaggatacccgccgagggtagggtcgcgctcgcccgggcggcagactgtgaggtggagcagtgggactcggatgagcccatccctgccaaggagctagagcgaggtgtggcgggggcccacggcctgctctgcctcctctccgaccacgtggacaagaggatcctggatgctgcaggggccaatctcaaagtcatcagcaccatgtctgtgggcatcgaccacttggctttggatgaaatcaagaagcgtgggatccgagttggctacaccccagatgtcctgacagataccaccgccgaactcgcagtctccctgctacttaccacctgccgccggttgccggaggccatcgaggaagtgaagaatggtggctggacctcgtggaagcccctctggctgtgtggctatggactcacgcagagcactgtcggcatcatcgggctggggcgcataggccaggccattgctcggcgtctgaaaccattcggtgtccagagatttctgtacacagggcgccagcccaggcctgaggaagcagcggaattccaggcagagtttgtgtctacccctgagctggctgcccaatctgatttcatcgtcgtggcctgctccttaacacctgcaaccgagggactctgcaacaaggacttcttccagaagatgaaggaaacagctgtgttcatcaacatcagcaggggcgacgtcgtaaaccaggacgacctgtaccaggccttggccagtggtaagattgcagctgctggactggatgtgacgagcccagaaccactgcctacaaaccaccctctcctgaccctgaagaactgtgtgattctgccccacattggcagtgccacccacagaacccgcaacaccatgtccttgttggcagctaacaacttgctggctggcctgagaggggagccgatgcctagtgaactcaagctgtagccaaacagtagagatggagggccgggaagcaaaccgtgccctggtattgtcagacacacccaggcttgatttggatccacaggcagagccaagggaaggtgtgattctctgaggaaagagtgattctgatatatgtacttgtcacattggtgttggacacatttgcgccaaaagtatggtaattctattattaaataattctctgagaaaacccgctcctcccatctcccccacaaagggg

SEQ ID NO: 301227 - DNA, 1123 bp, Homo sapiens
actccagcctggccccgccccggcccagctacattcccgggccagcttctgtactgccaggtccgggtcggcggctgcactgcggatgagaccggtgcgactcatgaaggtgttcgtcacccgcaggatacccgccgagggggccaatctcaaagtcatcagcaccatgtctgtgggcatcgaccacttggctttggatgaaatcaagaagcgtgggatccgagttggctacaccccagatgtcctgacagataccaccgccgaactcgcagtctccctgctacttaccacctgccgccggttgccggaggccatcgaggaagtgaagaatggtggctggacctcgtggaagcccctctggctgtgtggctatggactcacgcagagcactgtcggcatcatcgggctggggcgcataggccaggccattgctcggcgtctgaaaccattcggtgtccagagatttctgtacacagggcgccagcccaggcctgaggaagcagcggaattccaggcagagtttgtgtctacccctgagctggctgcccaatctgatttcatcgtcgtggcctgctccttaacacctgcaaccgagggactctgcaacaaggacttcttccagaagatgaaggaaacagctgtgttcatcaacatcagcaggggcgacgtcgtaaaccaggacgacctgtaccaggccttggccagtggtaagattgcagctgctggactggatgtgacgagcccagaaccactgcctacaaaccaccctctcctgaccctgaagaactgtgtgattctgccccacattggcagtgccacccacagaacccgcaacaccatgtccttgttggcagctaacaacttgctggctggcctgagaggggagccgatgcctagtgaactcaagctgtagccaaacagtagagatggagggccgggaagcaaaccgtgccctggtattgtcagacacacccaggcttgatttggatccacaggcagagccaagggaaggtgtgattctctgaggaaagagtgattctgatatatgtacttgtcacattggtgttggacacatttgcgccaaaagtatggtaattctattattaaataattctctgagaaa

SEQ ID NO: 301228 - DNA, 1023 bp, Homo sapiens
tgggggctgatctagcaggatcctttctggatgcaagtgtgggccaatctcaaagtcatcagcaccatgtctgtgggcatcgaccacttggctttggatgaaatcaagaagcgtgggatccgagttggctacaccccagatgtcctgacagataccaccgccgaactcgcagtctccctgctacttaccacctgccgccggttgccggaggccatcgaggaagtgaagaatggtggctggacctcgtggaagcccctctggctgtgtggctatggactcacgcagagcactgtcggcatcatcgggctggggcgcataggccaggccattgctcggcgtctgaaaccattcggtgtccagagatttctgtacacagggcgccagcccaggcctgaggaagcagcggaattccaggcagagtttgtgtctacccctgagctggctgcccaatctgatttcatcgtcgtggcctgctccttaacacctgcaaccgagggactctgcaacaaggacttcttccagaagatgaaggaaacagctgtgttcatcaacatcagcaggggcgacgtcgtaaaccaggacgacctgtaccaggccttggccagtggtaagattgcagctgctggactggatgtgacgagcccagaaccactgcctacaaaccaccctctcctgaccctgaagaactgtgtgattctgccccacattggcagtgccacccacagaacccgcaacaccatgtccttgttggcagctaacaacttgctggctggcctgagaggggagccgatgcctagtgaactcaagctgtagccaaacagtagagatggagggccgggaagcaaaccgtgccctggtattgtcagacacacccaggcttgatttggatccacaggcagagccaagggaaggtgtgattctctgaggaaagagtgattctgatatatgtacttgtcacattggtgttggacacatttgcgccaaaagtatggtaattctattattaaataattctctgagaaa

SEQ ID NO: 301229 - DNA, 1303 bp, Homo sapiens
actccagcctggccccgccccggcccagctacattcccgggccagcttctgtactgccaggtccgggtcggcggctgcactgcggatgagaccggtgcgactcatgaaggtgttcgtcacccgcaggatacccgccgagggtagggtcgcgctcgcccgggcggcagactgtgaggtggagcagtgggactcggatgagcccatccctgccaaggagctagagcgaggtgtggcgggggcccacggcctgctctgcctcctctccgaccacgtggacaagaggatcctggatgctgcaggggccaatctcaaagtcatcagcaccatgtctgtgggcatcgaccacttggctttggatgaaatcaagaagcgtgggatccgagttggctacaccccagatgtcctgacagataccaccgccgaactcgcagtctccctgctacttaccacctgccgccggttgccggaggccatcgaggaagtgaagaatggtggctggacctcgtggaagcccctctggctgtgtggctatggactcacgcagagcactgtcggcatcatcgggctggggcgcataggccaggccattgctcggcgtctgaaaccattcggtgtccagagatttctgtacacagggcgccagcccaggcctgaggaagcagcggaattccaggcagagtttgtgtctacccctgagctggctgcccaatctgatttcatcgtcgtggcctgctccttaacacctgcaaccgagggactctgcaacaaggacttcttccagaagatgaaggaaacagctgtgttcatcaacatcagcaggggcgacgtcgtaaaccaggacgacctgtaccaggccttggccagtggtaagattgcagctgctggactggatgtgacgagcccagaaccactgcctacaaaccaccctctcctgaccctgaagaactgtgtgattctgccccacattggcagtgccacccacagaacccgcaacaccatgtccttgttggcagctaacaacttgctggctggcctgagaggggagccgatgcctagtgaactcaagctgtagccaaacagtagagatggagggccgggaagcaaaccgtgccctggtattgtcagacacacccaggcttgatttggatccacaggcagagccaagggaaggtgtgattctctgaggaaagagtgattctgatatatgagcttcgatgccataggagtgggcagcatgtgcgcctcaacgatgctggtcatttccatctatgtccataatgtctgtgagagcctgaagttacag

SEQ ID NO: 301230 - DNA, 1798 bp, Homo sapiens
actccagcctggccccgccccggcccagctacattcccgggccagcttctgtactgccaggtccgggtcggcggctgcactgcggatgagaccggtgcgactcatgaaggtgttcgtcacccgcaggatacccgccgaggctgtgaggtggagcagtgggactcggatgagcccatccctgccaaggagctagagcgaggtgtggcgggggcccacggcctgctctgcctcctctccgaccacgtggacaagaggatcctggatgctgcaggggccaatctcaaagtcatcagcaccatgtctgtgggcatcgaccacttggctttggatgaaatcaagaagcggtaactgcagcttgggatctggagggggcctagagagaggggtggctatgagagaaagaagagctgttgatttgtttttactgcatatccctcggccattcagggagaatgtgaggtggctgatgatagaatctgtccacatgtgcacaggtcagttacaataaaccccagcagtcagaaacagtgggtaacttctgtgtaggtggcaccctttcacattcattatcttttttgatccccacaacaataccttgaagtagcaaaggcaggtgttattctttctgtttcagatgaggaaattcagaaaggttaagttacttgttcagtccctgaaccctgatcttccatcttcatatccttccaaagtgggagataatctaaataggaatgaggactgcccgtttttgagtgctcatttatagttctgagcttcctggcaggcagatcaaagagggagcaaagtaactccatggaaatgtcccagcagtagacattggtaaatatggttgaggctgatgttaccacccagatgtctgattcgtagtgggatccgagttggctacaccccagatgtcctgacagataccaccgccgaactcgcagtctccctgctacttaccacctgccgccggttgccggaggccatcgaggaagtgaagaatggtggctggacctcgtggaagcccctctggctgtgtggctatggactcacgcagagcactgtcggcatcatcgggctggggcgcataggccaggccattgctcggcgtctgaaaccattcggtgtccagagatttctgtacacagggcgccagcccaggcctgaggaagcagcggaattccaggcagagtttgtgtctacccctgagctggctgcccaatctgatttcatcgtcgtggcctgctccttaacacctgcaaccgagggactctgcaacaaggacttcttccagaagatgaaggaaacagctgtgttcatcaacatcagcaggggcgacgtcgtaaaccaggacgacctgtaccaggccttggccagtggtaagattgcagctgctggactggatgtgacgagcccagaaccactgcctacaaaccaccctctcctgaccctgaagaactgtgtgattctgccccacattggcagtgccacccacagaacccgcaacaccatgtccttgttggcagctaacaacttgctggctggcctgagaggggagccgatgcctagtgaactcaagctgtagccaaacagtagagatggagggccgggaagcaaaccgtgccctggtattgtcagacacacccaggcttgatttggatccacaggcagagccaagggaaggtgtgattctctgaggaaagagtgattctgatatatgtacttgtcacattggtgttggacacatttgcgccaaaagtatggtaattctattattaaataattctctgagaaa

SEQ ID NO: 301231 - DNA, 1213 bp, Homo sapiens
  misc_feature (1195)..(1195): n is a, c, g, or t
actccagcctggccccgccccggcccagctacattcccgggccagcttctgtactgccaggtccgggtcggcggctgcactgcggatgagaccggtgcgactcatgaaggtgttcgtcacccgcaggatacccgccgagggtagggtcgcgctcgcccgggcggcagactgtgaggtggagcagtgggactcggatgagcccatccctgccaaggagctagagcgaggtgtggcgggggcccacggcctgctctgcctcctctccgaccacgtggacaagaggatcctggatgctgcaggggccaatctcaaagtcatcagcaccatgtctgtgggcatcgaccacttggctttggatgaaatcaagaagcgtgggatccgagttggctacaccccagatgtcctgacagataccaccgccgaactcgcagtctccctgctacttaccacctgccgccggttgccggaggccatcgaggaagtgaagaatggtggctggacctcgtggaagcccctctggctgtgtggctatggactcacgcagagcactgtcggcatcatcgggctggggcgcataggccaggccattgctcggcgtctgaaaccattcggtgtccagagatttctgtacacagggcgccagcccaggcctgaggaagcagcggaattccaggcagagtttgtgtctacccctgagctggctgcccaatctgatttcatcgtcgtggcctgctccttaacacctgcaaccgagggactctgcaacaaggacttcttccagaagatgaaggaaacagctgtgttcatcaacatcagcaggggcgacgtcgtaaaccaggacgacctgtaccaggccttggccagtggtaagattgcagctgctggactggatgtgacgagcccagaaccactgcctacaaaccaccctctcctgaccctgaagaactgtgtgattctgccccacattggcagtgccacccacagaacccgcaacaccatgtccttgttggcagctaacaacttgctggctggcctgagaggggagccgatgcctagtgaactcaagctgtagccaaacagtagagatggagggccgggaagcaaaccgtgccctggtattgtcagacacacccaggcttgatttggatccacaggcagagccaaccgaagctcccaccccctccccccccccccncccccacccacccccccc

SEQ ID NO: 301232 - DNA, 2441 bp, Homo sapiens
  misc_feature (1670)..(1670): n is a, c, g, or t
actccagcctggccccgccccggcccagctacattcccgggccagcttctgtactgccaggtccgggtcggcggctgcactgcggatgagaccggtgcgactcatgaaggtgttcgtcacccgcaggatacccgccgagggtagggtcgcgctcgcccgggcggcagactgtgaggtggagcagtgggactcggatgagcccatccctgccaaggagctagagcgaggtgtggcgggggcccacggcctgctctgcctcctctccgaccacgtggacaagaggatcctggatgctgcaggggccaatctcaaagtcatcagcaccatgtctgtgggcatcgaccacttggctttggatgaaatcaagaagcgtgggatccgagttggctacaccccagatgtcctgacagataccaccgccgaactcgcagtctccctgctacttaccacctgccgccggttgccggaggccatcgaggaagtgaagaatggtggctggacctcgtggaagcccctctggctgtgtggctatggactcacgcagagcactgtcggcatcatcgggctggggcgcataggtgaggctcccaccggcccgcttgcccgccccggctctcacagcgtggtttgcatccctggcaccacgtgtctgaaggctgagaagacccacatgctgtcagggcactttgcttgcagtagagatatctctaatgagggatacagctttgtaaaacacaggcaaatacataaataaaccaaagcaggattccttaagaactcaccaggtgataaaagcaagttgcctaagggtcagggggcttcatgattccggctccataaagaacagatgaagactacaaatgtgttggggccgttaggagtggttaccgtgagagagcccattcccccgacacctactccggcttgcgttctggaaggtatgtgactcacaaagccctaactcgggccggagggctcagtgggcagagttgatctgcagttctgcagatgaggcagagacacttttcttccagtggcccttatttggagaagcctggcagaagggcgtgagcctagccaagcagctatctattggtggttctctgtcatcctgcctggtgcaggggtgcgggtgagggtggagagtgtggagaacctgtctagccaacgaacagccctgcctctcactagagagttgcttggaggaacccaacagctttggggcacgttctgagcctgaaaatccaactgtacaaatctgtctcagcagcagcttacatgaaaattgtaagtttggggtgagctggcagtttggcagtgccaccaaaaagtcaaatggggtctgagactgcattcacagaagcagagggtccaggacaaaggaggggactgcttgaccaggtgtctcctttgtgaaaacctctccagttctcagaggttaggaaaaacctgagtggctttccagatggcttggaccatgtgaggacagcatcagccagtcacagtctcaggggagctgaggtgctgtctccagatccctggggcagtgtgggctggctgggggctagttacagtggggcagccagccccccacccgctttggaggagacaggagcaggcaactcgggctgtgctgatgaaaagggtctgccctgagggccgctgttccngaaatgctgggtggtgtccctaccctttgcgggactgggaacgagacatggactctccttgctctaggccaggccattgctcggcgtctgaaaccattcggtgtccagagatttctgtacacagggcgccagcccaggcctgaggaagcagcggaattccaggcagagtttgtgtctacccctgagctggctgcccaatctgatttcatcgtcgtggcctgctccttaacacctgcaaccgagggactctgcaacaaggacttcttccagaagatgaaggaaacagctgtgttcatcaacatcagcaggggcgacgtcgtaaaccaggacgacctgtaccaggccttggccagtggtaagattgcagctgctggactggatgtgacgagcccagaaccactgcctacaaaccaccctctcctgaccctgaagaactgtgtgattctgccccacattggcagtgccacccacagaacccgcaacaccatgtccttgttggcagctaacaacttgctggctggcctgagaggggagccgatgcctagtgaactcaagctgtagccaaacagtagagatggagggccgggaagcaaaccgtgccctggtattgtcagacacacccaggcttgatttggatccacaggcagagccaagggaaggtgtgattctctgaggaaagagtgattctgatatatgtacttgtcacattggtgttggacacatttgcgccaaaagtatggtaattctattattaaataattctctgagaaa

SEQ ID NO: 301233 - DNA, 2413 bp, Homo sapiens
  misc_feature (1642)..(1642): n is a, c, g, or t
actccagcctggccccgccccggcccagctacattcccgggccagcttctgtactgccaggtccgggtcggcggctgcactgcggatgagaccggtgcgactcatgaaggtgttcgtcacccgcaggatacccgccgaggctgtgaggtggagcagtgggactcggatgagcccatccctgccaaggagctagagcgaggtgtggcgggggcccacggcctgctctgcctcctctccgaccacgtggacaagaggatcctggatgctgcaggggccaatctcaaagtcatcagcaccatgtctgtgggcatcgaccacttggctttggatgaaatcaagaagcgtgggatccgagttggctacaccccagatgtcctgacagataccaccgccgaactcgcagtctccctgctacttaccacctgccgccggttgccggaggccatcgaggaagtgaagaatggtggctggacctcgtggaagcccctctggctgtgtggctatggactcacgcagagcactgtcggcatcatcgggctggggcgcataggtgaggctcccaccggcccgcttgcccgccccggctctcacagcgtggtttgcatccctggcaccacgtgtctgaaggctgagaagacccacatgctgtcagggcactttgcttgcagtagagatatctctaatgagggatacagctttgtaaaacacaggcaaatacataaataaaccaaagcaggattccttaagaactcaccaggtgataaaagcaagttgcctaagggtcagggggcttcatgattccggctccataaagaacagatgaagactacaaatgtgttggggccgttaggagtggttaccgtgagagagcccattcccccgacacctactccggcttgcgttctggaaggtatgtgactcacaaagccctaactcgggccggagggctcagtgggcagagttgatctgcagttctgcagatgaggcagagacacttttcttccagtggcccttatttggagaagcctggcagaagggcgtgagcctagccaagcagctatctattggtggttctctgtcatcctgcctggtgcaggggtgcgggtgagggtggagagtgtggagaacctgtctagccaacgaacagccctgcctctcactagagagttgcttggaggaacccaacagctttggggcacgttctgagcctgaaaatccaactgtacaaatctgtctcagcagcagcttacatgaaaattgtaagtttggggtgagctggcagtttggcagtgccaccaaaaagtcaaatggggtctgagactgcattcacagaagcagagggtccaggacaaaggaggggactgcttgaccaggtgtctcctttgtgaaaacctctccagttctcagaggttaggaaaaacctgagtggctttccagatggcttggaccatgtgaggacagcatcagccagtcacagtctcaggggagctgaggtgctgtctccagatccctggggcagtgtgggctggctgggggctagttacagtggggcagccagccccccacccgctttggaggagacaggagcaggcaactcgggctgtgctgatgaaaagggtctgccctgagggccgctgttccngaaatgctgggtggtgtccctaccctttgcgggactgggaacgagacatggactctccttgctctaggccaggccattgctcggcgtctgaaaccattcggtgtccagagatttctgtacacagggcgccagcccaggcctgaggaagcagcggaattccaggcagagtttgtgtctacccctgagctggctgcccaatctgatttcatcgtcgtggcctgctccttaacacctgcaaccgagggactctgcaacaaggacttcttccagaagatgaaggaaacagctgtgttcatcaacatcagcaggggcgacgtcgtaaaccaggacgacctgtaccaggccttggccagtggtaagattgcagctgctggactggatgtgacgagcccagaaccactgcctacaaaccaccctctcctgaccctgaagaactgtgtgattctgccccacattggcagtgccacccacagaacccgcaacaccatgtccttgttggcagctaacaacttgctggctggcctgagaggggagccgatgcctagtgaactcaagctgtagccaaacagtagagatggagggccgggaagcaaaccgtgccctggtattgtcagacacacccaggcttgatttggatccacaggcagagccaagggaaggtgtgattctctgaggaaagagtgattctgatatatgtacttgtcacattggtgttggacacatttgcgccaaaagtatggtaattctattattaaataattctctgagaaa

SEQ ID NO: 301234 - DNA, 961 bp, Homo sapiens
actccagcctggccccgccccggcccagctacattcccgggccagcttctgtactgccaggtccgggtcggcggctgcactgcggatgagaccggtgcgactcatgaaggtgttcgtcacccgcaggatacccgccgagggtagggtcgcgctcgcccgggcggcagatggtggctggacctcgtggaagcccctctggctgtgtggctatggactcacgcagagcactgtcggcatcatcgggctggggcgcataggccaggccattgctcggcgtctgaaaccattcggtgtccagagatttctgtacacagggcgccagcccaggcctgaggaagcagcggaattccaggcagagtttgtgtctacccctgagctggctgcccaatctgatttcatcgtcgtggcctgctccttaacacctgcaaccgagggactctgcaacaaggacttcttccagaagatgaaggaaacagctgtgttcatcaacatcagcaggggcgacgtcgtaaaccaggacgacctgtaccaggccttggccagtggtaagattgcagctgctggactggatgtgacgagcccagaaccactgcctacaaaccaccctctcctgaccctgaagaactgtgtgattctgccccacattggcagtgccacccacagaacccgcaacaccatgtccttgttggcagctaacaacttgctggctggcctgagaggggagccgatgcctagtgaactcaagctgtagccaaacagtagagatggagggccgggaagcaaaccgtgccctggtattgtcagacacacccaggcttgatttggatccacaggcagagccaagggaaggtgtgattctctgaggaaagagtgattctgatatatgtacttgtcacattggtgttggacacatttgcgccaaaagtatggtaattctattattaaataattctctgagaaa

SEQ ID NO: 301235 - DNA, 1854 bp, Homo sapiens
cagacactgcagagggtgatgtgtggaatctaccacgtgcgccatgctgcctttctaaaggccaaacagttttaaaatctagcctgaaggtttcagatcagggatttcggcctgtatatcaagagttagagttggccgggcacggtggctcacacctgtaatcccagcactttgggaggccgaggcgggcagattgtttgagcctcaggagttggagaacagcttgggcaatgtggcaaaagtctgtctctacaaaaaatacaaaaattaggcaggcgtggtgttacacgcctgtagtcccaactactcgggaggctgaggtgggaggattgcttgaacccaggaggcagaggctgcagtgaaccgagatcatgtcactgtactccagtctgggcgacacagcaagaccctgtctccaaaaaaaaaaaaaaaaaagttgggggaagcattccatgtgcagatggagggactggcccgagtcaaggtgggaggcgtgcaaacgcaggctctcacagtgcgtggccagcagcgtgggccccggcacggggcatggagcagagtagacagtgctgagtcctgctcactgtcctgtctggggagtcatcacatctactggaggtggctcagggcaggctccatctcttgcccagggcagcagggtgggccctgtggctgtactctttgttgctgccctaaagtgccaagagaacttgttttggaatcataaatcctgagtttgcagcctgttgctctcaactcttccctggttgtgtgacctcaggcaagtcaccctttctggtttgttttcccatctgcaaaacaggatgagagccagtaaggccccttcccgccctcaagttctatgtctctggtggctttaaaggtggagtcgtttctgctgctcatctgcagtgccgagtggcagtgcctcatcccactctcagtccgtgacctggagggtgggtttataccttggaccacagtcagaggtgccgggttctcagcggcccccatcttggtccaaggctgggcctctcacctgcccctctctctcccctcagtggtggctggacctcgtggaagcccctctggctgtgtggctatggactcacgcagagcactgtcggcatcatcgggctggggcgcataggccaggccattgctcggcgtctgaaaccattcggtgtccagagatttctgtacacagggcgccagcccaggcctgaggaagcagcggaattccaggcagagtttgtgtctacccctgagctggctgcccaatctgatttcatcgtcgtggcctgctccttaacacctgcaaccgagggactctgcaacaaggacttcttccagaagatgaaggaaacagctgtgttcatcaacatcagcaggggcgacgtcgtaaaccaggacgacctgtaccaggccttggccagtggtaagattgcagctgctggactggatgtgacgagcccagaaccactgcctacaaaccaccctctcctgaccctgaagaactgtgtgattctgccccacattggcagtgccacccacagaacccgcaacaccatgtccttgttggcagctaacaacttgctggctggcctgagaggggagccgatgcctagtgaactcaagctgtagccaaacagtagagatggagggccgggaagcaaaccgtgccctggtattgtcagacacacccaggcttgatttggatccacaggcagagccaagggaaggtgtgattctctgaggaaagagtgattctgatatatgtacttgtcacattggtgttggacacatttgcgccaaaagtatggtaattctattattaaataattctctgagaaa

SEQ ID NO: 301236 - DNA, 3013 bp, Homo sapiens
  misc_feature (2242)..(2242): n is a, c, g, or t
cagacactgcagagggtgatgtgtggaatctaccacgtgcgccatgctgcctttctaaaggccaaacagttttaaaatctagcctgaaggtttcagatcagggatttcggcctgtatatcaagagttagagttggccgggcacggtggctcacacctgtaatcccagcactttgggaggccgaggcgggcagattgtttgagcctcaggagttggagaacagcttgggcaatgtggcaaaagtctgtctctacaaaaaatacaaaaattaggcaggcgtggtgttacacgcctgtagtcccaactactcgggaggctgaggtgggaggattgcttgaacccaggaggcagaggctgcagtgaaccgagatcatgtcactgtactccagtctgggcgacacagcaagaccctgtctccaaaaaaaaaaaaaaaaaagttgggggaagcattccatgtgcagatggagggactggcccgagtcaaggtgggaggcgtgcaaacgcaggctctcacagtgcgtggccagcagcgtgggccccggcacggggcatggagcagagtagacagtgctgagtcctgctcactgtcctgtctggggagtcatcacatctactggaggtggctcagggcaggctccatctcttgcccagggcagcagggtgggccctgtggctgtactctttgttgctgccctaaagtgccaagagaacttgttttggaatcataaatcctgagtttgcagcctgttgctctcaactcttccctggttgtgtgacctcaggcaagtcaccctttctggtttgttttcccatctgcaaaacaggatgagagccagtaaggccccttcccgccctcaagttctatgtctctggtggctttaaaggtggagtcgtttctgctgctcatctgcagtgccgagtggcagtgcctcatcccactctcagtccgtgacctggagggtgggtttataccttggaccacagtcagaggtgccgggttctcagcggcccccatcttggtccaaggctgggcctctcacctgcccctctctctcccctcagtggtggctggacctcgtggaagcccctctggctgtgtggctatggactcacgcagagcactgtcggcatcatcgggctggggcgcataggtgaggctcccaccggcccgcttgcccgccccggctctcacagcgtggtttgcatccctggcaccacgtgtctgaaggctgagaagacccacatgctgtcagggcactttgcttgcagtagagatatctctaatgagggatacagctttgtaaaacacaggcaaatacataaataaaccaaagcaggattccttaagaactcaccaggtgataaaagcaagttgcctaagggtcagggggcttcatgattccggctccataaagaacagatgaagactacaaatgtgttggggccgttaggagtggttaccgtgagagagcccattcccccgacacctactccggcttgcgttctggaaggtatgtgactcacaaagccctaactcgggccggagggctcagtgggcagagttgatctgcagttctgcagatgaggcagagacacttttcttccagtggcccttatttggagaagcctggcagaagggcgtgagcctagccaagcagctatctattggtggttctctgtcatcctgcctggtgcaggggtgcgggtgagggtggagagtgtggagaacctgtctagccaacgaacagccctgcctctcactagagagttgcttggaggaacccaacagctttggggcacgttctgagcctgaaaatccaactgtacaaatctgtctcagcagcagcttacatgaaaattgtaagtttggggtgagctggcagtttggcagtgccaccaaaaagtcaaatggggtctgagactgcattcacagaagcagagggtccaggacaaaggaggggactgcttgaccaggtgtctcctttgtgaaaacctctccagttctcagaggttaggaaaaacctgagtggctttccagatggcttggaccatgtgaggacagcatcagccagtcacagtctcaggggagctgaggtgctgtctccagatccctggggcagtgtgggctggctgggggctagttacagtggggcagccagccccccacccgctttggaggagacaggagcaggcaactcgggctgtgctgatgaaaagggtctgccctgagggccgctgttccngaaatgctgggtggtgtccctaccctttgcgggactgggaacgagacatggactctccttgctctaggccaggccattgctcggcgtctgaaaccattcggtgtccagagatttctgtacacagggcgccagcccaggcctgaggaagcagcggaattccaggcagagtttgtgtctacccctgagctggctgcccaatctgatttcatcgtcgtggcctgctccttaacacctgcaaccgagggactctgcaacaaggacttcttccagaagatgaaggaaacagctgtgttcatcaacatcagcaggggcgacgtcgtaaaccaggacgacctgtaccaggccttggccagtggtaagattgcagctgctggactggatgtgacgagcccagaaccactgcctacaaaccaccctctcctgaccctgaagaactgtgtgattctgccccacattggcagtgccacccacagaacccgcaacaccatgtccttgttggcagctaacaacttgctggctggcctgagaggggagccgatgcctagtgaactcaagctgtagccaaacagtagagatggagggccgggaagcaaaccgtgccctggtattgtcagacacacccaggcttgatttggatccacaggcagagccaagggaaggtgtgattctctgaggaaagagtgattctgatatatgtacttgtcacattggtgttggacacatttgcgccaaaagtatggtaattctattattaaataattctctgagaaa

SEQ ID NO: 301237 - DNA, 1956 bp, Homo sapiens
  misc_feature (1193)..(1193): n is a, c, g, or t
actccagcctggccccgccccggcccagctacattcccgggccagcttctgtactgccaggtccgggtcggcggctgcactgcggatgagaccggtgcgactcatgaaggtgttcgtcacccgcaggatacccgccgagggtagggtcgcgctcgcccgggcggcagactgtgaggtggagcagtgggactcggatgagcccatccctgccaaggagctagagcgaggtgtggcgggggcccacggcctgctctgcctcctctccgaccacgtggacaagaggatcctggatgctgcaggggccaatctcaaagtcatcagcaccatgtctgtgggcatcgaccacttggctttggatgaaatcaagaagcgtgggatccgagttggctacaccccagatgtcctgacagataccaccgccgaactcgcagtctccctgctacttaccacctgccgccggttgccggaggccatcgaggaagtgaagaatggtggctggacctcgtggaagcccctctggctgtgtggctatggactcacgcagagcactgtcggcatcatcgggctggggcgcataggccaggccattgctcggcgtctgaaaccattcggtgtccagagatttctgtacacagggcgccagcccaggcctgaggaagcagcggaattccaggcagagtttggtaagtgaagccttgatttccacaggagcctatctgtgcccagttgagaggctgtattttctctcaatggtggcattttcaggcagagggcaggagctccaggcatgtccaggggctgctgtctggtagatgtttaatctacctgcccctggacactggcccactcagggagcacagggacttacccaggtcctctccgagccagcagagcagtccagggctcccgtctttcagagtcctttgttaccattccccattgtgggcggagcagcggggatggtggtgggtgtgaggaagggctgggcactttcactgtcttttccttcataaactggcaagcactaccctagcctttgtgtgcgccccttagtccaggcggatccagcacctggcgggtccacagcctggtgagcagatggcaggctggatctcaagcattccccacgcccctgggcactttgggccctgaaggtagttaaagccagagtggtccagatcccactgtgtgtnatttgactttgtgcactcatgagagttgtccaggtagagactcggccttcaggaagcatcttgggagtttctgttagggagtcgggagcaaggggctggtctcccgccatctggttgtccctagcctgggactcagtgcctgatggagtcctgccctccctcagtgtctacccctgagctggctgcccaatctgatttcatcgtcgtggcctgctccttaacacctgcaaccgagggactctgcaacaaggacttcttccagaagatgaaggaaacagctgtgttcatcaacatcagcaggggcgacgtcgtaaaccaggacgacctgtaccaggccttggccagtggtaagattgcagctgctggactggatgtgacgagcccagaaccactgcctacaaaccaccctctcctgaccctgaagaactgtgtgattctgccccacattggcagtgccacccacagaacccgcaacaccatgtccttgttggcagctaacaacttgctggctggcctgagaggggagccgatgcctagtgaactcaagctgtagccaaacagtagagatggagggccgggaagcaaaccgtgccctggtattgtcagacacacccaggcttgatttggatccacaggcagagccaagggaaggtgtgattctctgaggaaagagtgattctgatatatgtacttgtcacattggtgttggacacatttgcgccaaaagtatggtaattctattattaaataattctctgagaaa

SEQ ID NO: 301238 - DNA, 2958 bp, Homo sapiens
  misc_feature (2187)..(2187): n is a, c, g, or t
cagacactgcagagggtgatgtgtggaatctaccacgtgcgccatgctgcctttctaaaggccaaacagttttaaaatctagcctgaaggtttcagatcagggatttcggcctgtatatcaagagttagagttggccgggcacggtggctcacacctgtaatcccagcactttgggaggccgaggcgggcagattgtttgagcctcaggagttggagaacagcttgggcaatgtggcaaaagtctgtctctacaaaaaatacaaaaattaggcaggcgtggtgttacacgcctgtagtcccaactactcgggaggctgaggtgggaggattgcttgaacccaggaggcagaggctgcagtgaaccgagatcatgtcactgtactccagtctgggcgacacagcaagaccctgtctccaaaaaaaaaaaaaaaaaagttgggggaagcattccatgtgcagatggagggactggcccgagtcaaggtgggaggcgtgcaaacgcaggctctcacagtgcgtggccagcagcgtgggccccggcacggggcatggagcagagtagacagtgctgagtcctgctcactgtcctgtctggggagtcatcacatctactggaggtggctcagggcaggctccatctcttgcccagggcagcagggtgggccctgtggctgtactctttgttgctgccctaaagtgccaagagaacttgttttggaatcataaatcctgagtttgcagcctgttgctctcaactcttccctggttgtgtgacctcaggcaagtcaccctttctggtttgttttcccatctgcaaaacaggatgagagccagtaaggccccttcccgccctcaagttctatgtctctggtggctttaaaggtggagtcgtttctgctgctcatctgcagtgccgagtggcagtgcctcatcccactctcagtccgtgacctggagggtgggtttataccttggaccacagtcagaggtgccgggttctcagcggcccccatcttggtccaaggctgggcctctcacctgcccctctctctcccctcagtggtggctggacctcgtggaagcccctctggctgtgtggctatggactcacgcagagcactgtcggcatcatcgggctggggcgcataggtgaggctcccaccggcccgcttgcccgccccggctctcacagcgtggtttgcatccctggcaccacgtgtctgaaggctgagaagacccacatgctgtcagggcactttgcttgcagtagagatatctctaatgagggatacagctttgtaaaacacaggcaaatacataaataaaccaaagcaggattccttaagaactcaccaggtgatagatgaagactacaaatgtgttggggccgttaggagtggttaccgtgagagagcccattcccccgacacctactccggcttgcgttctggaaggtatgtgactcacaaagccctaactcgggccggagggctcagtgggcagagttgatctgcagttctgcagatgaggcagagacacttttcttccagtggcccttatttggagaagcctggcagaagggcgtgagcctagccaagcagctatctattggtggttctctgtcatcctgcctggtgcaggggtgcgggtgagggtggagagtgtggagaacctgtctagccaacgaacagccctgcctctcactagagagttgcttggaggaacccaacagctttggggcacgttctgagcctgaaaatccaactgtacaaatctgtctcagcagcagcttacatgaaaattgtaagtttggggtgagctggcagtttggcagtgccaccaaaaagtcaaatggggtctgagactgcattcacagaagcagagggtccaggacaaaggaggggactgcttgaccaggtgtctcctttgtgaaaacctctccagttctcagaggttaggaaaaacctgagtggctttccagatggcttggaccatgtgaggacagcatcagccagtcacagtctcaggggagctgaggtgctgtctccagatccctggggcagtgtgggctggctgggggctagttacagtggggcagccagccccccacccgctttggaggagacaggagcaggcaactcgggctgtgctgatgaaaagggtctgccctgagggccgctgttccngaaatgctgggtggtgtccctaccctttgcgggactgggaacgagacatggactctccttgctctaggccaggccattgctcggcgtctgaaaccattcggtgtccagagatttctgtacacagggcgccagcccaggcctgaggaagcagcggaattccaggcagagtttgtgtctacccctgagctggctgcccaatctgatttcatcgtcgtggcctgctccttaacacctgcaaccgagggactctgcaacaaggacttcttccagaagatgaaggaaacagctgtgttcatcaacatcagcaggggcgacgtcgtaaaccaggacgacctgtaccaggccttggccagtggtaagattgcagctgctggactggatgtgacgagcccagaaccactgcctacaaaccaccctctcctgaccctgaagaactgtgtgattctgccccacattggcagtgccacccacagaacccgcaacaccatgtccttgttggcagctaacaacttgctggctggcctgagaggggagccgatgcctagtgaactcaagctgtagccaaacagtagagatggagggccgggaagcaaaccgtgccctggtattgtcagacacacccaggcttgatttggatccacaggcagagccaagggaaggtgtgattctctgaggaaagagtgattctgatatatgtacttgtcacattggtgttggacacatttgcgccaaaagtatggtaattctattattaaataattctctgagaaa

SEQ ID NO: 301239 - DNA, 2643 bp, Homo sapiens
actccagcctggccccgccccggcccagctacattcccgggccagcttctgtactgccaggtccgggtcggcggctgcactgcggatgagaccggtgcgactcatgaaggtgttcgtcacccgcaggatacccgccgagggtagggtcgcgctcgcccgggcggcagactgtgaggtggagcagtgggactcggatgagcccatccctgccaaggagctagagcgaggtgtggcgggggcccacggcctgctctgcctcctctccgaccacgtggacaagaggatcctggatgctgcaggggccaatctcaaagtcatcagcaccatgtctgtgggcatcgaccacttggctttggatgaaatcaagaagcgtgggatccgagttggctacaccccagatgtcctgacagataccaccgccgaactcgcagtctccctgctacttaccacctgccgccggttgccggaggccatcgaggaagtgaagaatggtggctggacctcgtggaagcccctctggctgtgtggctatggactcacgcagagcactgtcggcatcatcgggctggggcgcataggccaggccattgctcggcgtctgaaaccattcggtgtccagagatttctgtacacagggcgccagcccaggcctgaggaagcagcggaattccaggcagagtttgtgtctacccctgagctggctgcccaatctgatttcatcgtcgtggcctgctccttaacacctgcaaccgagggactctgcaacaaggacttcttccagaagatgaaggaaacagctgtgttcatcaacatcagcaggtatcctagggccaccttacccagcaagcctggagaggagccatccccactgctgccatctggagattttcttccccgtgggttgttggtgagaccccaggctgagcttgctggtttccataaaccaaacaaccaactcagaaattcgtgggaatacacgagacctccgtacagggaagaagagccgtcagagtgggcctggcctgtctgcttctcagcagtggcccccacccggcggggcctggcacacagcagcgtggcttcagggagtgttcccagggagcctctgcaggcccattatcctccaccacaaagggctggacttgaggatctgaagggccctctggaggccgcctcccacactgctgagcctggctttgtctggctgtggttcagtgatactttgaaccttatgctcctgggcggacagaccctaaaactcacgtggtcgtagctcctcacactgtccctaggggtgccttcaggccactgggcatgtatggaggtcagaccttccttctctgccactccaagcccttcctagctggtgccccttgagcctgtttacatcagtttaggggaagggggattgggtgaggtcatcctgaggactcgtccaccccaaaggtacctgtaattaccaacatttagctacaaaacaggtgacctgggaatggaagagtgaaacatgcaggaccacagggctcgcactgctggctggcagcagtcacagctgccgtgtactgggtgcctgcgtgtacccaggacagcccaggaccgtgtattactcattagtgcacaagtattacttagtgcacaatatacagtctctagaagatgacttcttgccttcagtcgccgctccctttgatggctgtggttaggggtgtgctcgttcctctgccctggtttagacaggtacctgatagcacactgtggtgcttctcagtgggggtctgggggtcaaccagatcagaaacacttggatggggcctaacacagatgcccttctgggccctgttcatgcagtagagcatgtaagaaagctttaatcctcccaacatgcctgggagttaggtggtattctccttatctcacagagtagataatttgagacacagataattcgaggcacagagaatttgagacacttgcccaaggtcacacagctagaaggaggcagggctggagttctctgagtatataagacttacagacatactgtaagtatacctaagacttactgctttaaaagtcagtgccaagtgagtggaaaaattcattctgtaggttgttctgcctcaaaggtggcctgggcggagggatcttcggggtacccatgtcaccactgtcattcccaggggcgacgtcgtaaaccaggacgacctgtaccaggccttggccagtggtaagattgcagctgctggactggatgtgacgagcccagaaccactgcctacaaaccaccctctcctgaccctgaagaactgtgtgattctgccccacattggcagtgccacccacagaacccgcaacaccatgtccttgttggcagctaacaacttgctggctggcctgagaggggagccgatgcctagtgaactcaagctgtagccaaacagtagagatggagggccgggaagcaaaccgtgccctggtattgtcagacacacccaggcttgatttggatccacaggcagagccaagggaaggtgtgattctctgaggaaagagtgattctgatatatgtacttgtcacattggtgttggacacatttgcgccaaaagtatggtaattctattattaaataattctctgagaaa

SEQ ID NO: 301240 - DNA, 1268 bp, Homo sapiens
actccagcctggccccgccccggcccagctacattcccgggccagcttctgtactgccaggtccgggtcggcggctgcactgcggatgagaccggtgcgactcatgaaggtgttcgtcacccgcaggatacccgccgagggtagggtcgcgctcgcccgggcggcagactgtgaggtggagcagtgggactcggatgagcccatccctgccaaggagctagagcgaggtgtggcgggggcccacggcctgctctgcctcctctccgaccacgtggacaagaggatcctggatgctgcaggggccaatctcaaagtcatcagcaccatgtctgtgggcatcgaccacttggctttggatgaaatcaagaagcgtgggatccgagttggctacaccccagatgtcctgacagataccaccgccgaactcgcagtctccctgctacttaccacctgccgccggttgccggaggccatcgaggaagtgaagaatggtggctggacctcgtggaagcccctctggctgtgtggctatggactcacgcagagcactgtcggcatcatcgggctggggcgcataggccaggccattgctcggcgtctgaaaccattcggtgtccagagatttctgtacacagggcgccagcccaggcctgaggaagcagcggaattccaggcagagtttgtgtctacccctgagctggctgcccaatctgatttcatcgtcgtggcctgctccttaacacctgcaaccgagggactctgcaacaaggacttcttccagaagatgaaggaaacagctgtgttcatcaacatcagcaggggcgacgtcgtaaaccaggacgacctgtaccaggccttggccagtggtaagattgcagctgctggactggatgtgacgagcccagaaccactgcctacaaaccaccctctcctgaccctgaagaactgtggtaagaactgcactttctgatgcaaactccctgctgccctgcaggaccagtgtttttgagggggtcccaaggggccgggtgtggagctagtgtgagcaggtgttgaacccaaagggacacaccagggaccgtaaatgtttatgttgtcagtgacatgggtgtatgacaggagcagtcctcttgcgcatgctctgctgggtctctgtccctaaaggaacagaatgtaggtgtgagtggatttgtttaaaaaaaaagagtgggccaggcgtggttgtccgggccagtctctgcccttaatttggattctggaatggaaac

SEQ ID NO: 301241 - DNA, 1182 bp, Homo sapiens
actccagcctggccccgccccggcccagctacattcccgggccagcttctgtactgccaggtccgggtcggcggctgcactgcggatgagaccggtgcgactcatgaaggtgttcgtcacccgcaggatacccgccgagggtagggtcgcgctcgcccgggcggcagactgtgaggtggagcagtgggactcggatgagcccatccctgccaaggagctagagcgaggtgtggcgggggcccacggcctgctctgcctcctctccgaccacgtggacaagaggatcctggatgctgcaggggccaatctcaaagtcatcagcaccatgtctgtgggcatcgaccacttggctttggatgaaatcaagaagcgtgggatccgagttggctacaccccagatgtcctgacagataccaccgccgaactcgcagtctccctgctacttaccacctgccgccggttgccggaggccatcgaggaagtgaagaatggtggctggacctcgtggaagcccctctggctgtgtggctatggactcacgcagagcactgtcggcatcatcgggctggggcgcataggccaggccattgctcggcgtctgaaaccattcggtgtccagagatttctgtacacagggcgccagcccaggcctgaggaagcagcaacaaggacttcttccagaagatgaaggaaacagctgtgttcatcaacatcagcaggggcgacgtcgtaaaccaggacgacctgtaccaggccttggccagtggtaagattgcagctgctggactggatgtgacgagcccagaaccactgcctacaaaccaccctctcctgaccctgaagaactgtgtgattctgccccacattggcagtgccacccacagaacccgcaacaccatgtccttgttggcagctaacaacttgctggctggcctgagaggggagccgatgcctagtgaactcaagctgtagccaaacagtagagatggagggccgggaagcaaaccgtgccctggtattgtcagacacacccaggcttgatttggatccacaggcagagccaagggaaggtgtgattctctgaggaaagagtgattctgatatatgtacttgtcacattggtgttggacacatttgcgccaaaagtatggtaattctattattaaataattctctgagaaa

SEQ ID NO: 301242 - DNA, 1024 bp, Homo sapiens
actccagcctggccccgccccggcccagctacattcccgggccagcttctgtactgccaggtccgggtcggcggctgcactgcggatgagaccggtgcgactcatgaaggtgttcgtcacccgcaggatacccgccgagggtagggtcgcgctcgcccgggcggcagactgtgaggtggagcagtgggactcggatgagcccatccctgccaaggagctagagcgaggtgtggcgggggcccacggcctgctctgcctcctctccgaccacgtggacaagaggatcctggatgctgcaggggccaatctcaaagtcatcagcaccatgtctgtgggcatcgaccacttggctttggatgaaatcaagaagcgtgggatccgagttggctacaccccagatgtcctgacagataccaccgccgaactcgcagtctccctgctacttaccacctgccgccggttgccggaggccatcgaggaagtgaagaatggtggctggacctcgtggaagcccctctggctgtgtggctatggactcacgcagagcactgtcggcatcatcgggctggggcgcataggccaggccattgctcggcgtctgaaaccattcggtgtccagagatttctgtacacagggcgccagcccaggcctgaggaagcagcggaattccaggcagagtttgtgtctacccctgagctggctgcccaatctgatttcatcgtcgtggcctgctccttaacacctgcaaccgagggactctgcaacaaggacttcttccagaagatgaaggaaacagctgtgttcatcaacatcagcaggggcgacgtcgtaaaccaggacgacctgtaccaggccttggccagtggtaagattgcagctgctggactggatgtgacgagcccagagggaaggtgtgattctctgaggaaagagtgattctgatatatgtacttgtcacattggtgttggacacatttgcgccaaaagtatggtaattctattattaaataattctctgagaaa

SEQ ID NO: 301243 - DNA, 1005 bp, Homo sapiens
actccagcctggccccgccccggcccagctacattcccgggccagcttctgtactgccaggtccgggtcggcggctgcactgcggatgagaccggtgcgactcatgaaggtgttcgtcacccgcaggatacccgccgagggtagggtcgcgctcgcccgggcggcagactgtgaggtggagcagtgggactcggatgagcccatccctgccaaggagctagagcgaggtgtggcgggggcccacggcctgctctgcctcctctccgaccacgtggacaagaggatcctggatgctgcaggggccaatctcaaagtcatcagcaccatgtctgtgggcatcgaccacttggctttggatgaaatcaagaagcgtgggatccgagttggctacaccccagatgtcctgacagataccaccgccgaactcgcagtctccctgctacttaccacctgccgccggttgccggaggccatcgaggaagtgaagaatggtggctggacctcgtggaagcccctctggctgtgtggctatggactcacgcagagcactgtcggcatcatcgggctggggcgcataggccaggccattgctcggcgtctgaaaccattcggtgtccagagatttctgtacacagggcgccagcccaggcctgaggaagcagcggaattccaggcagagtttgtgtctacccctgagctggctgcccaatctgatttcatcgtcgtggcctgctccttaacacctgcaaccgagggactctgcaacaaggacttcttccagaagatgaaggaaacagctgtgttcatcaacatcagcaggggcgacgtcgtaaaccaggacgacctgtaccaggccttggccagtggtaagattgcagctgctggactggatgtgacgagcccagactcctgggttcaagcgattctcctgcctcagcttcccgagtagctgggattacaggcgtgtaccaccatactacagttcttcagggtcaggagagggtc

SEQ ID NO: 301244 - DNA, 3068 bp, Homo sapiens
actccagcctggccccgccccggcccagctacattcccgggccagcttctgtactgccaggtccgggtcggcggctgcactgcggatgagaccggtgcgactcatgaaggtgttcgtcacccgcaggatacccgccgagggtagggtcgcgctcgcccgggcggcagactgtgaggtggagcagtgggactcggatgagcccatccctgccaaggagctagagcgaggtgtggcgggggcccacggcctgctctgcctcctctccgaccacgtggacaagaggatcctggatgctgcaggggccaatctcaaagtcatcagcaccatgtctgtgggcatcgaccacttggctttggatgaaatcaagaagcgtgggatccgagttggctacaccccagatgtcctgacagataccaccgccgaactcgcagtctccctgctacttaccacctgccgccggttgccggaggccatcgaggaagtgaagaatggtggctggacctcgtggaagcccctctggctgtgtggctatggactcacgcagagcactgtcggcatcatcgggctggggcgcataggccaggccattgctcggcgtctgaaaccattcggtgtccagagatttctgtacacagggcgccagcccaggcctgaggaagcagcggaattccaggcagagtttgtgtctacccctgagctggctgcccaatctgatttcatcgtcgtggcctgctccttaacacctgcaaccgagggactctgcaacaaggacttcttccagaagatgaaggaaacagctgtgttcatcaacatcagcaggtatcctagggccaccttacccagcaagcctggagaggagccatccccactgctgccatctggagattttcttccccgtgggttgttggtgagaccccaggctgagcttgctggtttccataaaccaaacaaccaactcagaaattcgtgggaatacacgagacctccgtacagggaagaagagccgtcagagtgggcctggcctgtctgcttctcagcagtggcccccacccggcggggcctggcacacagcagcgtggcttcagggagtgttcccagggagcctctgcaggcccattatcctccaccacaaagggctggacttgaggatctgaagggccctctggaggccgcctcccacactgctgagcctggctttgtctggctgtggttcagtgatactttgaaccttatgctcctgggcggacagaccctaaaactcacgtggtcgtagctcctcacactgtccctaggggtgccttcaggccactgggcatgtatggaggtcagaccttccttctctgccactccaagcccttcctagctggtgccccttgagcctgtttacatcagtttaggggaagggggattgggtgaggtcatcctgaggactcgtccaccccaaaggtacctgtaattaccaacatttagctacaaaacaggtgacctgggaatggaagagtgaaacatgcaggaccacagggctcgcactgctggctggcagcagtcacagctgccgtgtactgggtgcctgcgtgtacccaggacagcccaggaccgtgtattactcattagtgcacaagtattacttagtgcacaatatacagtctctagaagatgacttcttgccttcagtcgccgctccctttgatggctgtggttaggggtgtgctcgttcctctgccctggtttagacaggtacctgatagcacactgtggtgcttctcagtgggggtctgggggtcaaccagatcagaaacacttggatggggcctaacacagatgcccttctgggccctgttcatgcagtagagcatgtaagaaagctttaatcctcccaacatgcctgggagttaggtggtattctccttatctcacagagtagataatttgagacacagataattcgaggcacagagaatttgagacacttgcccaaggtcacacagctagaaggaggcagggctggagttctctgagtatataagacttacagacatactgtaagtatacctaagacttactgctttaaaagtcagtgccaagtgagtggaaaaattcattctgtaggttgttctgcctcaaaggtggcctgggcggagggatcttcggggtacccatgtcaccactgtcattcccaggggcgacgtcgtaaaccaggacgacctgtaccaggccttggccagtggtaagattgcagctgctggactggatgtgacgagcccagaaccactgcctacaaaccaccctctcctgaccctgaagaactgtgtgattctgccccacattggcagtgccacccacagaacccgcaacaccatgtccttgttggcagctaacaacttgctggctggcctgagaggggagccgatgcctagtgaactcaagctgtagccaaacagtagagatggagggccgggaagcaaaccgtgccctggtattgtcagacacacccaggcttgatttggatccacaggcagagccaagggaaggtgtgattctctgaggaaagagtgattctgatatatgtacttgtcacattggtgttggacacatttgcgccaaaagtatggtaattctattattaaataattctctgagaaaaaaaaaaaaaaaaaaaaaaaaaaaaaaaaaaaaaaaaaaaaaaaaaaaaaaaaaaaaaaaaaaaaaaaaaaaaaaaacctgtgtgcgcggcgcgcccgccgcgcgcgccccgaaaaaacttaaaacaccaccgggggggcggcgcgggccaccacaggacgagaacagaagagaacgaggggcataacacgaggtgcttccaagagagaacatctgggaggcacaacaagacagggggaggggtgactctctccacaaagagaataaaaaaagcgcggcgggtgagacaacaacgacgagggtagtaagaaaaaaacaacaaacagagggggtcttcggagggaggaactcaacggggggggttactaccacagcgaggggcccacaagagagggggcgcaaaacaagaaaggccgccgccgggg

SEQ ID NO: 301245 - DNA, 1093 bp, Homo sapiens
actccagcctggccccgccccggcccagctacattcccgggccagcttctgtactgccaggtccgggtcggcggctgcactgcggatgagaccggtgcgactcatgaaggtgttcgtcacccgcaggatacccgccgagggtagggtcgcgctcgcccgggcggcagactgtgaggtggagcagtgggactcggatgagcccatccctgccaaggagctagagcgaggtgtggcgggggcccacggcctgctctgcctcctctccgaccacgtggacaagaggatcctggatgctgcaggggccaatctcaaagtcatcagcaccatgtctgtgggcatcgaccacttggctttggatgaaatcaagaagcgtgggatccgagttggctacaccccagatgtcctgacagataccaccgccgaactcgcagtctccctgctacttaccacctgccgccggttgccggaggccatcgaggaagtgaagaatggtggctggacctcgtggaagcccctctggctgtgtggctatggactcacgcagagcactgtcggcatcatcgggctggggcgcataggccaggccattgctcggcgtctgaaaccattcggtgtccagagatttctgtacacagggcgccagcccaggcctgaggaagcagcggaattccaggcagagtttgtgtctacccctgagctggctgcccaatctgatttcatcgtcgtggcctgctccttaacacctgcaaccgagggactctgcaacaaggacttcttccagaagatgaaggaaacagctgtgttcatcaacatcagcaggggcgacgtcgtaaaccaggacgacctgagaggggagccgatgcctagtgaactcaagctgtagccaaacagtagagatggagggccgggaagcaaaccgtgccctggtattgtcagacacacccaggcttgatttggatccacaggcagagccaagggaaggtgtgattctctgaggaaagagtgattctgatatatgtacttgtcacattggtgttggacacatttgcgccaaaagtatggtaattctattattaaataattctctgagaaa

SEQ ID NO: 301246 - DNA, 2622 bp, Homo sapiens
actccagcctggccccgccccggcccagctacattcccgggccagcttctgtactgccaggtccgggtcggcggctgcactgcggatgagaccggtgcgactcatgaaggtgttcgtcacccgcaggatacccgccgagggtagggtcgcgctcgcccgggcggcagactgtgaggtggagcagtgggactcggatgagcccatccctgccaaggagctagagcgaggtgtggcgggggcccacggcctgctctgcctcctctccgaccacgtggacaagaggatcctggatgctgcaggggccaatctcaaagtcatcagcaccatgtctgtgggcatcgaccacttggctttggatgaaatcaagaagcgtgggatccgagttggctacaccccagatgtcctgacagataccaccgccgaactcgcagtctccctgctacttaccacctgccgccggttgccggaggccatcgaggaagtgaagaatggtggctggacctcgtggaagcccctctggctgtgtggctatggactcacgcagagcactgtcggcatcatcgggctggggcgcataggccaggccattgctcggcgtctgaaaccattcggtgtccagagatttctgtacacagggcgccagcccaggcctgaggaagcagcggaattccaggcagagtttgtgtctacccctgagctggctgcccaatctgatttcatcgtcgtggcctgctccttaacacctgcaaccgagggactctgcaacaaggacttcttccagaagatgaaggaaacagctgtgttcatcaacatcagcaggtatcctagggccaccttacccagcaagcctggagaggagccatccccactgctgccatctggagattttcttccccgtgggttgttggtgagaccccaggctgagcttgctggtttccataaaccaaacaaccaactcagaaattcgtgggaatacacgagacctccgtacagggaagaagagccgtcagagtgggcctggcctgtctgcttctcagcagtggcccccacccggcggggcctggcacacagcagcgtggcttcagggagtgttcccagggagcctctgcaggcccattatcctccaccacaaagggctggacttgaggatctgaagggccctctggaggccgcctcccacactgctgagcctggctttgtctggctgtggttcagtgatactttgaaccttatgctcctgggcggacagaccctaaaactcacgtggtcgtagctcctcacactgtccctaggggtgccttcaggccactgggcatgtatggaggtcagaccttccttctctgccactccaagcccttcctagctggtgccccttgagcctgtttacatcagtttaggggaagggggattgggtgaggtcatcctgaggactcgtccaccccaaaggtacctgtaattaccaacatttagctacaaaacaggtgacctgggaatggaagagtgaaacatgcaggaccacagggctcgcactgctggctggcagcagtcacagctgccgtgtactgggtgcctgcgtgtacccaggacagcccaggaccgtgtattactcattagtgcacaagtattacttagtgcacaatatacagtctctagaagatgacttcttgccttcagtcgccgctccctttgatggctgtggttaggggtgtgctcgttcctctgccctggtttagacaggtacctgatagcacactgtggtgcttctcagtgggggtctgggggtcaaccagatcagaaacacttggatggggcctaacacagatgcccttctgggccctgttcatgcagtagagcatgtaagaaagctttaatcctcccaacatgcctgggagttaggtggtattctccttatctcacagagtagataatttgagacacagataattcgaggcacagagaatttgagacacttgcccaaggtcacacagctagaaggaggcagggctggagttctctgagtatataagacttacagacatactgtaagtatacctaagacttactgctttaaaagtcagtgccaagtgagtggaaaaattcattctgtaggttgttctgcctcaaaggtggcctgggcggagggatcttcggggtacccatgtcaccactgtcattcccaggggcgacgtcgtaaaccaggacgacctgtaccaggccttggccagtggtaagattgcagctgctggactggatgtgacgagcccagaaccactgcctacaaaccaccctctcctgaccctgaagaactgtgtgattctgccccacattggcagtgccacccacagaacccgcaacaccatgtccttgttggcagctaacaacttgctggctggcctgagaggggagccgatgcctagtgaactcaagctgtagccaaacagtagagatggagggccgggaagcaaaccgtgccctggtattgtcagacacacccaggcttgatttggatccacaggcagagccaagggaaggtgtgattctctgaggaaagagtgattctgatatatgtacttgtcacattggtgttggacacattgacgaggttgattaatttttcctccg

SEQ ID NO: 301247 - DNA, 2322 bp, Homo sapiens
actccagcctggccccgccccggcccagctacattcccgggccagcttctgtactgccaggtccgggtcggcggctgcactgcggatgagaccggtgcgactcatgaaggtgttcgtcacccgcaggatacccgccgagggtagggtcgcgctcgcccgggcggcagatggtggctggacctcgtggaagcccctctggctgtgtggctatggactcacgcagagcactgtcggcatcatcgggctggggcgcataggccaggccattgctcggcgtctgaaaccattcggtgtccagagatttctgtacacagggcgccagcccaggcctgaggaagcagcggaattccaggcagagtttgtgtctacccctgagctggctgcccaatctgatttcatcgtcgtggcctgctccttaacacctgcaaccgagggactctgcaacaaggacttcttccagaagatgaaggaaacagctgtgttcatcaacatcagcaggtatcctagggccaccttacccagcaagcctggagaggagccatccccactgctgccatctggagattttcttccccgtgggttgttggtgagaccccaggctgagcttgctggtttccataaaccaaacaaccaactcagaaattcgtgggaatacacgagacctccgtacagggaagaagagccgtcagagtgggcctggcctgtctgcttctcagcagtggcccccacccggcggggcctggcacacagcagcgtggcttcagggagtgttcccagggagcctctgcaggcccattatcctccaccacaaagggctggacttgaggatctgaagggccctctggaggccgcctcccacactgctgagcctggctttgtctggctgtggttcagtgatactttgaaccttatgctcctgggcggacagaccctaaaactcacgtggtcgtagctcctcacactgtccctaggggtgccttcaggccactgggcatgtatggaggtcagaccttccttctctgccactccaagcccttcctagctggtgccccttgagcctgtttacatcagtttaggggaagggggattgggtgaggtcatcctgaggactcgtccaccccaaaggtacctgtaattaccaacatttagctacaaaacaggtgacctgggaatggaagagtgaaacatgcaggaccacagggctcgcactgctggctggcagcagtcacagctgccgtgtactgggtgcctgcgtgtacccaggacagcccaggaccgtgtattactcattagtgcacaagtattacttagtgcacaatatacagtctctagaagatgacttcttgccttcagtcgccgctccctttgatggctgtggttaggggtgtgctcgttcctctgccctggtttagacaggtacctgatagcacactgtggtgcttctcagtgggggtctgggggtcaaccagatcagaaacacttggatggggcctaacacagatgcccttctgggccctgttcatgcagtagagcatgtaagaaagctttaatcctcccaacatgcctgggagttaggtggtattctccttatctcacagagtagataatttgagacacagataattcgaggcacagagaatttgagacacttgcccaaggtcacacagctagaaggaggcagggctggagttctctgagtatataagacttacagacatactgtaagtatacctaagacttactgctttaaaagtcagtgccaagtgagtggaaaaattcattctgtaggttgttctgcctcaaaggtggcctgggcggagggatcttcggggtacccatgtcaccactgtcattcccaggggcgacgtcgtaaaccaggacgacctgtaccaggccttggccagtggtaagattgcagctgctggactggatgtgacgagcccagaaccactgcctacaaaccaccctctcctgaccctgaagaactgtgtgattctgccccacattggcagtgccacccacagaacccgcaacaccatgtccttgttggcagctaacaacttgctggctggcctgagaggggagccgatgcctagtgaactcaagctgtagccaaacagtagagatggagggccgggaagcaaaccgtgccctggtattgtcagacacacccaggcttgatttggatccacaggcagagccaagggaaggtgtgattctctgaggaaagagtgattctgatatatgtacttgtcacattggtgttggacacatttgcgccaaaagtatggtaattctattattaaataattctctgagaaa

SEQ ID NO: 301248 - DNA, 1000 bp, Homo sapiens
actccagcctggccccgccccggcccagctacattcccgggccagcttctgtactgccaggtccgggtcggcggctgcactgcggatgagaccggtgcgactcatgaaggtgttcgtcacccgcaggatacccgccgagggtagggtcgcgctcgcccgggcggcagactgtgaggtggagcagtgggactcggatgagcccatccctgccaaggagctagagcgaggtgtggcgggggcccacggcctgctctgcctcctctccgaccacgtggacaagaggatcctggatgctgcaggggccaatctcaaagtcatcagcaccatgtctgtgggcatcgaccacttggctttggatgaaatcaagaagcgtgggatccgagttggctacaccccagatgtcctgacagataccaccgccgaactcgcagtctccctgctacttaccacctgccgccggttgccggaggccatcgaggaagtgaagaatggtggctggacctcgtggaagcccctctggctgtgtggctatggactcacgcagagcactgtcggcatcatcgggctggggcgcataggccaggccattgctcggcgtctgaaaccattcggtgtccagagatttctgtacacagggcgccagcccaggcctgaggaagcagcggaattccaggcagagtttgtgtctacccctgagctggctgcccaatctgatttcatcgtcgtggcctgctccttaacacctgcaaccgagggactctgcaacaaggacttcttccagaagatgtagccaaacagtagagatggagggccgggaagcaaaccgtgccctggtattgtcagacacacccaggcttgatttggatccacaggcagagccaagggaaggtgtgattctctgaggaaagagtgattctgatatatgtacttgtcacattggtgttggacacatttgcgccaaaagtatggtaattctattattaaataattctctgagaaa

SEQ ID NO: 301249 - DNA, 1075 bp, Homo sapiens
actccagcctggccccgccccggcccagctacattcccgggccagcttctgtactgccaggtccgggtcggcggctgcactgcggatgagaccggtgcgactcatgaaggtgttcgtcacccgcaggatacccgccgagggtagggtcgcgctcgcccgggcggcagactgtgaggtggagcagtgggactcggatgagcccatccctgccaaggagctagagcgaggtgtggcgggggcccacggcctgctctgcctcctctccgaccacgtggacaagaggatcctggatgctgcaggggccaatctcaaagtcatcagcaccatgtctgtgggcatcgaccacttggctttggatgaaatcaagaagcgtgggatccgagttggctacaccccagatgtcctgacagataccaccgccgaactcgcagtctccctgctacttaccacctgccgccggttgccggaggccatcgaggaagtgaagaatggtggctggacctcgtggaagcccctctggctgtgtggctatggactcacgcagagcactgtcggcatcatcgggctggggcgcataggccaggccattgctcggcgtctgaaaccattcggtgtccagagatttctgtacacagggcgccagcccaggcctgaggaagcagcggaattccaggcagagtttgtgtctacccctgagctggctgcccaatctgatttcatcgtcgtggcctgctccttaacactgattctgccccacattggcagtgccacccacagaacccgcaacaccatgtccttgttggcagctaacaacttgctggctggcctgagaggggagccgatgcctagtgaactcaagctgtagccaaacagtagagatggagggccgggaagcaaaccgtgccctggtattgtcagacacacccaggcttgatttggatccacaggcagagccaagggaaggtgtgattctctgaggaaagagtgattctgatatatgtacttgtcacattggtgttggacacatttgcgccaaaagtatggtaattctattattaaataattctctgagaaa

SEQ ID NO: 301250 - DNA, 2601 bp, Homo sapiens
  misc_feature (1670)..(1670): n is a, c, g, or t
actccagcctggccccgccccggcccagctacattcccgggccagcttctgtactgccaggtccgggtcggcggctgcactgcggatgagaccggtgcgactcatgaaggtgttcgtcacccgcaggatacccgccgagggtagggtcgcgctcgcccgggcggcagactgtgaggtggagcagtgggactcggatgagcccatccctgccaaggagctagagcgaggtgtggcgggggcccacggcctgctctgcctcctctccgaccacgtggacaagaggatcctggatgctgcaggggccaatctcaaagtcatcagcaccatgtctgtgggcatcgaccacttggctttggatgaaatcaagaagcgtgggatccgagttggctacaccccagatgtcctgacagataccaccgccgaactcgcagtctccctgctacttaccacctgccgccggttgccggaggccatcgaggaagtgaagaatggtggctggacctcgtggaagcccctctggctgtgtggctatggactcacgcagagcactgtcggcatcatcgggctggggcgcataggtgaggctcccaccggcccgcttgcccgccccggctctcacagcgtggtttgcatccctggcaccacgtgtctgaaggctgagaagacccacatgctgtcagggcactttgcttgcagtagagatatctctaatgagggatacagctttgtaaaacacaggcaaatacataaataaaccaaagcaggattccttaagaactcaccaggtgataaaagcaagttgcctaagggtcagggggcttcatgattccggctccataaagaacagatgaagactacaaatgtgttggggccgttaggagtggttaccgtgagagagcccattcccccgacacctactccggcttgcgttctggaaggtatgtgactcacaaagccctaactcgggccggagggctcagtgggcagagttgatctgcagttctgcagatgaggcagagacacttttcttccagtggcccttatttggagaagcctggcagaagggcgtgagcctagccaagcagctatctattggtggttctctgtcatcctgcctggtgcaggggtgcgggtgagggtggagagtgtggagaacctgtctagccaacgaacagccctgcctctcactagagagttgcttggaggaacccaacagctttggggcacgttctgagcctgaaaatccaactgtacaaatctgtctcagcagcagcttacatgaaaattgtaagtttggggtgagctggcagtttggcagtgccaccaaaaagtcaaatggggtctgagactgcattcacagaagcagagggtccaggacaaaggaggggactgcttgaccaggtgtctcctttgtgaaaacctctccagttctcagaggttaggaaaaacctgagtggctttccagatggcttggaccatgtgaggacagcatcagccagtcacagtctcaggggagctgaggtgctgtctccagatccctggggcagtgtgggctggctgggggctagttacagtggggcagccagccccccacccgctttggaggagacaggagcaggcaactcgggctgtgctgatgaaaagggtctgccctgagggccgctgttccngaaatgctgggtggtgtccctaccctttgcgggactgggaacgagacatggactctccttgctctaggccaggccattgctcggcgtctgaaaccattcggtgtccagagatttctgtacacagggcgccagcccaggcctgaggaagcagcggaattccaggcagagtttgtgtctacccctgagctggctgcccaatctgatttcatcgtcgtggcctgctccttaacacctgcaaccgagggactctgcaacaaggacttcttccagaagatgaaggaaacagctgtgttcatcaacatcagcaggtatcctagggccaccttacccagcaagcctggagaggagccatccccactgctgccatctggagattttcttccccgtgggttgttggtgagaccccaggctgagcttgctggtttccataaaccaaacaaccaactcagaaattcgtgggaatacacgagacctccgtacagggaagaagagccgtcagagtgggcctggcctgtctgcttctcagcagtggcccccacccggcggggcctggcacacagcagcgtggcttcagggagtgttcccagggagcctctgcaggcccattatcctccaccacaaagggctggacttgaggatctgaagggccctctggaggccgcctcccacactgctgagcctggctttgtctggctgtggttcagtgatactttgaaccttatgctcctgggcggacagaccctaaaactcacgtggtcgtagctcctcacactgtccctaggggtgccttcaggccactgggcatgtatggaggggaaggtgtgattctctgaggaaagagtgattctgatatatgtacttgtcacattggtgttggacacatttgcgccaaaagtatggtaattctattattaaataattctctgagaaa

SEQ ID NO: 301251 - DNA, 795 bp, Homo sapiens
actccagcctggccccgccccggcccagctacattcccgggccagcttctgtactgccaggtccgggtcggcggctgcactgcggatgagaccggtgcgactcatgaaggtgttcgtcacccgcaggatacccgccgagggtagggtcgcgctcgcccgggcggcagactgtgaggtggagcagtgggactcggatgagcccatccctgccaaggagctagagcgaggtgtggcgggggcccacggcctgctctgcctcctctccgaccacgtggacaagaggatcctggatgctgcaggggccaatctcaaagtcatcagcaccatgtctgtgggcatcgaccacttggctttggatgaaatcaagaagcgtgggatccgagttggctacaccccagatgtcctgacagataccaccgccgaactcgcagtctccctgctacttaccacctgccgccggttgccggaggccatcgaggaagtgaagaagtaagtgaacgcagaccaggtgcggtggctcacggctgtaatcccagcactttgggaggccaaagtgagcggatcatgaggttaggagttcgagaccagtctggccaacatagtgaaaccccgtctctagtaaaaatacaaaaaaaattagctgggtgtggtggtgggtccctgtaatcccagctacttgggaggctgaggcaggagaatcatgtgaacccaggagacagaggttgcagtgagctgagatcacaccattgcactccagcccaggtgacggtgtgagactctgtctcaaaaaaaaaa

SEQ ID NO: 301252 - DNA, 1311 bp, Homo sapiens
actccagcctggccccgccccggcccagctacattcccgggccagcttctgtactgccaggtccgggtcggcggctgcactgcggatgagaccggtgcgactcatgaaggtgttcgtcacccgcaggatacccgccgaggctgtgaggtggagcagtgggactcggatgagcccatccctgccaaggagctagagcgaggtgtggcgggggcccacggcctgctctgcctcctctccgaccacgtggacaagaggatcctggatgctgcaggggccaatctcaaagtcatcagcaccatgtctgtgggcatcgaccacttggctttggatgaaatcaagaagcggtaactgcagcttgggatctggagggggcctagagagaggggtggctatgagagaaagaagagctgttgatttgtttttactgcatatccctcggccattcagggagaatgtgaggtggctgatgatagaatctgtccacatgtgcacaggtcagttacaataaaccccagcagtcagaaacagtgggtaacttctgtgtaggtggcaccctttcacattcattatcttttttgatccccacaacaataccttgaagtagcaaaggcaggtgttattctttctgtttcagatgaggaaattcagaaaggttaagttacttgttcagtccctgaaccctgatcttccatcttcatatccttccaaagtgggagataatctaaataggaatgaggactgcccgtttttgagtgctcatttatagttctgagcttcctggcaggcagatcaaagagggagcaaagtaactccatggaaatgtcccagcagtagacattggtaaatatggttgaggctgatgttaccacccagatgtctgattcgtagtgggatccgagttggctacaccccagatgtcctgacagataccaccgccgaactcgcagtctccctgctacttaccacctgccgccggttgccggaggccatcgaggaagtgaagaagtaagtgaacgcagaccaggtgcggtggctcacggctgtaatcccagcactttgggaggccaaagtgagcggatcatgaggttaggagttcgagaccagtctggccaacatagtgaaaccccgtctctagtaaaaatacaaaaaaaattagctgggtgtggtggtgggtccctgtaatcccagctacttgggaggctgaggcaggagaatcatgtgaacccaggagacagaggttgcagtgagctgagatcacaccattgcactccagcccaggtgacggtgtgagactctgtctcaaaaaaaaaa

SEQ ID NO: 301253 - DNA, 133 bp, Homo sapiens
atgacaggagcagtcctcttgcgcatgctctgctgggtctctgtccctaaaggaacagaatgtaggtgtgagtggatttgtttaaaaaaaaagagtgggccaggcgtggtggctcatgcctgtaatcccagca

SEQ ID NO: 301254 - DNA, 414 bp, Homo sapiens
ttctagtaataacacagaagtgattattaccagacaagcatcagtgaagtatactgccttgtctggtaataatcacttctgtgttataatggaaggttttttgtgatgtatgaaacttgtgttttttatatataaatgagtatagttagtgttgtggtaatgcctgttttcatctgtaaatagttaagtatgtacacgaggcactacttctgatttattgcaatgttcagtcctagtttttacttttattcttaaagcattcagttttgctttcaattttatgtaccttagttctgagttagacctgcagatgtgtacagatagttcatatttatgtattgcacataatcatgctattcagcattgatgctatattgtattatgtaaataataaaagccatgtacagagggaaa

SEQ ID NO: 301255 - DNA, 1520 bp, Homo sapiens
agatgtggccaaagaaatggctgacaccctccctctaccccatacaactattcccctagattattctttatcctcatgacatcaggataaacattaatgttgtcacagtagcagtaggtagaatattgttcgtttagtctaatattaggctatttctcccagtagattcattgctaatgcaattgaattataaatttgggcagagttttagagaaaattgccattaaatcaatcagcttgttgtaggagcttgtctatatgctaatagcattggtgctggcatatttgggcagtaatttcagcattgcatacataaatttgctattgttacatttggattaatattaaaacctgagtttatagtgtttcaggtgtagttgaattatatgtaagtagatataaattttgttatttttgtgttaaagaactagtggcagtgtgggctttagtacagtaatgtattttttgttcattgtgagaaattttattgatgccatgtgtacactgaaacttaaagcctttttaggtggagaaacggtgggactgtttgtagatgctatctctgtcgatagtggatgcccattttagataagattcttgttctgcctgtggaatccttaatagtttaaaatcaatacttctcgagtagtttctaaagactgtttgccgatctgtttttaaaaccaaggtttaaaaaaatctttcaagtcttcctatgatgtttagtgcacctgtgaaaatggtaaaatgattgttttggaatttttggatctgacgttgatttagggatgaatggtttgagttttatttgtcaaaatttgctgtttttatatctacaggattttttttcctataagcataaaatcaaagttggctactgttatttactgtgatgtaatgaatttgaactgccctgattgaaaagtttgcatttaggaaattataacgtggaaaaactgagcatatgattaacatctcccagctctttaaaacagaattaggattttgtttttagtactggctgttaccagtgttttaaaggaatttcttgagtgaagcgatcattttacaaaattagagaagcaagtagtatggtgattggcaggaatttctcagatttgaatcaagttctgatgttaaaatggaagattctgtttaaagcttgtattttcaaggaatacttataaacatttttatcaggcatcttcctgtttctcttaaatacttccttttttgacttaaaaatgttagccagtgaatgcttgacaaatttgtgtttttgtccttttcagttttgtcactcagcccagtccatcagtttctcagcccagtacttctcagagtgaagaaaaagctcctgaattgcccaaaccaaagaaaaacagatgtttcatgtgcagaaagaaagttggtcttacaggtattacaaaacacaagacaatgtatgttttacttctgcagttaacaaggagcttttggtcactccctaagagactagttggtcttacacataaaaaaaa

SEQ ID NO: 301256 - DNA, 633 bp, Homo sapiens
tttgaaagttgttgtatactgttaacgattgtctgcccatgtcctgcctgaaataccatgattgtttatggaaagtatctttaataaagctggatacagtttggcttggaaaaaaaaaaaaaaaaaaaaaaaaagctcctgaattgcccaaaccaaagaaaaacagatgtttcatgtgcagaaagaaagttggtcttacagggtttgactgccgatgtggaaatttgttttgtggacttcaccgttactctgacaagcacaactgtccgtatgattacaaagcagaagctgcagcaaaaatcagaaaagagaatccagttgttgtggctgaaaaaattcagagaatataaattacttcttgtgaagagactgaaactttgtttttattttaatatatcgtaggaaaacattaaagagcagatgcatggccatttttctttgatgttctccagagttttacattacacttgtctgtcttataattgatattttaggatgtttgggtgtttgttacaggcagaattggatagatacagcctatgtttaggcctcccctaattggtgtaatctgcccagcaatgtgacccggttatggaccaatgttttccagtgccaacaatagtctctcttttg

SEQ ID NO: 301257 - DNA, 312 bp, Homo sapiens
ttttcaagttaaaaatgaagtaagagtggtatagagaaggtaagatgagccctcggactccatcactctgaaggtctgagtagtagctgagattgcgccattgcactccagcctgggccaaaagagcaaaactccgtctcaaaaaaaaaaatatatatatatagccaggcaacgtggcgtgtgcctataatcccaagctatttgggaggctgaggcaggagaatcgcttgaacccaggaggcggaggttgcaatgagccgagatagcaccactgcactccagcctggtgacaaaacaagactccgtctcaaa

SEQ ID NO: 301258 - DNA, 3058 bp, Homo sapiens
catcctccacaggactcgctcttcccagctccaccctaggggccgactgccaggccagtggctgggctccgcgagaaggcacagcaacccgtctcggccccgcctcctggacctactgacagggcaccgggggcgtggccttgggcccgcgacgtcaccgcgctccccgccgccgccgccgccgccggggttttcgctgacgcacgggtcccgccccctccccctcttttccctcacagcccgggcgccgggcggcgagtgcgttagtcggccgggacgcggagctgtgtgcatctcctacgcgggctcgctcgctcccgggagccgcgcagcttccccggcggtggcaggagcggcgaagagcgccatcagcgggcccttacggccccaggcctcgcggcgcgcggtccgctcgccctcttcgtccgcccaacctgcggcctgtggaggcgtgaggcgacgacaggcgagcgcctcgagcagcgttagccgctgcggccgccggtcctccctccacctcctcctcggccccccctcgcttccctcctcccacttcccgagctccggcgtgtcccggccacgctcgacgctgctgcaggaacaaaggaagaccccgcggcggcggcggcgccacctccgcctgctgctccgacccgctcccggcccgcggcggcggcaccagggcgcccggctcagccttcccggaggcctcggcccggcctcatcgtgccggcttcgcgcgcgaacccggctttcgcatttgggaccctgcagggccctgaaaaggagcctttaaaagtcaattctactccatttggcaaagagggaactgaaatctggaaagtaaggacttgcccaaggtcactgacttagtggcagactagagacttgaactcaggtctccattcccagcagaaaaatatggctcaggagactaaccagaccccggggcccatgctgtgtagcacaggatgtggcttttatggaaatcctaggacaaatggaatgtgttcagtttgctacaaagaacatcttcagaggcagcaaaatagtggcagaatgagcccaatggggacagctagtggttccaacagtcctacctcagattctgcatctgtacagagagcagacactagcttaaacaactgtgaaggtgctgctggcagcacatctgaaaaatcaagaaatgtgcctgtggctgccttgcctgtaactcagcaaatgacagaaatgagcatttcaagagaggacaaaataactaccccgaaaacagaggtgtcagagccagttgtcactcagcccagtccatcagtttctcagcccagtacttctcagagtgaagaaaaagctcctgaattgcccaaaccaaagaaaaacagatgtttcatgtgcagaaagaaagttggtcttacagggtttgactgccgatgtggaaatttgttttgtggacttcaccgttactctgacaagcacaactgtccgtatgattacaaagcagaagctgcagcaaaaatcagaaaagagaatccagttgttgtggctgaaaaaattcagagaatataaattacttcttgtgaagagactgaaactttgtttttattttaatatatcgtaggaaaacattaaagagcagatgcatggccatttttctttgatgttctccagagttttacattacacttgtctgtcttataattgatattttaggatgtttgggtgtttgttacaggcagaattggatagatacagccctacaaatgtatatgccctcccctgaaaaaaattggatgaaaatctgcacagcaaagtgaaacacacagataataggaacaaaatgtagttcccatgtgccaaacaaaataaatgaaatctctgcatgtttgcagcatatctgccttttgggaatgtaatcaaggtataatctttggctagtgttatgtgcctgtatttttttaaaatggtacaccagaaaaggactggcagtctacttctaccatagttaaacttcaccctctttaatttcacaacatattctttggaagcaggaagaaatgctcataaagaggatcagaccttctttcccgtgaaaccagtatttggcgccatatataagcctggttaaattggtcatctaaagctgtcaaataagacattctgtgaaaggtaaacatcgaaactggttataagtaaaaccatcaagccaacaacagggtcttgagataacctttgaagcttattgtactggcctgcaccagaagatgtctgcattactcattgctaaaaatgtgtagcacagaactgcactaggattaatttgtttacaagaagaaatttaaactctacgtttggttttcacatacagcagctctattgaataacatgcatctgaattttaagttgcaaaggtatctgaataatttttcatgtgcatcttttgtcgaatgttttggttcaagaaagaatgtttaaagctttttaaaagacttcagttcttaatgtaactgtacccttctgcatggaaaatcataaccaacatggctgcagtagacttcttagtggtatccagcgccacttgcagagggctgctttatcatattgtacttgggtgtaggactctagtgttcttgggtgtattgcatgggctgcattatctacagcattgtacaataacaactagaaaaggcagtatacttcactgatgcttgtctggtaataatcacttctgtgttataatggaaggttttttgtgatgtatgaaacttgtgttttttatatataaatgagtatagttagtgttgtggtaatgcctgttttcatctgtaaatagttaagtatgtacacgaggcactacttctgatttattgcaatgttcagtcctagtttttacttttattcttaaagcattcagttttgctttcaattttatgtaccttagttctgagttagacctgcagatgtgtacagatagttcatatttatgtattgcacataatcatgctattcagcattgatgctatattgtattatgtaaataataaaagccatgtacagagggaaa

SEQ ID NO: 301259 - DNA, 3014 bp, Homo sapiens
catcctccacaggactcgctcttcccagctccaccctaggggccgactgccaggccagtggctgggctccgcgagaaggcacagcaacccgtctcggccccgcctcctggacctactgacagggcaccgggggcgtggccttgggcccgcgacgtcaccgcgctccccgccgccgccgcctcttttccctcacagcccgggcgccgggcggcgagtgcgttagtcggccgggacgcggagctgtgtgcatctcctacgcgggctcgctcgctcccgggagccgcgcagcttccccggcggtggcaggagcggcgaagagcgccatcagcgggcccttacggccccaggcctcgcggcgcgcggtccgctcgccctcttcgtccgcccaacctgcggcctgtggaggcgtgaggcgacgacaggcgagcgcctcgagcagcgttagccgctgcggccgccggtcctccctccacctcctcctcggccccccctcgcttccctcctcccacttcccgagctccggcgtgtcccggccacgctcgacgctgctgcaggaacaaaggaagaccccgcggcggcggcggcgccacctccgcctgctgctccgacccgctcccggcccgcggcggcggcaccagggcgcccggctcagccttcccggaggcctcggcccggcctcatcgtgccggcttcgcgcgcgaacccggctttcgcatttgggaccctgcagggccctgaaaaggagcctttaaaagtcaattctactccatttggcaaagagggaactgaaatctggaaagtaaggacttgcccaaggtcactgacttagtggcagactagagacttgaactcaggtctccattcccagcagaaaaatatggctcaggagactaaccagaccccggggcccatgctgtgtagcacaggatgtggcttttatggaaatcctaggacaaatggaatgtgttcagtttgctacaaagaacatcttcagaggcagcaaaatagtggcagaatgagcccaatggggacagctagtggttccaacagtcctacctcagattctgcatctgtacagagagcagacactagcttaaacaactgtgaaggtgctgctggcagcacatctgaaaaatcaagaaatgtgcctgtggctgccttgcctgtaactcagcaaatgacagaaatgagcatttcaagagaggacaaaataactaccccgaaaacagaggtgtcagagccagttgtcactcagcccagtccatcagtttctcagcccagtacttctcagagtgaagaaaaagctcctgaattgcccaaaccaaagaaaaacagatgtttcatgtgcagaaagaaagttggtcttacagggtttgactgccgatgtggaaatttgttttgtggacttcaccgttactctgacaagcacaactgtccgtatgattacaaagcagaagctgcagcaaaaatcagaaaagagaatccagttgttgtggctgaaaaaattcagagaatataaattacttcttgtgaagagactgaaactttgtttttattttaatatatcgtaggaaaacattaaagagcagatgcatggccatttttctttgatgttctccagagttttacattacacttgtctgtcttataattgatattttaggatgtttgggtgtttgttacaggcagaattggatagatacagccctacaaatgtatatgccctcccctgaaaaaaattggatgaaaatctgcacagcaaagtgaaacacacagataataggaacaaaatgtagttcccatgtgccaaacaaaataaatgaaatctctgcatgtttgcagcatatctgccttttgggaatgtaatcaaggtataatctttggctagtgttatgtgcctgtatttttttaaaatggtacaccagaaaaggactggcagtctacttctaccatagttaaacttcaccctctttaatttcacaacatattctttggaagcaggaagaaatgctcataaagaggatcagaccttctttcccgtgaaaccagtatttggcgccatatataagcctggttaaattggtcatctaaagctgtcaaataagacattctgtgaaaggtaaacatcgaaactggttataagtaaaaccatcaagccaacaacagggtcttgagataacctttgaagcttattgtactggcctgcaccagaagatgtctgcattactcattgctaaaaatgtgtagcacagaactgcactaggattaatttgtttacaagaagaaatttaaactctacgtttggttttcacatacagcagctctattgaataacatgcatctgaattttaagttgcaaaggtatctgaataatttttcatgtgcatcttttgtcgaatgttttggttcaagaaagaatgtttaaagctttttaaaagacttcagttcttaatgtaactgtacccttctgcatggaaaatcataaccaacatggctgcagtagacttcttagtggtatccagcgccacttgcagagggctgctttatcatattgtacttgggtgtaggactctagtgttcttgggtgtattgcatgggctgcattatctacagcattgtacaataacaactagaaaaggcagtatacttcactgatgcttgtctggtaataatcacttctgtgttataatggaaggttttttgtgatgtatgaaacttgtgttttttatatataaatgagtatagttagtgttgtggtaatgcctgttttcatctgtaaatagttaagtatgtacacgaggcactacttctgatttattgcaatgttcagtcctagtttttacttttattcttaaagcattcagttttgctttcaattttatgtaccttagttctgagttagacctgcagatgtgtacagatagttcatatttatgtattgcacataatcatgctattcagcattgatgctatattgtattatgtaaataataaaagccatgtacagagggaaa

SEQ ID NO: 301260 - DNA, 2921 bp, Homo sapiens
catcctccacaggactcgctcttcccagctccaccctaggggccgactgccaggccagtggctgggctccgcgagaaggcacagcaacccgtctcggccccgcctcctggacctactgacagggcaccgggggcgtggccttgggcccgcgacgtcaccgcgctccccgccgccgccgccgccgccggggttttcgctgacgcacgggtcccgccccctccccctcttttccctcacagcccgggcgccgggcggcgagtgcgttagtcggccgggacgcggagctgtgtgcatctcctacgcgggctcgctcgctcccgggagccgcgcagcttccccggcggtggcaggagcggcgaagagcgccatcagcgggcccttacggccccaggcctcgcggcgcgcggtccgctcgccctcttcgtccgcccaacctgcggcctgtggaggcgtgaggcgacgacaggcgagcgcctcgagcagcgttagccgctgcggccgccggtcctccctccacctcctcctcggccccccctcgcttccctcctcccacttcccgagctccggcgtgtcccggccacgctcgacgctgctgcaggaacaaaggaagaccccgcggcggcggcggcgccacctccgcctgctgctccgacccgctcccggcccgcggcggcggcaccagggcgcccggctcagccttcccggaggcctcggcccggcctcatcgtgccggcttcgcgcgcgaacccggctttcgcatttgggaccctgcaggcagaaaaatatggctcaggagactaaccagaccccggggcccatgctgtgtagcacaggatgtggcttttatggaaatcctaggacaaatggaatgtgttcagtttgctacaaagaacatcttcagaggcagcaaaatagtggcagaatgagcccaatggggacagctagtggttccaacagtcctacctcagattctgcatctgtacagagagcagacactagcttaaacaactgtgaaggtgctgctggcagcacatctgaaaaatcaagaaatgtgcctgtggctgccttgcctgtaactcagcaaatgacagaaatgagcatttcaagagaggacaaaataactaccccgaaaacagaggtgtcagagccagttgtcactcagcccagtccatcagtttctcagcccagtacttctcagagtgaagaaaaagctcctgaattgcccaaaccaaagaaaaacagatgtttcatgtgcagaaagaaagttggtcttacagggtttgactgccgatgtggaaatttgttttgtggacttcaccgttactctgacaagcacaactgtccgtatgattacaaagcagaagctgcagcaaaaatcagaaaagagaatccagttgttgtggctgaaaaaattcagagaatataaattacttcttgtgaagagactgaaactttgtttttattttaatatatcgtaggaaaacattaaagagcagatgcatggccatttttctttgatgttctccagagttttacattacacttgtctgtcttataattgatattttaggatgtttgggtgtttgttacaggcagaattggatagatacagccctacaaatgtatatgccctcccctgaaaaaaattggatgaaaatctgcacagcaaagtgaaacacacagataataggaacaaaatgtagttcccatgtgccaaacaaaataaatgaaatctctgcatgtttgcagcatatctgccttttgggaatgtaatcaaggtataatctttggctagtgttatgtgcctgtatttttttaaaatggtacaccagaaaaggactggcagtctacttctaccatagttaaacttcaccctctttaatttcacaacatattctttggaagcaggaagaaatgctcataaagaggatcagaccttctttcccgtgaaaccagtatttggcgccatatataagcctggttaaattggtcatctaaagctgtcaaataagacattctgtgaaaggtaaacatcgaaactggttataagtaaaaccatcaagccaacaacagggtcttgagataacctttgaagcttattgtactggcctgcaccagaagatgtctgcattactcattgctaaaaatgtgtagcacagaactgcactaggattaatttgtttacaagaagaaatttaaactctacgtttggttttcacatacagcagctctattgaataacatgcatctgaattttaagttgcaaaggtatctgaataatttttcatgtgcatcttttgtcgaatgttttggttcaagaaagaatgtttaaagctttttaaaagacttcagttcttaatgtaactgtacccttctgcatggaaaatcataaccaacatggctgcagtagacttcttagtggtatccagcgccacttgcagagggctgctttatcatattgtacttgggtgtaggactctagtgttcttgggtgtattgcatgggctgcattatctacagcattgtacaataacaactagaaaaggcagtatacttcactgatgcttgtctggtaataatcacttctgtgttataatggaaggttttttgtgatgtatgaaacttgtgttttttatatataaatgagtatagttagtgttgtggtaatgcctgttttcatctgtaaatagttaagtatgtacacgaggcactacttctgatttattgcaatgttcagtcctagtttttacttttattcttaaagcattcagttttgctttcaattttatgtaccttagttctgagttagacctgcagatgtgtacagatagttcatatttatgtattgcacataatcatgctattcagcattgatgctatattgtattatgtaaataataaaagccatgtacagagggaaa

SEQ ID NO: 301261 - DNA, 4076 bp, Homo sapiens
catcctccacaggactcgctcttcccagctccaccctaggggccgactgccaggccagtggctgggctccgcgagaaggcacagcaacccgtctcggccccgcctcctggacctactgacagggcaccgggggcgtggccttgggcccgcgacgtcaccgcgctccccgccgccgccgccgccgccggggttttcgctgacgcacgggtcccgccccctccccctcttttccctcacagcccgggcgccgggcggcgagtgcgttagtcggccgggacgcggagctgtgtgcatctcctacgcgggctcgctcgctcccgggagccgcgcagcttccccggcggtggcaggagcggcgaagagcgccatcagcgggcccttacggccccaggcctcgcggcgcgcggtccgctcgccctcttcgtccgcccaacctgcggcctgtggaggcgtgaggcgacgacaggcgagcgcctcgagcagcgttagccgctgcggccgccggtcctccctccacctcctcctcggccccccctcgcttccctcctcccacttcccgagctccggcgtgtcccggccacgctcgacgctgctgcaggaacaaaggaagaccccgcggcggcggcggcgccacctccgcctgctgctccgacccgctcccggcccgcggcggcggcaccagggcgcccggctcagccttcccggaggcctcggcccggcctcatcgtgccggcttcgcgcgcgaacccggctttcgcatttgggaccctgcagggtgagtgatacggggctgcgggtgggagccgggctccttgttgccgggccgggggcgggagggagcccgcccgccagcccaggaagcacaaagacggaggcgtcatcctgtcgtcgtggcccgagacctggctcccggcgtccctggctcgctccacagcacggtcgggaaacaatgcacggcgtgccgcctctgcggggccggcctctaggccgctcgcctccgcggcggcgcccggcgtgggcaccacgacccagagaaacaaagaggccgaggcggcggccgcgccccctgcccgttgcagccccccctagctctcccctaagaggagccgttcggggtcgggggtcgggggtcggggatccgcgtggggcctgcaggcgaagggctggccgggcctgctgagctgctgttctgcatgactcagtggttttcggagagggccctgttgggctttattgagtgaggcctttgcttagagggggatggggtatcagtgggacccgaacttgttccaaaatccattggaacatggggccgggggttctcggcgtcgtcttttgggcttctcgacgtcgctgcgtttttatcctgagatccgttttcatggaggaaatggaacacctcctttgtttggtgcatttaggctgatgaatgtgaaattttttgctcgctttccacgcactccgtggaggtgtgttttcggggaagggtcggattatctttattgattgaatgtctcctaagggatagcatctaaggagataccaagataaaggaacatataggtcacacatccccgttcttaaacctgggatttagatacagacttctaaaaacataaacgaatgtattttattccttatttttaggattttttttaaagagtaggctttcagaactcagttggtgaaaatactgcaattttatctttgaagttttttgttaaaatgtttccccacacccccctaaaaaattaaggattctttgtagttgtctcctgttttctatctcccaggccctgaaaaggagcctttaaaagtcaattctactccatttggcaaagagggaactgaaatctggaaagtaaggacttgcccaaggtcactgacttagtggcagactagagacttgaactcaggtctccattcccagcagaaaaatatggctcaggagactaaccagaccccggggcccatgctgtgtagcacaggatgtggcttttatggaaatcctaggacaaatggaatgtgttcagtttgctacaaagaacatcttcagaggcagcaaaatagtggcagaatgagcccaatggggacagctagtggttccaacagtcctacctcagattctgcatctgtacagagagcagacactagcttaaacaactgtgaaggtgctgctggcagcacatctgaaaaatcaagaaatgtgcctgtggctgccttgcctgtaactcagcaaatgacagaaatgagcatttcaagagaggacaaaataactaccccgaaaacagaggtgtcagagccagttgtcactcagcccagtccatcagtttctcagcccagtacttctcagagtgaagaaaaagctcctgaattgcccaaaccaaagaaaaacagatgtttcatgtgcagaaagaaagttggtcttacagggtttgactgccgatgtggaaatttgttttgtggacttcaccgttactctgacaagcacaactgtccgtatgattacaaagcagaagctgcagcaaaaatcagaaaagagaatccagttgttgtggctgaaaaaattcagagaatataaattacttcttgtgaagagactgaaactttgtttttattttaatatatcgtaggaaaacattaaagagcagatgcatggccatttttctttgatgttctccagagttttacattacacttgtctgtcttataattgatattttaggatgtttgggtgtttgttacaggcagaattggatagatacagccctacaaatgtatatgccctcccctgaaaaaaattggatgaaaatctgcacagcaaagtgaaacacacagataataggaacaaaatgtagttcccatgtgccaaacaaaataaatgaaatctctgcatgtttgcagcatatctgccttttgggaatgtaatcaaggtataatctttggctagtgttatgtgcctgtatttttttaaaatggtacaccagaaaaggactggcagtctacttctaccatagttaaacttcaccctctttaatttcacaacatattctttggaagcaggaagaaatgctcataaagaggatcagaccttctttcccgtgaaaccagtatttggcgccatatataagcctggttaaattggtcatctaaagctgtcaaataagacattctgtgaaaggtaaacatcgaaactggttataagtaaaaccatcaagccaacaacagggtcttgagataacctttgaagcttattgtactggcctgcaccagaagatgtctgcattactcattgctaaaaatgtgtagcacagaactgcactaggattaatttgtttacaagaagaaatttaaactctacgtttggttttcacatacagcagctctattgaataacatgcatctgaattttaagttgcaaaggtatctgaataatttttcatgtgcatcttttgtcgaatgttttggttcaagaaagaatgtttaaagctttttaaaagacttcagttcttaatgtaactgtacccttctgcatggaaaatcataaccaacatggctgcagtagacttcttagtggtatccagcgccacttgcagagggctgctttatcatattgtacttgggtgtaggactctagtgttcttgggtgtattgcatgggctgcattatctacagcattgtacaataacaactagaaaaggcagtatacttcactgatgcttgtctggtaataatcacttctgtgttataatggaaggttttttgtgatgtatgaaacttgtgttttttatatataaatgagtatagttagtgttgtggtaatgcctgttttcatctgtaaatagttaagtatgtacacgaggcactacttctgatttattgcaatgttcagtcctagtttttacttttattcttaaagcattcagttttgctttcaattttatgtaccttagttctgagttagacctgcagatgtgtacagatagttcatatttatgtattgcacataatcatgctattcagcattgatgctatattgtattatgtaaataataaaagccatgtacagagggaaa

SEQ ID NO: 301262 - DNA, 4147 bp, Homo sapiens
catcctccacaggactcgctcttcccagctccaccctaggggccgactgccaggccagtggctgggctccgcgagaaggcacagcaacccgtctcggccccgcctcctggacctactgacagggcaccgggggcgtggccttgggcccgcgacgtcaccgcgctccccgccgccgccgccgccgccggggttttcgctgacgcacgggtcccgccccctccccctcttttccctcacagcccgggcgccgggcggcgagtgcgttagtcggccgggacgcggagctgtgtgcatctcctacgcgggctcgctcgctcccgggagccgcgcagcttccccggcggtggcaggagcggcgaagagcgccatcagcgggcccttacggccccaggcctcgcggcgcgcggtccgctcgccctcttcgtccgcccaacctgcggcctgtggaggcgtgaggcgacgacaggcgagcgcctcgagcagcgttagccgctgcggccgccggtcctccctccacctcctcctcggccccccctcgcttccctcctcccacttcccgagctccggcgtgtcccggccacgctcgacgctgctgcaggaacaaaggaagaccccgcggcggcggcggcgccacctccgcctgctgctccgacccgctcccggcccgcggcggcggcaccagggcgcccggctcagccttcccggaggcctcggcccggcctcatcgtgccggcttcgcgcgcgaacccggctttcgcatttgggaccctgcagggtgagtgatacggggctgcgggtgggagccgggctccttgttgccgggccgggggcgggagtgaagggaccggggcgccgcgggccaatggcgaagccggagcaggccgcggatggcggcgtccgggggaggggagcccgcccgccagcccaggaagcacaaagacggaggcgtcatcctgtcgtcgtggcccgagacctggctcccggcgtccctggctcgctccacagcacggtcgggaaacaatgcacggcgtgccgcctctgcggggccggcctctaggccgctcgcctccgcggcggcgcccggcgtgggcaccacgacccagagaaacaaagaggccgaggcggcggccgcgccccctgcccgttgcagccccccctagctctcccctaagaggagccgttcggggtcgggggtcgggggtcggggatccgcgtggggcctgcaggcgaagggctggccgggcctgctgagctgctgttctgcatgactcagtggttttcggagagggccctgttgggctttattgagtgaggcctttgcttagagggggatggggtatcagtgggacccgaacttgttccaaaatccattggaacatggggccgggggttctcggcgtcgtcttttgggcttctcgacgtcgctgcgtttttatcctgagatccgttttcatggaggaaatggaacacctcctttgtttggtgcatttaggctgatgaatgtgaaattttttgctcgctttccacgcactccgtggaggtgtgttttcggggaagggtcggattatctttattgattgaatgtctcctaagggatagcatctaaggagataccaagataaaggaacatataggtcacacatccccgttcttaaacctgggatttagatacagacttctaaaaacataaacgaatgtattttattccttatttttaggattttttttaaagagtaggctttcagaactcagttggtgaaaatactgcaattttatctttgaagttttttgttaaaatgtttccccacacccccctaaaaaattaaggattctttgtagttgtctcctgttttctatctcccaggccctgaaaaggagcctttaaaagtcaattctactccatttggcaaagagggaactgaaatctggaaagtaaggacttgcccaaggtcactgacttagtggcagactagagacttgaactcaggtctccattcccagcagaaaaatatggctcaggagactaaccagaccccggggcccatgctgtgtagcacaggatgtggcttttatggaaatcctaggacaaatggaatgtgttcagtttgctacaaagaacatcttcagaggcagcaaaatagtggcagaatgagcccaatggggacagctagtggttccaacagtcctacctcagattctgcatctgtacagagagcagacactagcttaaacaactgtgaaggtgctgctggcagcacatctgaaaaatcaagaaatgtgcctgtggctgccttgcctgtaactcagcaaatgacagaaatgagcatttcaagagaggacaaaataactaccccgaaaacagaggtgtcagagccagttgtcactcagcccagtccatcagtttctcagcccagtacttctcagagtgaagaaaaagctcctgaattgcccaaaccaaagaaaaacagatgtttcatgtgcagaaagaaagttggtcttacagggtttgactgccgatgtggaaatttgttttgtggacttcaccgttactctgacaagcacaactgtccgtatgattacaaagcagaagctgcagcaaaaatcagaaaagagaatccagttgttgtggctgaaaaaattcagagaatataaattacttcttgtgaagagactgaaactttgtttttattttaatatatcgtaggaaaacattaaagagcagatgcatggccatttttctttgatgttctccagagttttacattacacttgtctgtcttataattgatattttaggatgtttgggtgtttgttacaggcagaattggatagatacagccctacaaatgtatatgccctcccctgaaaaaaattggatgaaaatctgcacagcaaagtgaaacacacagataataggaacaaaatgtagttcccatgtgccaaacaaaataaatgaaatctctgcatgtttgcagcatatctgccttttgggaatgtaatcaaggtataatctttggctagtgttatgtgcctgtatttttttaaaatggtacaccagaaaaggactggcagtctacttctaccatagttaaacttcaccctctttaatttcacaacatattctttggaagcaggaagaaatgctcataaagaggatcagaccttctttcccgtgaaaccagtatttggcgccatatataagcctggttaaattggtcatctaaagctgtcaaataagacattctgtgaaaggtaaacatcgaaactggttataagtaaaaccatcaagccaacaacagggtcttgagataacctttgaagcttattgtactggcctgcaccagaagatgtctgcattactcattgctaaaaatgtgtagcacagaactgcactaggattaatttgtttacaagaagaaatttaaactctacgtttggttttcacatacagcagctctattgaataacatgcatctgaattttaagttgcaaaggtatctgaataatttttcatgtgcatcttttgtcgaatgttttggttcaagaaagaatgtttaaagctttttaaaagacttcagttcttaatgtaactgtacccttctgcatggaaaatcataaccaacatggctgcagtagacttcttagtggtatccagcgccacttgcagagggctgctttatcatattgtacttgggtgtaggactctagtgttcttgggtgtattgcatgggctgcattatctacagcattgtacaataacaactagaaaaggcagtatacttcactgatgcttgtctggtaataatcacttctgtgttataatggaaggttttttgtgatgtatgaaacttgtgttttttatatataaatgagtatagttagtgttgtggtaatgcctgttttcatctgtaaatagttaagtatgtacacgaggcactacttctgatttattgcaatgttcagtcctagtttttacttttattcttaaagcattcagttttgctttcaattttatgtaccttagttctgagttagacctgcagatgtgtacagatagttcatatttatgtattgcacataatcatgctattcagcattgatgctatattgtattatgtaaataataaaagccatgtacagagggaaa

SEQ ID NO: 301263 - DNA, 3292 bp, Homo sapiens
catcctccacaggactcgctcttcccagctccaccctaggggccgactgccaggccagtggctgggctccgcgagaaggcacagcaacccgtctcggccccgcctcctggacctactgacagggcaccgggggcgtggccttgggcccgcgacgtcaccgcgctccccgccgccgccgccgccgccggggttttcgctgacgcacgggtcccgccccctccccctcttttccctcacagcccgggcgccgggcggcgagtgcgttagtcggccgggacgcggagctgtgtgcatctcctacgcgggctcgctcgctcccgggagccgcgcagcttccccggcggtggcaggagcggcgaagagcgccatcagcgggcccttacggccccaggcctcgcggcgcgcggtccgctcgccctcttcgtccgcccaacctgcggcctgtggaggcgtgaggcgacgacaggcgagcgcctcgagcagcgttagccgctgcggccgccggtcctccctccacctcctcctcggccccccctcgcttccctcctcccacttcccgagctccggcgtgtcccggccacgctcgacgctgctgcaggaacaaaggaagaccccgcggcggcggcggcgccacctccgcctgctgctccgacccgctcccggcccgcggcggcggcaccagggcgcccggctcagccttcccggaggcctcggcccggcctcatcgtgccggcttcgcgcgcgaacccggctttcgcatttgggaccctgcagggtgagtgatacggggctgcgggtgggagccgggctccttgttgccgggccgggggcgggagtgaagggaccggggcgccgcgggccaatggcgaagccggagcaggccgcggatggcggcgtccgggggaggggagcccgcccgccagcccaggaagcacaaagacggaggcgtcatcctgtcgtcgtggcccgagacctggctcccggcgtccctggctcgctccacagcacggccctgaaaaggagcctttaaaagtcaattctactccatttggcaaagagggaactgaaatctggaaagtaaggacttgcccaaggtcactgacttagtggcagactagagacttgaactcaggtctccattcccagcagaaaaatatggctcaggagactaaccagaccccggggcccatgctgtgtagcacaggatgtggcttttatggaaatcctaggacaaatggaatgtgttcagtttgctacaaagaacatcttcagaggcagcaaaatagtggcagaatgagcccaatggggacagctagtggttccaacagtcctacctcagattctgcatctgtacagagagcagacactagcttaaacaactgtgaaggtgctgctggcagcacatctgaaaaatcaagaaatgtgcctgtggctgccttgcctgtaactcagcaaatgacagaaatgagcatttcaagagaggacaaaataactaccccgaaaacagaggtgtcagagccagttgtcactcagcccagtccatcagtttctcagcccagtacttctcagagtgaagaaaaagctcctgaattgcccaaaccaaagaaaaacagatgtttcatgtgcagaaagaaagttggtcttacagggtttgactgccgatgtggaaatttgttttgtggacttcaccgttactctgacaagcacaactgtccgtatgattacaaagcagaagctgcagcaaaaatcagaaaagagaatccagttgttgtggctgaaaaaattcagagaatataaattacttcttgtgaagagactgaaactttgtttttattttaatatatcgtaggaaaacattaaagagcagatgcatggccatttttctttgatgttctccagagttttacattacacttgtctgtcttataattgatattttaggatgtttgggtgtttgttacaggcagaattggatagatacagccctacaaatgtatatgccctcccctgaaaaaaattggatgaaaatctgcacagcaaagtgaaacacacagataataggaacaaaatgtagttcccatgtgccaaacaaaataaatgaaatctctgcatgtttgcagcatatctgccttttgggaatgtaatcaaggtataatctttggctagtgttatgtgcctgtatttttttaaaatggtacaccagaaaaggactggcagtctacttctaccatagttaaacttcaccctctttaatttcacaacatattctttggaagcaggaagaaatgctcataaagaggatcagaccttctttcccgtgaaaccagtatttggcgccatatataagcctggttaaattggtcatctaaagctgtcaaataagacattctgtgaaaggtaaacatcgaaactggttataagtaaaaccatcaagccaacaacagggtcttgagataacctttgaagcttattgtactggcctgcaccagaagatgtctgcattactcattgctaaaaatgtgtagcacagaactgcactaggattaatttgtttacaagaagaaatttaaactctacgtttggttttcacatacagcagctctattgaataacatgcatctgaattttaagttgcaaaggtatctgaataatttttcatgtgcatcttttgtcgaatgttttggttcaagaaagaatgtttaaagctttttaaaagacttcagttcttaatgtaactgtacccttctgcatggaaaatcataaccaacatggctgcagtagacttcttagtggtatccagcgccacttgcagagggctgctttatcatattgtacttgggtgtaggactctagtgttcttgggtgtattgcatgggctgcattatctacagcattgtacaataacaactagaaaaggcagtatacttcactgatgcttgtctggtaataatcacttctgtgttataatggaaggttttttgtgatgtatgaaacttgtgttttttatatataaatgagtatagttagtgttgtggtaatgcctgttttcatctgtaaatagttaagtatgtacacgaggcactacttctgatttattgcaatgttcagtcctagtttttacttttattcttaaagcattcagttttgctttcaattttatgtaccttagttctgagttagacctgcagatgtgtacagatagttcatatttatgtattgcacataatcatgctattcagcattgatgctatattgtattatgtaaataataaaagccatgtacagagggaaa

SEQ ID NO: 301264 - DNA, 3389 bp, Homo sapiens
  misc_feature (3070)..(3070): n is a, c, g, or t
catcctccacaggactcgctcttcccagctccaccctaggggccgactgccaggccagtggctgggctccgcgagaaggcacagcaacccgtctcggccccgcctcctggacctactgacagggcaccgggggcgtggccttgggcccgcgacgtcaccgcgctccccgccgccgccgccgccgccggggttttcgctgacgcacgggtcccgccccctccccctcttttccctcacagcccgggcgccgggcggcgagtgcgttagtcggccgggacgcggagctgtgtgcatctcctacgcgggctcgctcgctcccgggagccgcgcagcttccccggcggtggcaggagcggcgaagagcgccatcagcgggcccttacggccccaggcctcgcggcgcgcggtccgctcgccctcttcgtccgcccaacctgcggcctgtggaggcgtgaggcgacgacaggcgagcgcctcgagcagcgttagccgctgcggccgccggtcctccctccacctcctcctcggccccccctcgcttccctcctcccacttcccgagctccggcgtgtcccggccacgctcgacgctgctgcaggaacaaaggaagaccccgcggcggcggcggcgccacctccgcctgctgctccgacccgctcccggcccgcggcggcggcaccagggcgcccggctcagccttcccggaggcctcggcccggcctcatcgtgccggcttcgcgcgcgaacccggctttcgcatttgggaccctgcagggccctgaaaaggagcctttaaaagtcaattctactccatttggcaaagagggaactgaaatctggaaagtaaggacttgcccaaggtcactgacttagtggcagactagagacttgaactcaggtctccattcccagcagaaaaatatggctcaggagactaaccagaccccggggcccatgctgtgtagcacaggatgtggcttttatggaaatcctaggacaaatggaatgtgttcagtttgctacaaagaacatcttcagaggcagcaaaatagtggcagaatgagcccaatggggacagctagtggttccaacagtcctacctcagattctgcatctgtacagagagcagacactagcttaaacaactgtgaaggtgctgctggcagcacatctgaaaaatcaagaaatgtgcctgtggctgccttgcctgtaactcagcaaatgacagaaatgagcatttcaagagaggacaaaataactaccccgaaaacagaggtgtcagagccagttgtcactcagcccagtccatcagtttctcagcccagtacttctcagagtgaagaaaaagctcctgaattgcccaaaccaaagaaaaacagatgtttcatgtgcagaaagaaagttggtcttacagggtttgactgccgatgtggaaatttgttttgtggacttcaccgttactctgacaagcacaactgtccgtatgattacaaagcagaagctgcagcaaaaatcagaaaagagaatccagttgttgtggctgaaaaaattcagagaatataaattacttcttgtgaagagactgaaactttgtttttattttaatatatcgtaggaaaacattaaagagcagatgcatggccatttttctttgatgttctccagagttttacattacacttgtctgtcttataattgatattttaggatgtttgggtgtttgttacaggcagaattggatagatacagccctacaaatgtatatgccctcccctgaaaaaaattggatgaaaatctgcacagcaaagtgaaacacacagataataggaacaaaatgtagttcccatgtgccaaacaaaataaatgaaatctctgcatgtttgcagcatatctgccttttgggaatgtaatcaaggtataatctttggctagtgttatgtgcctgtatttttttaaaatggtacaccagaaaaggactggcagtctacttctaccatagttaaacttcaccctctttaatttcacaacatattctttggaagcaggaagaaatgctcataaagaggatcagaccttctttcccgtgaaaccagtatttggcgccatatataagcctggttaaattggtcatctaaagctgtcaaataagacattctgtgaaaggtaaacatcgaaactggttataagtaaaaccatcaagccaacaacagggtcttgagataacctttgaagcttattgtactggcctgcaccagaagatgtctgcattactcattgctaaaaatgtgtagcacagaactgcactaggattaatttgtttacaagaagaaatttaaactctacgtttggttttcacatacagcagctctattgaataacatgcatctgaattttaagttgcaaaggtatctgaataatttttcatgtgcatcttttgtcgaatgttttggttcaagaaagaatgtttaaagctttttaaaagacttcagttcttaatgtaactgtacccttctgcatggaaaatcataaccaacatggctgcagtagacttcttagtggtatccagcgccacttgcagagggctgctttatcatattgtacttgggtgtaggactctagtgttcttgggtgtattgcatgggctgcattatctacagcattgtacaataacaactagaaaaggcagtatacttcactgatgcttgtctggtaataatcacttctgtgttataatggaaggttttttgtgatgtatgaaacttgtgttttttatatataaatgagtatagttagtgttgtggtaatgcctgttttcatctgtaaatagttaagtatgtacacgaggcactacttctgatttattgcaatgttcagtcctagtttttacttttattcttaaagcattcagttttgctttcaattttatgtaccttagttctgagttagacctgcagatgtgtacagatagttcatatttatgtattgcacataatcatgctattcagcattgatgctatattgtattatgtaaataataaaagccatgtacagagggaaaaaaaaaaaaaanaaaaaaaacaaaaaaaacaaaaaaaaaaaaaaaaaaaaaaaaaaaaaaatttgggggggggtgggggctcaaaaaaacgttttgaaaacaccctggggggggacgcgggggcccacaagaggagaaagcaaaacggtggcaacaaaggggtgccaaaagaagaaactcgtggcgaaaaagaaagggggggggactatccacaaaaataaaaaagcgcgggggggcacacaaggggttgtgcgaaacaccacacagagagcctaggagaaaaaagagggacaaaacaaggggagtacaagagagccgaacaaaaaatccg

SEQ ID NO: 301265 - DNA, 3004 bp, Homo sapiens
catcctccacaggactcgctcttcccagctccaccctaggggccgactgccaggccagtggctgggctccgcgagaaggcacagcaacccgtctcggccccgcctcctggacctactgacagggcaccgggggcgtggccttgggcccgcgacgtcaccgcgctccccgccgccgccgccgccgccggggttttcgctgacgcacgggtcccgccccctccccctcttttccctcacagcccgggcgccgggcggcgagtgcgttagtcggccgggacgcggagctgtgtgcatctcctacgcgggctcgctcgctcccgggagccgcgcagcttccccggcggtggcaggagcggcgaagagcgccatcagcgggcccttacggccccaggcctcgcggcgcgcggtccgctcgccctcttcgtccgcccaacctgcggcctgtggaggcgtgaggcgacgacaggcgagcgcctcgagcagcgttagccgctgcggccgccggtcctccctccacctcctcctcggccccccctcgcttccctcctcccacttcccgagctccggcgtgtcccggccacgctcgacgctgctgcaggaacaaaggaagaccccgcggcggcggcggcgccacctccgcctgctgctccgacccgctcccggcccgcggcggcggcaccagggcgcccggctcagccttcccggaggcctcggcccggcctcatcgtgccggcttcgcgcgcgaacccggctttcgcatttgggaccctgcagggccctgaaaaggagcctttaaaagtcaattctactccatttggcaaagagggaactgaaatctggaaagtaaggacttgcccaaggtcactgacttagtggcagactagagacttgaactcaggtctccattcccagcagaaaaatatggctcaggagactaaccagaccccggggcccatgctgtgtagcacaggatgtggcttttatggaaatcctaggacaaatggaatgtgttcagtttgctacaaagaacatcttcagaggcagcaaaatagtggcagaatgagcccaatggggacagctagtggttccaacagtcctacctcagattctgcatctgtacagagagcagacactagcttaaacaactgtgaaggtgctgctggcagcacatctgaaaaatcaagaaatgtgcctgtggctgccttgcctgtaactcagcaaatgacagaaatgagcatttcaagagaggacaaaataactaccccgaaaacagaggtgtcagagccagttgtcactcagcccagtccatcagtttctcagcccagtacttctcagagtgaagaaaaagctcctgaattgcccaaaccaaagaaaaacagatgtttcatgtgcagaaagaaagttggtcttacagggtttgactgccgatgtggaaatttgttttgtggacttcaccgttactctgacaagcacaactgtccgtatgattacaaagcagaagctgcagcaaaaatcagaaaagagaatccagttgttgtggctgaaaaaattcagagaatataaattacttcttgtgaagagactgaaactttgtttttattttaatatatcgtaggtacattacacttgtctgtcttataattgatattttaggatgtttgggtgtttgttacaggcagaattggatagatacagccctacaaatgtatatgccctcccctgaaaaaaattggatgaaaatctgcacagcaaagtgaaacacacagataataggaacaaaatgtagttcccatgtgccaaacaaaataaatgaaatctctgcatgtttgcagcatatctgccttttgggaatgtaatcaaggtataatctttggctagtgttatgtgcctgtatttttttaaaatggtacaccagaaaaggactggcagtctacttctaccatagttaaacttcaccctctttaatttcacaacatattctttggaagcaggaagaaatgctcataaagaggatcagaccttctttcccgtgaaaccagtatttggcgccatatataagcctggttaaattggtcatctaaagctgtcaaataagacattctgtgaaaggtaaacatcgaaactggttataagtaaaaccatcaagccaacaacagggtcttgagataacctttgaagcttattgtactggcctgcaccagaagatgtctgcattactcattgctaaaaatgtgtagcacagaactgcactaggattaatttgtttacaagaagaaatttaaactctacgtttggttttcacatacagcagctctattgaataacatgcatctgaattttaagttgcaaaggtatctgaataatttttcatgtgcatcttttgtcgaatgttttggttcaagaaagaatgtttaaagctttttaaaagacttcagttcttaatgtaactgtacccttctgcatggaaaatcataaccaacatggctgcagtagacttcttagtggtatccagcgccacttgcagagggctgctttatcatattgtacttgggtgtaggactctagtgttcttgggtgtattgcatgggctgcattatctacagcattgtacaataacaactagaaaaggcagtatacttcactgatgcttgtctggtaataatcacttctgtgttataatggaaggttttttgtgatgtatgaaacttgtgttttttatatataaatgagtatagttagtgttgtggtaatgcctgttttcatctgtaaatagttaagtatgtacacgaggcactacttctgatttattgcaatgttcagtcctagtttttacttttattcttaaagcattcagttttgctttcaattttatgtaccttagttctgagttagacctgcagatgtgtacagatagttcatatttatgtattgcacataatcatgctattcagcattgatgctatattgtattatgtaaataataaaagccatgtacagagggaaa

SEQ ID NO: 301266 - DNA, 3155 bp, Homo sapiens
catcctccacaggactcgctcttcccagctccaccctaggggccgactgccaggccagtggctgggctccgcgagaaggcacagcaacccgtctcggccccgcctcctggacctactgacagggcaccgggggcgtggccttgggcccgcgacgtcaccgcgctccccgccgccgccgccgccgccggggttttcgctgacgcacgggtcccgccccctccccctcttttccctcacagcccgggcgccgggcggcgagtgcgttagtcggccgggacgcggagctgtgtgcatctcctacgcgggctcgctcgctcccgggagccgcgcagcttccccggcggtggcaggagcggcgaagagcgccatcagcgggcccttacggccccaggcctcgcggcgcgcggtccgctcgccctcttcgtccgcccaacctgcggcctgtggaggcgtgaggcgacgacaggcgagcgcctcgagcagcgttagccgctgcggccgccggtcctccctccacctcctcctcggccccccctcgcttccctcctcccacttcccgagctccggcgtgtcccggccacgctcgacgctgctgcaggaacaaaggaagaccccgcggcggcggcggcgccacctccgcctgctgctccgacccgctcccggcccgcggcggcggcaccagggcgcccggctcagccttcccggaggcctcggcccggcctcatcgtgccggcttcgcgcgcgaacccggctttcgcatttgggaccctgcagggtgagtgatacggggctgcgggtgggagccgggctccttgttgccgggccgggggcgggagtgaagggaccggggcgccgcgggccaatggcgaagccggagcaggccgcggatggcggcgtccgggggaggggagcccgcccgccagcccaggaagcacaaagacggaggcgtcatcctgtcgtcgtggcccgagacctggctcccggcgtccctggctcgctccacagcacgcagaaaaatatggctcaggagactaaccagaccccggggcccatgctgtgtagcacaggatgtggcttttatggaaatcctaggacaaatggaatgtgttcagtttgctacaaagaacatcttcagaggcagcaaaatagtggcagaatgagcccaatggggacagctagtggttccaacagtcctacctcagattctgcatctgtacagagagcagacactagcttaaacaactgtgaaggtgctgctggcagcacatctgaaaaatcaagaaatgtgcctgtggctgccttgcctgtaactcagcaaatgacagaaatgagcatttcaagagaggacaaaataactaccccgaaaacagaggtgtcagagccagttgtcactcagcccagtccatcagtttctcagcccagtacttctcagagtgaagaaaaagctcctgaattgcccaaaccaaagaaaaacagatgtttcatgtgcagaaagaaagttggtcttacagggtttgactgccgatgtggaaatttgttttgtggacttcaccgttactctgacaagcacaactgtccgtatgattacaaagcagaagctgcagcaaaaatcagaaaagagaatccagttgttgtggctgaaaaaattcagagaatataaattacttcttgtgaagagactgaaactttgtttttattttaatatatcgtaggaaaacattaaagagcagatgcatggccatttttctttgatgttctccagagttttacattacacttgtctgtcttataattgatattttaggatgtttgggtgtttgttacaggcagaattggatagatacagccctacaaatgtatatgccctcccctgaaaaaaattggatgaaaatctgcacagcaaagtgaaacacacagataataggaacaaaatgtagttcccatgtgccaaacaaaataaatgaaatctctgcatgtttgcagcatatctgccttttgggaatgtaatcaaggtataatctttggctagtgttatgtgcctgtatttttttaaaatggtacaccagaaaaggactggcagtctacttctaccatagttaaacttcaccctctttaatttcacaacatattctttggaagcaggaagaaatgctcataaagaggatcagaccttctttcccgtgaaaccagtatttggcgccatatataagcctggttaaattggtcatctaaagctgtcaaataagacattctgtgaaaggtaaacatcgaaactggttataagtaaaaccatcaagccaacaacagggtcttgagataacctttgaagcttattgtactggcctgcaccagaagatgtctgcattactcattgctaaaaatgtgtagcacagaactgcactaggattaatttgtttacaagaagaaatttaaactctacgtttggttttcacatacagcagctctattgaataacatgcatctgaattttaagttgcaaaggtatctgaataatttttcatgtgcatcttttgtcgaatgttttggttcaagaaagaatgtttaaagctttttaaaagacttcagttcttaatgtaactgtacccttctgcatggaaaatcataaccaacatggctgcagtagacttcttagtggtatccagcgccacttgcagagggctgctttatcatattgtacttgggtgtaggactctagtgttcttgggtgtattgcatgggctgcattatctacagcattgtacaataacaactagaaaaggcagtatacttcactgatgcttgtctggtaataatcacttctgtgttataatggaaggttttttgtgatgtatgaaacttgtgttttttatatataaatgagtatagttagtgttgtggtaatgcctgttttcatctgtaaatagttaagtatgtacacgaggcactacttctgatttattgcaatgttcagtcctagtttttacttttattcttaaagcattcagttttgctttcaattttatgtaccttagttctgagttagacctgcagatgtgtacagatagttcatatttatgtattgcacataatcatgctattcagcattgatgctatattgtattatgtaaataataaaagccatgtacagagggaaa

SEQ ID NO: 301267 - DNA, 2936 bp, Homo sapiens
catcctccacaggactcgctcttcccagctccaccctaggggccgactgccaggccagtggctgggctccgcgagaaggcacagcaacccgtctcggccccgcctcctggacctactgacagggcaccgggggcgtggccttgggcccgcgacgtcaccgcgctccccgccgccgccgccgccgccggggttttcgctgacgcacgggtcccgccccctccccctcttttccctcacagcccgggcgccgggcggcgagtgcgttagtcggccgggacgcggagctgtgtgcatctcctacgcgggctcgctcgctcccgggagccgcgcagcttccccggcggtggcaggagcggcgaagagcgccatcagcgggcccttacggccccaggcctcgcggcgcgcggtccgctcgccctcttcgtccgcccaacctgcggcctgtggaggcgtgaggcgacgacaggcgagcgcctcgagcagcgttagccgctgcggccgccggtcctccctccacctcctcctcggccccccctcgcttccctcctcccacttcccgagctccggcgtgtcccggccacgctcgacgctgctgcaggaacaaaggaagaccccgcggcggcggcggcgccacctccgcctgctgctccgacccgctcccggcccgcggcggcggcaccagggcgcccggctcagccttcccggaggcctcggcccggcctcatcgtgccggcttcgcgcgcgaacccggctttcgcatttgggaccctgcagggccctgaaaaggagcctttaaaagtcaattctactccatttggcaaagagggaactgaaatctggaaagtaaggacttgcccaaggtcactgacttagtggcagactagagacttgaactcaggtctccattcccagcagaaaaatatggctcaggagactaaccagaccccggggcccatgctgtgtagcacaggatgtggcttttatggaaatcctaggacaaatggaatgtgttcagtttgctacaaagaacatcttcagaggcagcaaaatagtggcagaatgagcccaatggggacagctagtggttccaacagtcctacctcagattctgcatctgtacagagagcagacactagcttaaacaactgtgaaggtgctgctggcagttgtcactcagcccagtccatcagtttctcagcccagtacttctcagagtgaagaaaaagctcctgaattgcccaaaccaaagaaaaacagatgtttcatgtgcagaaagaaagttggtcttacagggtttgactgccgatgtggaaatttgttttgtggacttcaccgttactctgacaagcacaactgtccgtatgattacaaagcagaagctgcagcaaaaatcagaaaagagaatccagttgttgtggctgaaaaaattcagagaatataaattacttcttgtgaagagactgaaactttgtttttattttaatatatcgtaggaaaacattaaagagcagatgcatggccatttttctttgatgttctccagagttttacattacacttgtctgtcttataattgatattttaggatgtttgggtgtttgttacaggcagaattggatagatacagccctacaaatgtatatgccctcccctgaaaaaaattggatgaaaatctgcacagcaaagtgaaacacacagataataggaacaaaatgtagttcccatgtgccaaacaaaataaatgaaatctctgcatgtttgcagcatatctgccttttgggaatgtaatcaaggtataatctttggctagtgttatgtgcctgtatttttttaaaatggtacaccagaaaaggactggcagtctacttctaccatagttaaacttcaccctctttaatttcacaacatattctttggaagcaggaagaaatgctcataaagaggatcagaccttctttcccgtgaaaccagtatttggcgccatatataagcctggttaaattggtcatctaaagctgtcaaataagacattctgtgaaaggtaaacatcgaaactggttataagtaaaaccatcaagccaacaacagggtcttgagataacctttgaagcttattgtactggcctgcaccagaagatgtctgcattactcattgctaaaaatgtgtagcacagaactgcactaggattaatttgtttacaagaagaaatttaaactctacgtttggttttcacatacagcagctctattgaataacatgcatctgaattttaagttgcaaaggtatctgaataatttttcatgtgcatcttttgtcgaatgttttggttcaagaaagaatgtttaaagctttttaaaagacttcagttcttaatgtaactgtacccttctgcatggaaaatcataaccaacatggctgcagtagacttcttagtggtatccagcgccacttgcagagggctgctttatcatattgtacttgggtgtaggactctagtgttcttgggtgtattgcatgggctgcattatctacagcattgtacaataacaactagaaaaggcagtatacttcactgatgcttgtctggtaataatcacttctgtgttataatggaaggttttttgtgatgtatgaaacttgtgttttttatatataaatgagtatagttagtgttgtggtaatgcctgttttcatctgtaaatagttaagtatgtacacgaggcactacttctgatttattgcaatgttcagtcctagtttttacttttattcttaaagcattcagttttgctttcaattttatgtaccttagttctgagttagacctgcagatgtgtacagatagttcatatttatgtattgcacataatcatgctattcagcattgatgctatattgtattatgtaaataataaaagccatgtacagagggaaa

SEQ ID NO: 301268 - DNA, 3453 bp, Homo sapiens
catcctccacaggactcgctcttcccagctccaccctaggggccgactgccaggccagtggctgggctccgcgagaaggcacagcaacccgtctcggccccgcctcctggacctactgacagggcaccgggggcgtggccttgggcccgcgacgtcaccgcgctccccgccgccgccgccgccgccggggttttcgctgacgcacgggtcccgccccctccccctcttttccctcacagcccgggcgccgggcggcgagtgcgttagtcggccgggacgcggagctgtgtgcatctcctacgcgggctcgctcgctcccgggagccgcgcagcttccccggcggtggcaggagcggcgaagagcgccatcagcgggcccttacggccccaggcctcgcggcgcgcggtccgctcgccctcttcgtccgcccaacctgcggcctgtggaggcgtgaggcgacgacaggcgagcgcctcgagcagcgttagccgctgcggccgccggtcctccctccacctcctcctcggccccccctcgcttccctcctcccacttcccgagctccggcgtgtcccggccacgctcgacgctgctgcaggaacaaaggaagaccccgcggcggcggcggcgccacctccgcctgctgctccgacccgctcccggcccgcggcggcggcaccagggcgcccggctcagccttcccggaggcctcggcccggcctcatcgtgccggcttcgcgcgcgaacccggctttcgcatttgggaccctgcagggccctgaaaaggagcctttaaaagtcaattctactccatttggcaaagagggaactgaaatctggaaagtaaggacttgcccaaggtcactgacttagtggcagactagagacttgaactcaggtctccattcccagcagaaaaatatggctcaggagactaaccagaccccggggcccatgctgtgtagcacaggatgtggcttttatggaaatcctaggacaaatggaatgtgttcagtttgctacaaagaacatcttcagaggcagcaaaatagtggcagaatgagcccaatggggacagctagtggttccaacagtcctacctcagattctgcatctgtacagagagcagacactagcttaaacaactgtgaaggtgctgctggcagcacatctgaaaaatcaagaaatgtgcctgtggctgccttgcctgtaactcagcaaatgacagaaatgagcatttcaagagaggacaaaataactaccccgaaaacagaggtgtcagagccagttgtcactcagcccagtccatcagtttctcagcccagtacttctcagagtgaagaaaaagctcctgaattgcccaaaccaaagaaaaacagatgtttcatgtgcagaaagaaagttggtcttacagggtttgactgccgatgtggaaatttgttttgtggacttcaccgttactctgacaagcacaactgtccgtatgattacaaagcagaagctgcagcaaaaatcagaaaagagaatccagttgttgtggctgaaaaaattcagagaatataaattacttcttgtgaagagactgaaactttgtttttattttaatatatcgtaggaaaacattaaagagcagatgcatggccatttttctttgatgttctccagagttttacattacacttgtctgtcttataattgatattttaggatgtttgggtgtttgttacaggcagaattggatagatacagccctacaaatgtatatgccctcccctgaaaaaaattggatgaaaatctgcacagcaaagtgaaacacacagataataggaacaaaatgtagttcccatgtgccaaacaaaataaatgaaatctctgcatgtttgcagcatatctgccttttgggaatgtaatcaaggtataatctttggctagtgttatgtgcctgtatttttttaaaatggtacaccagaaaaggactggcagtctacttctaccatagttaaacttcaccctctttaatttcacaacatattctttggaagcaggaagaaatgctcataaagaggatcagaccttctttcccgtgaaaccagtatttggcgccatatataagcctggttaaattggtcatctaaagctgtcaaataagacattctgtgaaaggtaaacatcgaaactggttataagtaaaaccatcaagccaacaacagggtcttgagataacctttgaagcttattgtactggcctgcaccagaagatgtctgcattactcattgctaaaaatgtgtagcacagaactgcactaggattaatttgtttacaagaagaaatttaaactctacgtttggttttcacatacagcagctctattgaataacatgcatctgaattttaagttgcaaaggtatctgaataatttttcatgtgcatcttttgtcgaatgttttggttcaagaaagaatgtttaaagctttttaaaagacttcagttcttaatgtaactgtacccttctgcatggaaaatcataaccaacatggctgcagtagacttcttagtggtatccagcgccacttgcagagggctgctttatcatattgtacttgggtgtaggactctagtgttcttgggtgtattgcatgggctgcattatctacagcattgtacaataacaactagaaaaggcagtatacttcactgatgcttgtctggtaataatcacttctgtgttataatggaaggttttttgtgatgtatgaaacttgtgttttttatatataaatgagtatagttagtgttgtggtaatgcctgttttcatctgtaaatagttaagtatgtacacgaggcactacttctgatttattgcaatgttcagtcctagtttttacttttattcttaaagcattcagttttgctttcaattttatgtaccttagttctgagttagacctgcagatgtgtacagatagttcatatttatgtattgcacataatcatgctattcagcattgatgctatattgtattatgtaaataataaaagccatgtacagagggaaaacttcacttgttcattgggtttttaagccatagttggagtcctaaagggggaaaattagaaaatgttactttacatggctatataattttttttcctttgccatcgctgaacttgttcaagtgataatcaagagatattagaagcatttgcaggtatgatacctgataggcagtttatttttgaagaattcaataggcacctttgggattaaaacaattttaaaatttgagaaagatgaaatttgaacaattatggcctacctcgcttctccatgttgtaaaagatgatgttttatgataattctgaagaagaaagtaggtatgacttagtttacaaaaagagttctgttttatttctgttttgggtttggctctaatacagagattcacccatg

SEQ ID NO: 301269 - DNA, 3005 bp, Homo sapiens
catcctccacaggactcgctcttcccagctccaccctaggggccgactgccaggccagtggctgggctccgcgagaaggcacagcaacccgtctcggccccgcctcctggacctactgacagggcaccgggggcgtggccttgggcccgcgacgtcaccgcgctccccgccgccgccgccgccgccggggttttcgctgacgcacgggtcccgccccctccccctcttttccctcacagcccgggcgccgggcggcgagtgcgttagtcggccgggacgcggagctgtgtgcatctcctacgcgggctcgctcgctcccgggagccgcgcagcttccccggcggtggcaggagcggcgaagagcgccatcagcgggcccttacggccccaggcctcgcggcgcgcggtccgctcgccctcttcgtccgcccaacctgcggcctgtggaggcgtgaggcgacgacaggcgagcgcctcgagcagcgttagccgctgcggccgccggtcctccctccacctcctcctcggccccccctcgcttccctcctcccacttcccgagctccggcgtgtcccggccacgctcgacgctgctgcaggaacaaaggaagaccccgcggcggcggcggcgccacctccgcctgctgctccgacccgctcccggcccgcggcggcggcaccagggcgcccggctcagccttcccggaggcctcggcccggcctcatcgtgccggcttcgcgcgcgaacccggctttcgcatttgggaccctgcagggccctgaaaaggagcctttaaaagtcaattctactccatttggcaaagagggaactgaaatctggaaagtaaggacttgcccaaggtcactgacttagtggcagactagagacttgaactcaggtctccattcccagcagaaaaatatggctcaggagactaaccagaccccggggcccatgctgtgtagcacaggatgtggcttttatggaaatcctaggacaaatggaatgtgttcagtttgctacaaagaacatcttcagaggcagcaaaatagtggcagaatgagcccaatggggacagctagtggttccaacagtcctacctcagattctgcatctgtacagagagcagacactagcttaaacaactgtgaaggtgctgctggcagcacatctgaaaaatcaagaaatgtgcctgtggctgccttgcctgtaactcagcaaatgacagaaatgagcatttcaagagaggacaaaataactaccccgaaaacagaggtgtcagagccagttgtcactcagcccagtccatcagtttctcagcccagtacttctcagagtgaagaaaaagctcctgaattgcccaaaccaaagaaaaacagatgtttcatgtgcagaaagaaagttggtcttacagggtttgactgccgatgtggaaatttgttttgtggacttcaccgttactctgacaagcacaactgtccgtatgattacaaagcagaagctgcagcaaaaatcagaaaagagaatccagttgttgtggctgaaaaaattcagagaatataaattacttcttgtgaagagactgaaactttgtttttattttaatatatcgtaggaaaacattaaagagcagatgcatggccatttttctttgatgttctccagagttttacattacacttgtctgtcttataattgatattttaggatgtttgggtgtttgttacaggcagaattggatagatacagccctacaaatgtatatgccctcccctgaaaaaaattggatgaaaatctgcacagcaaagtgaaacacacagataataggaacaaaatgtagttcccatgtgccaaacaaaataaatgaaatctctgcatgtttgcagcatatctgccttttgggaatgtaatcaaggtataatctttggctagtgttatgtgcctgtatttttttaaaatggtacaccagaaaaggactggcagtctacttctaccatagttaaacttcaccctctttaatttcacaacatattctttggaagcaggaagaaatgctcataaagaggatcagaccttctttcccgtgaaaccagtatttggcgccatatataagcctggttaaattggtcatctaaagctgtcaaataagacattctgtgaaaggtaaacatcgaaactggttataagtaaaaccatcaagccaacaacagggtcttgagataacctttgaagcttattgtactggcctgcaccagaagatgtctgcattactcattgctaaaaatgtgtagcacagaactgcactaggattaatttgtttacaagaagaaatttaaactctacgtttggttttcacatacagcagctctattgaataacatgcatctgaattttaagttgcaaaggtatctgaataatttttcatgtgcatcttttgtcgaatgttttggttcaagaaagaatgtttaaagctttttaaaagacttcagttcttaatgtaactgtacccttctgcatggttgcagagggctgctttatcatattgtacttgggtgtaggactctagtgttcttgggtgtattgcatgggctgcattatctacagcattgtacaataacaactagaaaaggcagtatacttcactgatgcttgtctggtaataatcacttctgtgttataatggaaggttttttgtgatgtatgaaacttgtgttttttatatataaatgagtatagttagtgttgtggtaatgcctgttttcatctgtaaatagttaagtatgtacacgaggcactacttctgatttattgcaatgttcagtcctagtttttacttttattcttaaagcattcagttttgctttcaattttatgtaccttagttctgagttagacctgcagatgtgtacagatagttcatatttatgtattgcacataatcatgctattcagcattgatgctatattgtattatgtaaataataaaagccatgtacagagggaaa

SEQ ID NO: 301270 - DNA, 2152 bp, Homo sapiens
ttcaatttctacaccacagcactaattcacattataaccacctgtcagctcatttgctctcttctctaagctattaaagtccaagacggcagagcctctatcatgtttaacactgtacccccaaacctacagggtctagtacagaatagacagtaaatctttgttgaaagaacgttcaatttctacactcctacctcagattctgcatctgtacagagagcagacactagcttaaacaactgtgaaggtgctgctggcagcacatctgaaaaatcaagaaatgtgcctgtggctgccttgcctgtaactcagcaaatgacagaaatgagcatttcaagagaggacaaaataactaccccgaaaacagaggtgtcagagccagttgtcactcagcccagtccatcagtttctcagcccagtacttctcagagtgaagaaaaagctcctgaattgcccaaaccaaagaaaaacagatgtttcatgtgcagaaagaaagttggtcttacagggtttgactgccgatgtggaaatttgttttgtggacttcaccgttactctgacaagcacaactgtccgtatgattacaaagcagaagctgcagcaaaaatcagaaaagagaatccagttgttgtggctgaaaaaattcagagaatataaattacttcttgtgaagagactgaaactttgtttttattttaatatatcgtaggaaaacattaaagagcagatgcatggccatttttctttgatgttctccagagttttacattacacttgtctgtcttataattgatattttaggatgtttgggtgtttgttacaggcagaattggatagatacagccctacaaatgtatatgccctcccctgaaaaaaattggatgaaaatctgcacagcaaagtgaaacacacagataataggaacaaaatgtagttcccatgtgccaaacaaaataaatgaaatctctgcatgtttgcagcatatctgccttttgggaatgtaatcaaggtataatctttggctagtgttatgtgcctgtatttttttaaaatggtacaccagaaaaggactggcagtctacttctaccatagttaaacttcaccctctttaatttcacaacatattctttggaagcaggaagaaatgctcataaagaggatcagaccttctttcccgtgaaaccagtatttggcgccatatataagcctggttaaattggtcatctaaagctgtcaaataagacattctgtgaaaggtaaacatcgaaactggttataagtaaaaccatcaagccaacaacagggtcttgagataacctttgaagcttattgtactggcctgcaccagaagatgtctgcattactcattgctaaaaatgtgtagcacagaactgcactaggattaatttgtttacaagaagaaatttaaactctacgtttggttttcacatacagcagctctattgaataacatgcatctgaattttaagttgcaaaggtatctgaataatttttcatgtgcatcttttgtcgaatgttttggttcaagaaagaatgtttaaagctttttaaaagacttcagttcttaatgtaactgtacccttctgcatggaaaatcataaccaacatggctgcagtagacttcttagtggtatccagcgccacttgcagagggctgctttatcatattgtacttgggtgtaggactctagtgttcttgggtgtattgcatgggctgcattatctacagcattgtacaataacaactagaaaaggcagtatacttcactgatgcttgtctggtaataatcacttctgtgttataatggaaggttttttgtgatgtatgaaacttgtgttttttatatataaatgagtatagttagtgttgtggtaatgcctgttttcatctgtaaatagttaagtatgtacacgaggcactacttctgatttattgcaatgttcagtcctagtttttacttttattcttaaagcattcagttttgctttcaattttatgtaccttagttctgagttagacctgcagatgtgtacagatagttcatatttatgtattgcacataatcatgctattcagcattgatgctatattgtattatgtaaataataaaagccatgtacagagggaaa

SEQ ID NO: 301271 - DNA, 3003 bp, Homo sapiens
catcctccacaggactcgctcttcccagctccaccctaggggccgactgccaggccagtggctgggctccgcgagaaggcacagcaacccgtctcggccccgcctcctggacctactgacagggcaccgggggcgtggccttgggcccgcgacgtcaccgcgctccccgccgccgccgccgccgccggggttttcgctgacgcacgggtcccgccccctccccctcttttccctcacagcccgggcgccgggcggcgagtgcgttagtcggccgggacgcggagctgtgtgcatctcctacgcgggctcgctcgctcccgggagccgcgcagcttccccggcggtggcaggagcggcgaagagcgccatcagcgggcccttacggccccaggcctcgcggcgcgcggtccgctcgccctcttcgtccgcccaacctgcggcctgtggaggcgtgaggcgacgacaggcgagcgcctcgagcagcgttagccgctgcggccgccggtcctccctccacctcctcctcggccccccctcgcttccctcctcccacttcccgagctccggcgtgtcccggccacgctcgacgctgctgcaggaacaaaggaagaccccgcggcggcggcggcgccacctccgcctgctgctccgacccgctcccggcccgcggcggcggcaccagggcgcccggctcagccttcccggaggcctcggcccggcctcatcgtgccggcttcgcgcgcgaacccggctttcgcatttgggaccctgcagggccctgaaaaggagcctttaaaagtcaattctactccatttggcaaagagggaactgaaatctggaaagtaaggacttgcccaaggtcactgacttagtggcagactagagacttgaactcaggtctccattcccagcagaaaaatatggctcaggagactaaccagaccccggggcccatgctgtgtagcacaggatgtggcttttatggaaatcctaggacaaatggaatgtgttcagtttgctacaaagaacatcttcagaggcagcaaaatagtggcagaatgagcccaatggggacagctagtggttccaacagtcctacctcagattctgcatctgtacagagagcagacactagcttaaacaactgtgaaggtgctgctggcagcacatctgaaaaatcaagaaatgtgcctgtggctgccttgcctgtaactcagcaaatgacagaaatgagcatttcaagagaggacaaaataactaccccgaaaacagaggtgtcagagccagttgtcactcagcccagtccatcagtttctcagcccagtacttctcagagtgaagaaaaagctcctgaattgcccaaaccaaagaaaaacagatgtttcatgtgcagaaagaaagttggtcttacagggtttgactgccgatgtggaaatttgttttgtggacttcaccgttactctgacaagcacaactgtccgtatgattacaaagcagaagctgcagcaaaaatcagaaaagagaatccagttgttgtggctgaaaaaattcagagaatataaattacttcttgtgaagagactgaaactttgtttttattttaatatatcgtaggaaaacattaaagagcagatgcatggccatttttctttgatgttctccagagttttacattacacttgtctgtcttataattgatattttaggatgtttgggtgtttgttacaggcagaattggatagatacagccctacaaatgtatatgccctcccctgaaaaaaattggatgaaaatctgcacagcaaagtgaaacacacagataataggaacaaaatgtagttcccatgtgccaaacaaaataaatgaaatctctgcatgtttgcagcatatctgccttttgggaatgtaatcaaggtataatctttggctagtgttatgtgcctgtatttttttaaaatggtacaccagaaaaggactggcagtctacttctaccatagttaaacttcaccctctttaatttcacaacatattctttggaagcaggaagaaatgctcataaagaggatcagaccttctttcccgtgaaaccagtatttggcgccatatataagcctggttaaattggtcatctaaagctgtcaaataagacattctgtgaaaggtaaacatcgaaactggttataagtaaaaccatcaagccaacaacagggtcttgagataacctttgaagcttattgtactggcctgcaccagaagatgtctgcattactcattgttaaactctacgtttggttttcacatacagcagctctattgaataacatgcatctgaattttaagttgcaaaggtatctgaataatttttcatgtgcatcttttgtcgaatgttttggttcaagaaagaatgtttaaagctttttaaaagacttcagttcttaatgtaactgtacccttctgcatggaaaatcataaccaacatggctgcagtagacttcttagtggtatccagcgccacttgcagagggctgctttatcatattgtacttgggtgtaggactctagtgttcttgggtgtattgcatgggctgcattatctacagcattgtacaataacaactagaaaaggcagtatacttcactgatgcttgtctggtaataatcacttctgtgttataatggaaggttttttgtgatgtatgaaacttgtgttttttatatataaatgagtatagttagtgttgtggtaatgcctgttttcatctgtaaatagttaagtatgtacacgaggcactacttctgatttattgcaatgttcagtcctagtttttacttttattcttaaagcattcagttttgctttcaattttatgtaccttagttctgagttagacctgcagatgtgtacagatagttcatatttatgtattgcacataatcatgctattcagcattgatgctatattgtattatgtaaataataaaagccatgtacagagggaaa

SEQ ID NO: 301272 - DNA, 3064 bp, Homo sapiens
agatgtggccaaagaaatggctgacaccctccctctaccccatacaactattcccctagattattctttatcctcatgacatcaggataaacattaatgttgtcacagtagcagtaggtagaatattgttcgtttagtctaatattaggctatttctcccagtagattcattgctaatgcaattgaattataaatttgggcagagttttagagaaaattgccattaaatcaatcagcttgttgtaggagcttgtctatatgctaatagcattggtgctggcatatttgggcagtaatttcagcattgcatacataaatttgctattgttacatttggattaatattaaaacctgagtttatagtgtttcaggtgtagttgaattatatgtaagtagatataaattttgttatttttgtgttaaagaactagtggcagtgtgggctttagtacagtaatgtattttttgttcattgtgagaaattttattgatgccatgtgtacactgaaacttaaagcctttttaggtggagaaacggtgggactgtttgtagatgctatctctgtcgatagtggatgcccattttagataagattcttgttctgcctgtggaatccttaatagtttaaaatcaatacttctcgagtagtttctaaagactgtttgccgatctgtttttaaaaccaaggtttaaaaaaatctttcaagtcttcctatgatgtttagtgcacctgtgaaaatggtaaaatgattgttttggaatttttggatctgacgttgatttagggatgaatggtttgagttttatttgtcaaaatttgctgtttttatatctacaggattttttttcctataagcataaaatcaaagttggctactgttatttactgtgatgtaatgaatttgaactgccctgattgaaaagtttgcatttaggaaattataacgtggaaaaactgagcatatgattaacatctcccagctctttaaaacagaattaggattttgtttttagtactggctgttaccagtgttttaaaggaatttcttgagtgaagcgatcattttacaaaattagagaagcaagtagtatggtgattggcaggaatttctcagatttgaatcaagttctgatgttaaaatggaagattctgtttaaagcttgtattttcaaggaatacttataaacatttttatcaggcatcttcctgtttctcttaaatacttccttttttgacttaaaaatgttagccagtgaatgcttgacaaatttgtgtttttgtccttttcagttttgtcactcagcccagtccatcagtttctcagcccagtacttctcagagtgaagaaaaagctcctgaattgcccaaaccaaagaaaaacagatgtttcatgtgcagaaagaaagttggtcttacagggtttgactgccgatgtggaaatttgttttgtggacttcaccgttactctgacaagcacaactgtccgtatgattacaaagcagaagctgcagcaaaaatcagaaaagagaatccagttgttgtggctgaaaaaattcagagaatataaattacttcttgtgaagagactgaaactttgtttttattttaatatatcgtaggaaaacattaaagagcagatgcatggccatttttctttgatgttctccagagttttacattacacttgtctgtcttataattgatattttaggatgtttgggtgtttgttacaggcagaattggatagatacagccctacaaatgtatatgccctcccctgaaaaaaattggatgaaaatctgcacagcaaagtgaaacacacagataataggaacaaaatgtagttcccatgtgccaaacaaaataaatgaaatctctgcatgtttgcagcatatctgccttttgggaatgtaatcaaggtataatctttggctagtgttatgtgcctgtatttttttaaaatggtacaccagaaaaggactggcagtctacttctaccatagttaaacttcaccctctttaatttcacaacatattctttggaagcaggaagaaatgctcataaagaggatcagaccttctttcccgtgaaaccagtatttggcgccatatataagcctggttaaattggtcatctaaagctgtcaaataagacattctgtgaaaggtaaacatcgaaactggttataagtaaaaccatcaagccaacaacagggtcttgagataacctttgaagcttattgtactggcctgcaccagaagatgtctgcattactcattgctaaaaatgtgtagcacagaactgcactaggattaatttgtttacaagaagaaatttaaactctacgtttggttttcacatacagcagctctattgaataacatgcatctgaattttaagttgcaaaggtatctgaataatttttcatgtgcatcttttgtcgaatgttttggttcaagaaagaatgtttaaagctttttaaaagacttcagttcttaatgtaactgtacccttctgcatggaaaatcataaccaacatggctgcagtagacttcttagtggtatccagcgccacttgcagagggctgctttatcatattgtacttgggtgtaggactctagtgttcttgggtgtattgcatgggctgcattatctacagcattgtacaataacaactagaaaaggcagtatacttcactgatgcttgtctggtaataatcacttctgtgttataatggaaggttttttgtgatgtatgaaacttgtgttttttatatataaatgagtatagttagtgttgtggtaatgcctgttttcatctgtaaatagttaagtatgtacacgaggcactacttctgatttattgcaatgttcagtcctagtttttacttttattcttaaagcattcagttttgctttcaattttatgtaccttagttctgagttagacctgcagatgtgtacagatagttcatatttatgtattgcacataatcatgctattcagcattgatgctatattgtattatgtaaataataaaagccatgtacagagggaaa

SEQ ID NO: 301273 - DNA, 1714 bp, Homo sapiens
ccggtggggtgatcggccgaggaaacacgaaaacagatgttcatgtgcagaaagaaagttggtcttacagggtttgactgccgatgtggaaatttgttttgtggacttcaccgttactctgacaagcacaactgtccgtatgattacaaagcagaagctgcagcaaaaatcagaaaagagaatccagttgttgtggctgaaaaaattcagagaatataaattacttcttgtgaagagactgaaactttgtttttattttaatatatcgtaggaaaacattaaagagcagatgcatggccatttttctttgatgttctccagagttttacattacacttgtctgtcttataattgatattttaggatgtttgggtgtttgttacaggcagaattggatagatacagccctacaaatgtatatgccctcccctgaaaaaaattggatgaaaatctgcacagcaaagtgaaacacacagataataggaacaaaatgtagttcccatgtgccaaacaaaataaatgaaatctctgcatgtttgcagcatatctgccttttgggaatgtaatcaaggtataatctttggctagtgttatgtgcctgtatttttttaaaatggtacaccagaaaaggactggcagtctacttctaccatagttaaacttcaccctctttaatttcacaacatattctttggaagcaggaagaaatgctcataaagaggatcagaccttctttcccgtgaaaccagtatttggcgccatatataagcctggttaaattggtcatctaaagctgtcaaataagacattctgtgaaaggtaaacatcgaaactggttataagtaaaaccatcaagccaacaacagggtcttgagataacctttgaagcttattgtactggcctgcaccagaagatgtctgcattactcattgctaaaaatgtgtagcacagaactgcactaggattaatttgtttacaagaagaaatttaaactctacgtttggttttcacatacagcagctctattgaataacatgcatctgaattttaagttgcaaaggtatctgaataatttttcatgtgcatcttttgtcgaatgttttggttcaagaaagaatgtttaaagctttttaaaagacttcagttcttaatgtaactgtacccttctgcatggaaaatcataaccaacatggctgcagtagacttcttagtggtatccagcgccacttgcagagggctgctttatcatattgtacttgggtgtaggactctagtgttcttgggtgtattgcatgggctgcattatctacagcattgtacaataacaactagaaaaggcagtatacttcactgatgcttgtctggtaataatcacttctgtgttataatggaaggttttttgtgatgtatgaaacttgtgttttttatatataaatgagtatagttagtgttgtggtaatgcctgttttcatctgtaaatagttaagtatgtacacgaggcactacttctgatttattgcaatgttcagtcctagtttttacttttattcttaaagcattcagttttgctttcaattttatgtaccttagttctgagttagacctgcagatgtgtacagatagttcatatttatgtattgcacataatcatgctattcagcattgatgctatattgtattatgtaaataataaaagccatgtacagagggaaa

SEQ ID NO: 301274 - DNA, 2125 bp, Homo sapiens
ctcagaccttgatggttgttttcacttgaggaagcattacttaagatatggtaggactgtgttttgaatccagcttagcctaactccagagcctgtgtaaattttatcctgcgttgcatctacaggagtcgatagagggagagcatctggtagaaattagctggcagatagcccattttgttttctccacgtggtttggcttaccaaacacttcgctattgcccttgcaaggaaagactgaacatagttatttgaatttctcaccatgtcaaaggaagttaaaagttccttttccaggttaacgtgatagactctgtaagagttgactgtgtcttatcaccaggaagtggaagaaaagagttcactgtcttttatgttacaaagcaatgaaaatctggttccttttctatagtgactaaggctttttttttcttttaattgcctcaagttctcaaatgactctacttcttcgtttgtacagggtttgactgccgatgtggaaatttgttttgtggacttcaccgttactctgacaagcacaactgtccgtatgattacaaagcagaagctgcagcaaaaatcagaaaagagaatccagttgttgtggctgaaaaaattcagagaatataaattacttcttgtgaagagactgaaactttgtttttattttaatatatcgtaggaaaacattaaagagcagatgcatggccatttttctttgatgttctccagagttttacattacacttgtctgtcttataattgatattttaggatgtttgggtgtttgttacaggcagaattggatagatacagccctacaaatgtatatgccctcccctgaaaaaaattggatgaaaatctgcacagcaaagtgaaacacacagataataggaacaaaatgtagttcccatgtgccaaacaaaataaatgaaatctctgcatgtttgcagcatatctgccttttgggaatgtaatcaaggtataatctttggctagtgttatgtgcctgtatttttttaaaatggtacaccagaaaaggactggcagtctacttctaccatagttaaacttcaccctctttaatttcacaacatattctttggaagcaggaagaaatgctcataaagaggatcagaccttctttcccgtgaaaccagtatttggcgccatatataagcctggttaaattggtcatctaaagctgtcaaataagacattctgtgaaaggtaaacatcgaaactggttataagtaaaaccatcaagccaacaacagggtcttgagataacctttgaagcttattgtactggcctgcaccagaagatgtctgcattactcattgctaaaaatgtgtagcacagaactgcactaggattaatttgtttacaagaagaaatttaaactctacgtttggttttcacatacagcagctctattgaataacatgcatctgaattttaagttgcaaaggtatctgaataatttttcatgtgcatcttttgtcgaatgttttggttcaagaaagaatgtttaaagctttttaaaagacttcagttcttaatgtaactgtacccttctgcatggaaaatcataaccaacatggctgcagtagacttcttagtggtatccagcgccacttgcagagggctgctttatcatattgtacttgggtgtaggactctagtgttcttgggtgtattgcatgggctgcattatctacagcattgtacaataacaactagaaaaggcagtatacttcactgatgcttgtctggtaataatcacttctgtgttataatggaaggttttttgtgatgtatgaaacttgtgttttttatatataaatgagtatagttagtgttgtggtaatgcctgttttcatctgtaaatagttaagtatgtacacgaggcactacttctgatttattgcaatgttcagtcctagtttttacttttattcttaaagcattcagttttgctttcaattttatgtaccttagttctgagttagacctgcagatgtgtacagatagttcatatttatgtattgcacataatcatgctattcagcattgatgctatattgtattatgtaaataataaaagccatgtacagagggaaa

SEQ ID NO: 301275 - DNA, 2281 bp, Homo sapiens
catcctccacaggactcgctcttcccagctccaccctaggggccgactgccaggccagtggctgggctccgcgagaaggcacagcaacccgtctcggccccgcctcctggacctactgacagggcaccgggggcgtggccttgggcccgcgacgtcaccgcgctccccgccgccgccgccgccgccggggttttcgctgacgcacgggtcccgccccctccccctcttttccctcacagcccgggcgccgggcggcgagtgcgttagtcggccgggacgcggagctgtgtgcatctcctacgcgggctcgctcgctcccgggagccgcgcagcttccccggcggtggcaggagcggcgaagagcgccatcagcgggcccttacggccccaggcctcgcggcgcgcggtccgctcgccctcttcgtccgcccaacctgcggcctgtggaggcgtgaggcgacgacaggcgagcgcctcgagcagcgttagccgctgcggccgccggtcctccctccacctcctcctcggccccccctcgcttccctcctcccacttcccgagctccggcgtgtcccggccacgctcgacgctgctgcaggaacaaaggaagaccccgcggcggcggcggcgccacctccgcctgctgctccgacccgctcccggcccgcggcggcggcaccagggcgcccggctcagccttcccggaggcctcggcccggcctcatcgtgccggcttcgcgcgcgaacccggctttcgcatttgggaccctgcagggccctgaaaaggagcctttaaaagtcaattctactccatttggcaaagagggaactgaaatctggaaagtaaggacttgcccaaggtcactgacttagtggcagactagagacttgaactcaggtctccattcccagcagaaaaatatggctcaggagactaaccagaccccggggcccatgctgtgtagcacaggatgtggcttttatggaaatcctaggacaaatggaatgtgttcagtttgctacaaagaacatcttcagaggcagcaaaatagtggcagaatgagcccaatggggacagctagtggttccaacagtcctacctcagattctgcatctgtacagagagcagacactagcttaaacaactgtgaaggtgctgctggcagcacatctgaaaaatcaagaaatgtgcctgtggctgccttgcctgtaactcagcaaatgacagaaatgagcatttcaagagaggacaaaataactaccccgaaaacagaggtgtcagagccagttgtcactcagcccagtccatcagtttctcagcccagtacttctcagagtgaagaaaaagctcctgaattgcccaaaccaaagaaaaacagatgtttcatgtgcagaaagaaagttggtcttacagggtttgactgccgatgtggaaatttgttttgtggacttcaccgttactctgacaagcacaactgtccgtatgattacaaagcagaagctgcagcaaaaatcagaaaagagaatccagttgttgtggctgaaaaaattcagagaatataaattacttcttgtgaagagactgaaactttgtttttattttaatatatcgtaggaaaacattaaagagcagatgcatggccatttttctttgatgttctccagagttttacattacacttgtctgtcttataattgatattttaggatgtttgggtgtttgttacaggcagaattggatagatacagccctacaaatgtatatgccctcccctgaaaaaaattggatgaaaatctgcacagcaaagtgaaacacacagataataggaacaaaatgtagttcccatgtgccaaacaaaataaatgaaatctctgcatgtttgcagcatatctgccttttgggaatgtaatcaaggtataatctttggctagtgttatgtgcctgtatttttttaaaatggtacaccagaaaaggactggcagtctacttctaccatagttaaacttcaccctctttaatttcacaacatattctttggaagcaggaagaaatgctcataaagaggatcagaccttctttcccgtgaaaccagtatttggcgccatatataagcctggttaaattggtcatctaaagctgtcaaataagacattctgtgaaaggtaaacatcgaaactggttataattaggttaacctctaggcccaacaggggtttggagacacctcgaagtctatgtagggcgggcccacatggtggtttcctccgttcttctgttttt

SEQ ID NO: 301276 - DNA, 2226 bp, Homo sapiens
  misc_feature (2129)..(2129): n is a, c, g, or t
  misc_feature (2134)..(2134): n is a, c, g, or t
  misc_feature (2159)..(2159): n is a, c, g, or t
  misc_feature (2170)..(2170): n is a, c, g, or t
  misc_feature (2221)..(2221): n is a, c, g, or t
catcctccacaggactcgctcttcccagctccaccctaggggccgactgccaggccagtggctgggctccgcgagaaggcacagcaacccgtctcggccccgcctcctggacctactgacagggcaccgggggcgtggccttgggcccgcgacgtcaccgcgctccccgccgccgccgccgccgccggggttttcgctgacgcacgggtcccgccccctccccctcttttccctcacagcccgggcgccgggcggcgagtgcgttagtcggccgggacgcggagctgtgtgcatctcctacgcgggctcgctcgctcccgggagccgcgcagcttccccggcggtggcaggagcggcgaagagcgccatcagcgggcccttacggccccaggcctcgcggcgcgcggtccgctcgccctcttcgtccgcccaacctgcggcctgtggaggcgtgaggcgacgacaggcgagcgcctcgagcagcgttagccgctgcggccgccggtcctccctccacctcctcctcggccccccctcgcttccctcctcccacttcccgagctccggcgtgtcccggccacgctcgacgctgctgcaggaacaaaggaagaccccgcggcggcggcggcgccacctccgcctgctgctccgacccgctcccggcccgcggcggcggcaccagggcgcccggctcagccttcccggaggcctcggcccggcctcatcgtgccggcttcgcgcgcgaacccggctttcgcatttgggaccctgcagggccctgaaaaggagcctttaaaagtcaattctactccatttggcaaagagggaactgaaatctggaaagtaaggacttgcccaaggtcactgacttagtggcagactagagacttgaactcaggtctccattcccagcagaaaaatatggctcaggagactaaccagaccccggggcccatgctgtgtagcacaggatgtggcttttatggaaatcctaggacaaatggaatgtgttcagtttgctacaaagaacatcttcagaggcagcaaaatagtggcagaatgagcccaatggggacagctagtggttccaacagtcctacctcagattctgcatctgtacagagagcagacactagcttaaacaactgtgaaggtgctgctggcagcacatctgaaaaatcaagaaatgtgcctgtggctgccttgcctgtaactcagcaaatgacagaaatgagcatttcaagagaggacaaaataactaccccgaaaacagaggtgtcagagccagttgtcactcagcccagtccatcagtttctcagcccagtacttctcagagtgaagaaaaagctcctgaattgcccaaaccaaagaaaaacagatgtttcatgtgcagaaagaaagttggtcttacagggtttgactgccgatgtggaaatttgttttgtggacttcaccgttactctgacaagcacaactgtccgtatgattacaaagcagaagctgcagcaaaaatcagaaaagagaatccagttgttgtggctgaaaaaattcagagaatataaattacttcttgtgaagagactgaaactttgtttttattttaatatatcgtaggaaaacattaaagagcagatgcatggccatttttctttgatgttctccagagttttacattacacttgtctgtcttataattgatattttaggatgtttgggtgtttgttacaggcagaattggatagatacagccctacaaatgtatatgccctcccctgaaaaaaattggatgaaaatctgcacagcaaagtgaaacacacagataataggaacaaaatgtagttcccatgtgccaaacaaaataaatgaaatctctgcatgtttgcagcatatctgccttttgggaatgtaatcaaggtataatctttggctagtgttatgtgcctgtatttttttaaaatggtacaccagaaaaggactggcagtctacttctaccatagttaaacttcaccctctttaatttcacaacatattctttggaagcaggaagaaatgctcataaagaggatcagaccttctttcccgtgaaaccagtatttggcgccatatataagcctggttaaattgggncaatnctaaaagccggtcaaaattaggacnattcccggtgnaaaagggtaaacaatccgaaaacctggggttaaaaaggttaaaaacccatncaagg

SEQ ID NO: 301277 - DNA, 2308 bp, Homo sapiens
catcctccacaggactcgctcttcccagctccaccctaggggccgactgccaggccagtggctgggctccgcgagaaggcacagcaacccgtctcggccccgcctcctggacctactgacagggcaccgggggcgtggccttgggcccgcgacgtcaccgcgctccccgccgccgccgccgccgccggggttttcgctgacgcacgggtcccgccccctccccctcttttccctcacagcccgggcgccgggcggcgagtgcgttagtcggccgggacgcggagctgtgtgcatctcctacgcgggctcgctcgctcccgggagccgcgcagcttccccggcggtggcaggagcggcgaagagcgccatcagcgggcccttacggccccaggcctcgcggcgcgcggtccgctcgccctcttcgtccgcccaacctgcggcctgtggaggcgtgaggcgacgacaggcgagcgcctcgagcagcgttagccgctgcggccgccggtcctccctccacctcctcctcggccccccctcgcttccctcctcccacttcccgagctccggcgtgtcccggccacgctcgacgctgctgcaggaacaaaggaagaccccgcggcggcggcggcgccacctccgcctgctgctccgacccgctcccggcccgcggcggcggcaccagggcgcccggctcagccttcccggaggcctcggcccggcctcatcgtgccggcttcgcgcgcgaacccggctttcgcatttgggaccctgcagggccctgaaaaggagcctttaaaagtcaattctactccatttggcaaagagggaactgaaatctggaaagtaaggacttgcccaaggtcactgacttagtggcagactagagacttgaactcaggtctccattcccagcagaaaaatatggctcaggagactaaccagaccccggggcccatgctgtgtagcacaggatgtggcttttatggaaatcctaggacaaatggaatgtgttcagtttgctacaaagaacatcttcagaggcagcaaaatagtggcagaatgagcccaatggggacagctagtggttccaacagtcctacctcagattctgcatctgtacagagagcagacactagcttaaacaactgtgaaggtgctgctggcagcacatctgaaaaatcaagaaatgtgcctgtggctgccttgcctgtaactcagcaaatgacagaaatgagcatttcaagagaggacaaaataactaccccgaaaacagaggtgtcagagccagttgtcactcagcccagtccatcagtttctcagcccagtacttctcagagtgaagaaaaagctcctgaattgcccaaaccaaagaaaaacagatgtttcatgtgcagaaagaaagttggtcttacagggtttgactgccgatgtggaaatttgttttgtggacttcaccgttactctgacaagcacaactgtccgtatgattacaaagcagaagctgcagcaaaaatcagaaaagagaatccagttgttgtggctgaaaaaattcagagaatataaattacttcttgtgaagagactgaaactttgtttttattttaatatatcgtaggaaaacattaaagagcagatgcatggccatttttctttgatgttctccagagttttacattacacttgtctgtcttataattgatattttaggatgtttgggtgtttgttacaggcagaattggatagatacagccctacaaatgtatatgccctcccctgaaaaaaattggatgaaaatctgcacagcaaagtgaaacacacagataataggaacaaaatgtagttcccatgtgccaaacaaaataaatgaaatctctgcatgtttgcagcatatctgccttttgggaatgtaatcaaggtataatctttggctagtgttatgtgcctgtatttttttaaaatggtacaccagaaaacatattctttggaagcaggaagaaatgctcataaagaggatcagaccttctttcccgtgaaaccagtatttggcgccatatataagcctggttaaattggtcatctaaagctgtcaaataagacattctgtgaaaggtaaacatcgaaactggttataacatcagcacacaggtctggtaccttgagctatgactgctgacagagagttgatactatgtaaatggagaagactgctagataatgtacagagaataacttacgtagttacatcagagttatgatacagcttgattaagtgaagtctgatatatatgcgacttgcgatgtagtcaaa

SEQ ID NO: 301278 - DNA, 1876 bp, Homo sapiens
catcctccacaggactcgctcttcccagctccaccctaggggccgactgccaggccagtggctgggctccgcgagaaggcacagcaacccgtctcggccccgcctcctggacctactgacagggcaccgggggcgtggccttgggcccgcgacgtcaccgcgctccccgccgccgccgccgccgccggggttttcgctgacgcacgggtcccgccccctccccctcttttccctcacagcccgggcgccgggcggcgagtgcgttagtcggccgggacgcggagctgtgtgcatctcctacgcgggctcgctcgctcccgggagccgcgcagcttccccggcggtggcaggagcggcgaagagcgccatcagcgggcccttacggccccaggcctcgcggcgcgcggtccgctcgccctcttcgtccgcccaacctgcggcctgtggaggcgtgaggcgacgacaggcgagcgcctcgagcagcgttagccgctgcggccgccggtcctccctccacctcctcctcggccccccctcgcttccctcctcccacttcccgagctccggcgtgtcccggccacgctcgacgctgctgcaggaacaaaggaagaccccgcggcggcggcggcgccacctccgcctgctgctccgacccgctcccggcccgcggcggcggcaccagggcgcccggctcagccttcccggaggcctcggcccggcctcatcgtgccggcttcgcgcgcgaacccggctttcgcatttgggaccctgcagggccctgaaaaggagcctttaaaagtcaattctactccatttggcaaagagggaactgaaatctggaaagtaaggacttgcccaaggtcactgacttagtggcagactagagacttgaactcaggtctccattcccagcagaaaaatatggctcaggagactaaccagaccccggggcccatgctgtgtagcacaggatgtggcttttatggaaatcctaggacaaatggaatgtgttcagtttgctacaaagaacatcttcagaggcagcaaaatagtggcagaatgagcccaatggggacagctagtggttccaacagtcctacctcagattctgcatctgtacagagagcagacactagcttaaacaactgtgaaggtgctgctggcagcacatctgaaaaatcaagaaatgtgcctgtggctgccttgcctgtaactcagcaaatgacagaaatgagcatttcaagagaggacaaaataactaccccgaaaacagaggtgtcagagccagttgtcactcagcccagtccatcagtttctcagcccagtacttctcagagtgaagaaaaagctcctgaattgcccaaaccaaagaaaaacagatgtttcatgtgcagaaagaaagttggtcttacagggtttgactgccgatgtggaaatttgttttgtggacttcaccgttactctgacaagcacaactgtccgtatgattacaaagcagaagctgcagcaaaaatcagaaaagagaatccagttgttgtggctgaaaaaattcagagaatataaattacttcttgtgaagagactgaaactttgtttttattttaatatatcgtaggaaaacattaaagagcagatgcatggccatttttctttgatgttctccagagttttacattacacttgtctgtcttataattgatattttaggatgtttgggtgtttgttacaggcagaattggatagatacagccctacaaatgtatatgccctcccctgaaaaaaattggatgaaaatctgcacagcaaagtgaaacacacagataataggaacaaaatgtagttcccatgtgccaaacaaaataaatgaaatctctgc

SEQ ID NO: 301279 - DNA, 1739 bp, Homo sapiens
catcctccacaggactcgctcttcccagctccaccctaggggccgactgccaggccagtggctgggctccgcgagaaggcacagcaacccgtctcggccccgcctcctggacctactgacagggcaccgggggcgtggccttgggcccgcgacgtcaccgcgctccccgccgccgccgccgccgccggggttttcgctgacgcacgggtcccgccccctccccctcttttccctcacagcccgggcgccgggcggcgagtgcgttagtcggccgggacgcggagctgtgtgcatctcctacgcgggctcgctcgctcccgggagccgcgcagcttccccggcggtggcaggagcggcgaagagcgccatcagcgggcccttacggccccaggcctcgcggcgcgcggtccgctcgccctcttcgtccgcccaacctgcggcctgtggaggcgtgaggcgacgacaggcgagcgcctcgagcagcgttagccgctgcggccgccggtcctccctccacctcctcctcggccccccctcgcttccctcctcccacttcccgagctccggcgtgtcccggccacgctcgacgctgctgcaggaacaaaggaagaccccgcggcggcggcggcgccacctccgcctgctgctccgacccgctcccggcccgcggcggcggcaccagggcgcccggctcagccttcccggaggcctcggcccggcctcatcgtgccggcttcgcgcgcgaacccggctttcgcatttgggaccctgcaggcagaaaaatatggctcaggagactaaccagaccccggggcccatgctgtgtagcacaggatgtggcttttatggaaatcctaggacaaatggaatgtgttcagtttgctacaaagaacatcttcagaggcagcaaaatagtggcagaatgagcccaatggggacagctagtggttccaacagtcctacctcagattctgcatctgtacagagagcagacactagcttaaacaactgtgaaggtgctgctggcagcacatctgaaaaatcaagaaatgtgcctgtggctgccttgcctgtaactcagcaaatgacagaaatgagcatttcaagagaggacaaaataactaccccgaaaacagaggtgtcagagccagttgtcactcagcccagtccatcagtttctcagcccagtacttctcagagtgaagaaaaagctcctgaattgcccaaaccaaagaaaaacagatgtttcatgtgcagaaagaaagttggtcttacagggtttgactgccgatgtggaaatttgttttgtggacttcaccgttactctgacaagcacaactgtccgtatgattacaaagcagaagctgcagcaaaaatcagaaaagagaatccagttgttgtggctgaaaaaattcagagaatataaattacttcttgtgaagagactgaaactttgtttttattttaatatatcgtaggaaaacattaaagagcagatgcatggccatttttctttgatgttctccagagttttacattacacttgtctgtcttataattgatattttaggatgtttgggtgtttgttacaggcagaattggatagatacagccctacaaatgtatatgccctcccctgaaaaaaattggatgaaaatctgcacagcaaagtgaaacacacagataataggaacaaaatgtagttcccatgtgccaaacaaaataaatgaaatctctgc

SEQ ID NO: 301280 - DNA, 1765 bp, Homo sapiens
  misc_feature (1731)..(1731): n is a, c, g, or t
  misc_feature (1758)..(1758): n is a, c, g, or t
catcctccacaggactcgctcttcccagctccaccctaggggccgactgccaggccagtggctgggctccgcgagaaggcacagcaacccgtctcggccccgcctcctggacctactgacagggcaccgggggcgtggccttgggcccgcgacgtcaccgcgctccccgccgccgccgccgccgccggggttttcgctgacgcacgggtcccgccccctccccctcttttccctcacagcccgggcgccgggcggcgagtgcgttagtcggccgggacgcggagctgtgtgcatctcctacgcgggctcgctcgctcccgggagccgcgcagcttccccggcggtggcaggagcggcgaagagcgccatcagcgggcccttacggccccaggcctcgcggcgcgcggtccgctcgccctcttcgtccgcccaacctgcggcctgtggaggcgtgaggcgacgacaggcgagcgcctcgagcagcgttagccgctgcggccgccggtcctccctccacctcctcctcggccccccctcgcttccctcctcccacttcccgagctccggcgtgtcccggccacgctcgacgctgctgcaggaacaaaggaagaccccgcggcggcggcggcgccacctccgcctgctgctccgacccgctcccggcccgcggcggcggcaccagggcgcccggctcagccttcccggaggcctcggcccggcctcatcgtgccggcttcgcgcgcgaacccggctttcgcatttgggaccctgcagggccctgaaaaggagcctttaaaagtcaattctactccatttggcaaagagggaactgaaatctggaaagtaaggacttgcccaaggtcactgacttagtggcagactagagacttgaactcaggtctccattcccagcagaaaaatatggctcaggagactaaccagaccccggggcccatgctgtgtagcacaggatgtggcttttatggaaatcctaggacaaatggaatgtgttcagtttgctacaaagaacatcttcagaggcagcaaaatagtggcagaatgagcccaatggggacagctagtggttccaacagtcctacctcagattctgcatctgtacagagagcagacactagcttaaacaactgtgaaggtgctgctggcagcacatctgaaaaatcaagaaatgtgcctgtggctgccttgcctgtaactcagcaaatgacagaaatgagcatttcaagagaggacaaaataactaccccgaaaacagaggtgtcagagccagttgtcactcagcccagtccatcagtttctcagcccagtacttctcagagtgaagaaaaagctcctgaattgcccaaaccaaagaaaaacagatgtttcatgtgcagaaagaaagttggtcttacagggtttgactgccgatgtggaaatttgttttgtggacttcaccgttactctgacaagcacaactgtccgtatgattacaaagcagaagctgcagcaaaaatcagaaaagagaatccagttgttgtggctgaaaaaattcagagaatataaattacttcttgtgaagagactgaaactttgtttttattttaatatatcgtaggaaaacattaaagagcagatgcatggccatttttctttgatgttctccagagttttacattacacttgtctgtctttacttatcaattcaccaaggagctgttttttgcatctagncatcatactgccaggctgttatgcgtnggtaagg

SEQ ID NO: 301281 - DNA, 1468 bp, Homo sapiens
catcctccacaggactcgctcttcccagctccaccctaggggccgactgccaggccagtggctgggctccgcgagaaggcacagcaacccgtctcggccccgcctcctggacctactgacagggcaccgggggcgtggccttgggcccgcgacgtcaccgcgctccccgccgccgccgccgccgccggggttttcgctgacgcacgggtcccgccccctccccctcttttccctcacagcccgggcgccgggcggcgagtgcgttagtcggccgggacgcggagctgtgtgcatctcctacgcgggctcgctcgctcccgggagccgcgcagcttccccggcggtggcaggagcggcgaagagcgccatcagcgggcccttacggccccaggcctcgcggcgcgcggtccgctcgccctcttcgtccgcccaacctgcggcctgtggaggcgtgaggcgacgacaggcgagcgcctcgagcagcgttagccgctgcggccgccggtcctccctccacctcctcctcggccccccctcgcttccctcctcccacttcccgagctccggcgtgtcccggccacgctcgacgctgctgcaggaacaaaggaagaccccgcggcggcggcggcgccacctccgcctgctgctccgacccgctcccggcccgcggcggcggcaccagggcgcccggctcagccttcccggaggcctcggcccggcctcatcgtgccggcttcgcgcgcgaacccggctttcgcatttgggaccctgcagggccctgaaaaggagcctttaaaagtcaattctactccatttggcaaagagggaactgaaatctggaaagtaaggacttgcccaaggtcactgacttagtggcagactagagacttgaactcaggtctccattcccagcagaaaaatatggctcaggagactaaccagaccccggggcccatgctgtgtagcacaggatgtggcttttatggaaatcctaggacaaatggaatgtgttcagtttgctacaaagaacatcttcagaggcagcaaaatagtggcagaatgagcccaatgggtaagttatttccaaggaaaaacacatttgaaagaactggtggacagaaatacagaaccaagaattggggctgagaatgctgaaagcacatggagagaacacctgataagagcttgaaattcaagcaacagcccaagtgcttgacatgactgatcaggaatgaatgactatctacaagcatcttatagcttttcagttttcttttttggggttattttgtttcacacttgtgttcattggattgactttttaatattttttgtttggatactcaagtataggattacagcacagtgaatgcttatatcactaacctaattaaatgcaagtatttattactacgtcttgatactaagtgagtttttgtagtgttcattggttccttacaaatccttt

SEQ ID NO: 301282 - DNA, 1331 bp, Homo sapiens
catcctccacaggactcgctcttcccagctccaccctaggggccgactgccaggccagtggctgggctccgcgagaaggcacagcaacccgtctcggccccgcctcctggacctactgacagggcaccgggggcgtggccttgggcccgcgacgtcaccgcgctccccgccgccgccgccgccgccggggttttcgctgacgcacgggtcccgccccctccccctcttttccctcacagcccgggcgccgggcggcgagtgcgttagtcggccgggacgcggagctgtgtgcatctcctacgcgggctcgctcgctcccgggagccgcgcagcttccccggcggtggcaggagcggcgaagagcgccatcagcgggcccttacggccccaggcctcgcggcgcgcggtccgctcgccctcttcgtccgcccaacctgcggcctgtggaggcgtgaggcgacgacaggcgagcgcctcgagcagcgttagccgctgcggccgccggtcctccctccacctcctcctcggccccccctcgcttccctcctcccacttcccgagctccggcgtgtcccggccacgctcgacgctgctgcaggaacaaaggaagaccccgcggcggcggcggcgccacctccgcctgctgctccgacccgctcccggcccgcggcggcggcaccagggcgcccggctcagccttcccggaggcctcggcccggcctcatcgtgccggcttcgcgcgcgaacccggctttcgcatttgggaccctgcaggcagaaaaatatggctcaggagactaaccagaccccggggcccatgctgtgtagcacaggatgtggcttttatggaaatcctaggacaaatggaatgtgttcagtttgctacaaagaacatcttcagaggcagcaaaatagtggcagaatgagcccaatgggtaagttatttccaaggaaaaacacatttgaaagaactggtggacagaaatacagaaccaagaattggggctgagaatgctgaaagcacatggagagaacacctgataagagcttgaaattcaagcaacagcccaagtgcttgacatgactgatcaggaatgaatgactatctacaagcatcttatagcttttcagttttcttttttggggttattttgtttcacacttgtgttcattggattgactttttaatattttttgtttggatactcaagtataggattacagcacagtgaatgcttatatcactaacctaattaaatgcaagtatttattactacgtcttgatactaagtgagtttttgtagtgttcattggttccttacaaatccttt

SEQ ID NO: 301283 - DNA, 734 bp, Homo sapiens
gagttctgttttatttctgttttgggtttggctctaatacagagattcacccatggacttggtctctgtagcgtttatgccagatcataaagaacaaggggtgacaggtacatgttgactttacctggggtaaatgattaccagagtgcaactgttgcttctctgtgatggagtttggggtggaaataccctagttttatctgtcagttctttgcatgctgctacttttgcttcaagttagggaggtacatatgtatgtcaaagttcctatactgacatagggtagtatttctctgaatatgaaaagtcacaattgagttgaaaatttagaagttgaagatttagaagggcaacttaatttttcaagttaaaaatgaagtaagagtggtatagagaaggtaagatgagccctcggactccatcactctgaaggtctgagtagtagcaagagatagatttttgtttggccaggctgcagtgcaatggcgtaatcttggctcactgcaacctctgcctcctgggttcaagtgattctcctgcctctgcctcctaagtagctgggatcacaggcaccagccaccacgcccagctaatttttgtatttttaatagagacagtttctccatgttggtcaggctggtcttgaactcctgacctcaggtgagctgcccgcctcggcctcccaaagtgctgggattacaggcgtgaggcaccgcacccggccaatcagtttt

SEQ ID NO: 301284 - DNA, 595 bp, Homo sapiens
tacaggtgttttaagaaaactttattcatccagtttaaagaactacctataaatatcaagactcagtgataattgtgattagccaattaagtaaaaacatttgaaatggtctgcctgtagtgcagcagagtgaaaagttaaagataccagtttcccaaattgattaaaacataaccctgagagctaacagaccttttcataaattgaaaccaagaatagtgataggtaaaaataccctaataattgataaaatttctttttgggtttttttttggtcctaaaacagtttgcttttataaaggcaacaaaatattgataattatctctgcccaccctttttaatgattaacggaatttgggcttttgttaaaacttgcgtagcaattacaacggtataccgatgattatattagactatattttggtgataacactaatttctgaaatttcgtttcatctatagcagaaaaatatggctcaggagactaaccagaccccggggcccatgctgtgtagcacaggatgtggcttttatggaaatcctaggacaaatggaatgtgttcagtttgctacaaagaacatcttcagaggcag

SEQ ID NO: 301285 - DNA, 375 bp, Homo sapiens
gcatccaatttttttttaaactttagattatctagctccatttgctcattttggaaatattctataatttaaagttgaactgacaacttattcattgtctcaagaagtacccttaacacctttaaaaattgtttgcttgaactcaaatagaaatgtgcctgtggctgccttgcctgtaactcagcaaatgacagaaatgagcatttcaagagaggacaaaataactaccccgaaaacagaggtgtcagagccaggtatgtttttcatttaatacttgttcagttctgaatttgatagtgcaagaaatggctggtggggggattctttccttcccattgaaggaccaaagaggagggagagccataaaatataggc

SEQ ID NO: 301286 - DNA, 507 bp, Homo sapiens
  misc_feature (17)..(17): n is a, c, g, or t
agggcaaactcccagangattttaaccttggtccaagtccaagcaattttagaatcccctggtggtctagtggttagattcgggcgcttttcaccgccgcgggccgggttcgtttcccggtcagggaacccttcctttctgggctcggacctaggtcgcggcgacatggccaaacgtaccaagaaagtcgggatcgtcggtaaatacgggacccgctatggggcctccctccggaaaatggtgaagaaaattgaaatcagccagcacgccaagtacacttgctctttctgtggcaaaaccaagatgaagagacgagctgtggggatctggcactgtggttcctgcatgaagacagtggctggcggtgcctggacgtacaataccacttccgctgtcacggtaaagtccgccatcagaagactgaaggagttgaaagaccagtagacgctcctctactctttgagacatcactggcctataataaatgggttaatttatgtaacaaaa

SEQ ID NO: 301287 - DNA, 602 bp, Homo sapiens
cgtccgcctaataccgcgcctgcgcaccgcgtctcttcctttctgggctcggacctaggtcgcggcgacatggccaaacgtaccaagaaagtcgggatcgtcggtaaatacgggacccgctatggggcctccctccggaaaatggtgaagaaaattgaaatcagccagcacgccaagtacacttgctctttctgtggcaaaaccaagatgaagagacgagctgtggggatctggcactgtggttcctgcatgaagacagtggctggcggtgcctggacgtacaagtaacctaagcaaacccaaatggaccaaatgcaacgctgatggaatctaagtgctcagaccaaggaacggggactgaaataacagtggacaccacatggcatgatccaatcagattgagccctggaaagatcatcccatggcaagatccagttagattacacttcctggcatcacctcattgcaagatccaagatcatgcctcattaccttctgcctgtaaaacctgccccagcccccagctccaggagacagatttgagccaggctcctgtctttctctgcagccttgcaataaacttttctttctacaaaaaccca

SEQ ID NO: 301288 - DNA, 427 bp, Homo sapiens
ccccttcgagttcccgtccgaaattcgcggccgactactactactaaattcgcggccgcgtcgaccggacctaggtcgcggcgacatggccaaacgtaccaagaaagtcgggatcgtcggtaaatacgggacccgctatggggcctccctccggaaaatggtgaagaaaattgaaatcagccagcacgccaagtacacttgctctttctgtggcaaaaccaagatgaagagacgagctgtggggatctggcactgtggttcctgcatgaagacagtggctggcggtgcctggacgtacaataccacttccgctgtcacggtaaagtccgccatcagaagactgaaggagttgaaagaccagtagacgctcctctactctttgagacatcactggcctataataaatgggttaatttatgtaacaaaa

SEQ ID NO: 301289 - DNA, 406 bp, Homo sapiens
  misc_feature (17)..(17): n is a, c, g, or t
cgccgccgccgacacgngcgagaagacgacagaagggctgggctcggacctaggtcgcggcgacatggccaaacgtaccaagaaagtcgggatcgtcggtaaatacgggacccgctatggggcctccctccggaaaatggtgaagaaaattgaaatcagccagcacgccaagtacacttgctctttctgtggcaaaaccaagatgaagagacgagctgtggggatctggcactgtggttcctgcatgaagacagtggctggcggtgcctggacgtacaataccacttccgctgtcacggtaaagtccgccatcagaagactgaaggagttgaaagaccagtagacgctcctctactctttgagacatcactggcctataataaatgggttaatttatgtaacaaaa

SEQ ID NO: 301290 - DNA, 454 bp, Homo sapiens
gtttgagggcagcgatggctgtggagaaagctgccagcgctagcagagtcctcagcagggcctggggagggaggaggcagagagaaatctttgtgtttcaggtcgcggcgacatggccaaacgtaccaagaaagtcgggatcgtcggtaaatacgggacccgctatggggcctccctccggaaaatggtgaagaaaattgaaatcagccagcacgccaagtacacttgctctttctgtggcaaaaccaagatgaagagacgagctgtggggatctggcactgtggttcctgcatgaagacagtggctggcggtgcctggacgtacaataccacttccgctgtcacggtaaagtccgccatcagaagactgaaggagttgaaagaccagtagacgctcctctactctttgagacatcactggcctataataaatgggttaatttatgtaacaaaa

SEQ ID NO: 301291 - DNA, 396 bp, Homo sapiens
gcggccgcctactactactaaattcgcggccgcgtcgacctaggtcgcggcgacatggccaaacgtaccaagaaagtcgggatcgtcggtaaatacgggacccgctatggggcctccctccggaaaatggtgaagaaaattgaaatcagccagcacgccaagtacacttgctctttctgtggcaaaaccaagatgaagagacgagctgtggggatctggcactgtggttcctgcatgaagacagtggctggcggtgcctggacgtacaataccacttccgctgtcacggtaaagtccgccatcagaagactgaaggagttgaaagaccagtagacgctcctctactctttgagacatcactggcctataataaatgggttaatttatgtaacaaaa

SEQ ID NO: 301292 - DNA, 390 bp, Homo sapiens
  misc_feature (1)..(1): n is a, c, g, or t
naagtataggctaggtacgaggctgggtggtcgctaggtcgcggcgacatggccaaacgtaccaagaaagtcgggatcgtcggtaaatacgggacccgctatggggcctccctccggaaaatggtgaagaaaattgaaatcagccagcacgccaagtacacttgctctttctgtggcaaaaccaagatgaagagacgagctgtggggatctggcactgtggttcctgcatgaagacagtggctggcggtgcctggacgtacaataccacttccgctgtcacggtaaagtccgccatcagaagactgaaggagttgaaagaccagtagacgctcctctactctttgagacatcactggcctataataaatgggttaatttatgtaacaaaa

SEQ ID NO: 301293 - DNA, 389 bp, Homo sapiens
gcggccgcctactactactactactactactaaattcgcggccgctcgaggccaaacgtaccaagaaagtcgggatcgtcggtaaatacgggacccgctatggggcctccctccggaaaatggtgaagaaaattgaaatcagccagcacgccaagtacacttgctctttctgtggcaaaaccaagatgaagagacgagctgtggggatctggcactgtggttcctgcatgaagacagtggctggcggtgcctggacgtacaataccacttccgctgtcacggtaaagtccgccatcagaagactgaaggagttgaaagaccagtagacgctcctctactctttgagacatcactggcctataataaatgggttaatttatgtaacaaaa

SEQ ID NO: 301294 - DNA, 399 bp, Homo sapiens
gagagagagagagagagagagagagagagagagagagagagagagagtcgcggcgacatggccaaacgtaccaagaaagtcgggatcgtcggtaaatacgggacccgctatggggcctccctccggaaaatggtgaagaaaattgaaatcagccagcacgccaagtacacttgctctttctgtggcaaaaccaagatgaagagacgagctgtggggatctggcactgtggttcctgcatgaagacagtggctggcggtgcctggacgtacaataccacttccgctgtcacggtaaagtccgccatcagaagactgaaggagttgaaagaccagtagacgctcctctactctttgagacatcactggcctataataaatgggttaatttatgtaacaaaa

SEQ ID NO: 301295 - DNA, 402 bp, Homo sapiens
  misc_feature (4)..(4): n is a, c, g, or t
  misc_feature (28)..(28): n is a, c, g, or t
cgangcttgatatcgaattcgcgccccntcgatacggctgcgagagacgacgaagggcgactggccaaacgtaccaagaaagtcgggatcgtcggtaaatacgggacccgctatggggcctccctccggaaaatggtgaagaaaattgaaatcagccagcacgccaagtacacttgctctttctgtggcaaaaccaagatgaagagacgagctgtggggatctggcactgtggttcctgcatgaagacagtggctggcggtgcctggacgtacaataccacttccgctgtcacggtaaagtccgccatcagaagactgaaggagttgaaagaccagtagacgctcctctactctttgagacatcactggcctataataaatgggttaatttatgtaacaaaa

SEQ ID NO: 301296 - DNA, 377 bp, Homo sapiens
  misc_feature (11)..(12): n is a, c, g, or t
  misc_feature (14)..(14): n is a, c, g, or t
tgggataggcnntnatttgcctaggtcgtttcgacatggccaaacgtaccaagaaagtcgggatcgtcggtaaatacgggacccgctatggggcctccctccggaaaatggtgaagaaaattgaaatcagccagcacgccaagtacacttgctctttctgtggcaaaaccaagatgaagagacgagctgtggggatctggcactgtggttcctgcatgaagacagtggctggcggtgcctggacgtacaataccacttccgctgtcacggtaaagtccgccatcagaagactgaaggagttgaaagaccagtagacgctcctctactctttgagacatcactggcctataataaatgggttaatttatgtaacaaaa

SEQ ID NO: 301297 - DNA, 388 bp, Homo sapiens
gaaaaaaactaggctagtacgggctggtgttaaatcaggccgaggcatggccaaacgtaccaagaaagtcgggatcgtcggtaaatacgggacccgctatggggcctccctccggaaaatggtgaagaaaattgaaatcagccagcacgccaagtacacttgctctttctgtggcaaaaccaagatgaagagacgagctgtggggatctggcactgtggttcctgcatgaagacagtggctggcggtgcctggacgtacaataccacttccgctgtcacggtaaagtccgccatcagaagactgaaggagttgaaagaccagtagacgctcctctactctttgagacatcactggcctataataaatgggttaatttatgtaacaaaa

SEQ ID NO: 301298 - DNA, 615 bp, Homo sapiens
  misc_feature (17)..(17): n is a, c, g, or t
  misc_feature (454)..(454): n is a, c, g, or t
  misc_feature (461)..(461): n is a, c, g, or t
  misc_feature (464)..(464): n is a, c, g, or t
cgccgccgccgacacgngcgagaagacgacagaagggctgggctcggacctaggtcgcggcgacatggccaaacgtaccaagaaagtcgggatcgtcggtaaatacgggacccgctatggggcctccctccggaaaatggtgaagaaaattgaaatcagccagcacgccaagtacacttgctctttctgtggcaaaaccaagatgaagagacgagctgtggggatctggcactgtggttcctgcatgaagacagtggctggcggtgcctggacgtacaataccacttccgctgtcacggtaaagtccgccatcagaagactgaaggagttgaaagaccagtagacgctcctctactctttgagacatcactggcctataataaatgggttaatttatgtaacaaaaaaaaaaaaaaaaaaaaaaaaaaaaaaaaaaaaaaaaaaaaaaacccgnggggagnctnataatggcgcgggggcgcggagaaaaagagggggaaagagaaaggggcacagagggggccacaagaggggtgtcccggggcacccagagttttctggggtcacaaaggggggcaaacgggggggcccccctaaagggggagggaataaatg

SEQ ID NO: 301299 - DNA, 1445 bp, Homo sapiens
  misc_feature (17)..(17): n is a, c, g, or t
agggcaaactcccagangattttaaccttggtccaagtccaagcaattttagaatcccctggtggtctagtggttagattcgggcgcttttcaccgccgcgggccgggttcgtttcccggtcagggaacccttcctttctgggctcggacctaggtcgcggcgacatggccaaacgtaccaagaaagtcgggatcgtcggtaaatacgggacccgctatggggcctccctccggaaaatggtgaagaaaattgaaatcagccagcacgccaagtacacttgctctttctgtggcaaaaccaagatgaagagacgagctgtggggatctggcactgtggttcctgcatgaagacagtggctggcggtgcctggacgtacaataccacttccgctgtcacggtaaagtccgccatcagaagactgaaggagttgaaagaccagtagacgctcctctactctttgagacatcactggcctataataaatgggttaatttatgtaacaaaaattgccttggcttgttaactttattagacattctgatgtttgcattgtgtaaatactgttgtattggaaaagcatgccaagatggattattgtaattcagtgtcttttttagtagtcaaatggtaaaatgcagcataagaatataagtcttccaagttagatatgagtgttagctttttataagtctgctcctgccagtttgactttgagatacattggagccaactgtaaactttagtttttaaattacagttagtttttttgtttgtttttgaggcggagtctctgttacccaggctggagtgcagtataccagtcttggcccacttcaacctccacttcttaggttcaagcgattctcctgcctcagctactttggaggctcaggcacaagaatcacttgaacctacgaggcggaggttgcagtgagccaggatcgtgccactgcactttatttagccaggacaacactctgtctccaaaaaaaagtttctgaaggtaaaagatatactaaaggatatacatatactgcctcttctatgatgtttcatttgacctacaccatcagcatcttcaggaaacagtatgaaactaatttcacattaaatgttgcaaacgtctgcaattctccagtttttagtttgcacgtaaggattcgtaggattgatttcagattgacagatggttgtagtaacaaaaaaatgaattgccttggagaattcgagttattttaggcctgcctttgacacttttatgcacttaattcactgccaatttagtctaactcctcaaccatctgtggtatggacttctcagtcctcctaattggtatgtcttttatctatcccagagtcagtagtcctttaaggatgcaaatttaattcgataagaatgtggatttacttcatctttaggacagagtaaaaacctttatttca

SEQ ID NO: 301300 - DNA, 758 bp, Homo sapiens
  misc_feature (477)..(477): n is a, c, g, or t
  misc_feature (487)..(487): n is a, c, g, or t
  misc_feature (682)..(682): n is a, c, g, or t
  misc_feature (700)..(700): n is a, c, g, or t
  misc_feature (703)..(703): n is a, c, g, or t
  misc_feature (705)..(705): n is a, c, g, or t
  misc_feature (711)..(711): n is a, c, g, or t
  misc_feature (716)..(716): n is a, c, g, or t
  misc_feature (729)..(729): n is a, c, g, or t
  misc_feature (732)..(732): n is a, c, g, or t
  misc_feature (734)..(734): n is a, c, g, or t
  misc_feature (740)..(740): n is a, c, g, or t
  misc_feature (744)..(744): n is a, c, g, or t
ccacgcgtcgggacgcgtgttcggacgcgtgggcggacctaggtcgcggcgacatggccaaacgtaccaagaaagtcgggatcgtcggtaaatacgggacccgctatggggcctccctccggaaaatggtgaagaaaattgaaatcagccagcacgccaagtacacttgctctttctgtggcaaaaccaagatgaagagacgagctgtggggatctggcactgtggttcctgcatgaagacagtggctggcggtgcctggacgtacaataccacttccgctgtcacggtaaagtccgccatcagaagactgaaggagttgaaagaccagtagacgctcctctactctttgagacatcactggcctataataaatgggttaatttatgtaacaaaaaaaaaaaaaaaaaattcgagactagttctctctctccaggggcctggggaaaaggacgggtcttcttcggccaaaatggtcngggatatggngaaataaaagagccagctgggagaacctgggacacctccaggcctccggagaagaagggcacgctgttgaagattcaggggaccacgggggaaccaataaggctaggaggggtctctccacgggagggaactagactttagaacactggcgaaaccaaaaatcgcaagctgggcagaactgtgggatcagcggcnggccattgaagatgaacntcngnggagcnctgtngaaacaccggcancgnangacggnccanggatgatgcctcac

SEQ ID NO: 301301 - DNA, 626 bp, Homo sapiens
  misc_feature (11)..(12): n is a, c, g, or t
  misc_feature (14)..(14): n is a, c, g, or t
  misc_feature (515)..(515): n is a, c, g, or t
  misc_feature (623)..(623): n is a, c, g, or t
tgggataggcnntnatttgcctaggtcgtttcgacatggccaaacgtaccaagaaagtcgggatcgtcggtaaatacgggacccgctatggggcctccctccggaaaatggtgaagaaaattgaaatcagccagcacgccaagtacacttgctctttctgtggcaaaaccaagatgaagagacgagctgtggggatctggcactgtggttcctgcatgaagacagtggctggcggtgcctggacgtacaataccacttccgctgtcacggtaaagtccgccatcagaagactgaaggagttgaaagaccagtagacgctcctctactctttgagacatcactggcctataataaatgggttaatttatgtaacaaaaaaaaaaaaaaaaaaaaaaaaaaaaaaaaaaaaaaaaaaaaaaacccggggggtttttgtgggggggggggaaaaagggggtaagagaaaggggccatggggccaaaaggcggggttccgggacccaaggttttcttgnggcgacaagggggggaaattcgggcggggtcccccataataaggggaggccggataataaattccgagaaaaacccggggtacccggggttaagacacgcagaaaaanagc

SEQ ID NO: 301302 - DNA, 651 bp, Homo sapiens
  misc_feature (1)..(1): n is a, c, g, or t
  misc_feature (404)..(404): n is a, c, g, or t
  misc_feature (430)..(430): n is a, c, g, or t
  misc_feature (432)..(432): n is a, c, g, or t
  misc_feature (438)..(438): n is a, c, g, or t
  misc_feature (442)..(442): n is a, c, g, or t
  misc_feature (450)..(450): n is a, c, g, or t
  misc_feature (491)..(491): n is a, c, g, or t
  misc_feature (517)..(517): n is a, c, g, or t
  misc_feature (525)..(525): n is a, c, g, or t
naagtataggctaggtacgaggctgggtggtcgctaggtcgcggcgacatggccaaacgtaccaagaaagtcgggatcgtcggtaaatacgggacccgctatggggcctccctccggaaaatggtgaagaaaattgaaatcagccagcacgccaagtacacttgctctttctgtggcaaaaccaagatgaagagacgagctgtggggatctggcactgtggttcctgcatgaagacagtggctggcggtgcctggacgtacaataccacttccgctgtcacggtaaagtccgccatcagaagactgaaggagttgaaagaccagtagacgctcctctactctttgagacatcactggcctataataaatgggttaatttatgtaacaaaaaaaaaaaaaacccnggaaggcaaaaagggaaaaacaacantnaaaacngggngctccagngctgaacaattgggcagatgaacccatttgacagaggatcnggctttggcaatggggtcagagggcnttgggggncaaagcagagaagtaaagggaatgggcatggggtcgtagagctactaacgggattactcgacaggggaaaccctactatgaaagtatccttgtccatgaccaagggttatgcagggacggggtggc

SEQ ID NO: 301303 - DNA, 446 bp, Homo sapiens
  misc_feature (425)..(425): n is a, c, g, or t
gcggccgcctactactactaaattcgcggccgcgtcgacacgagaaggccaaacgtaccaagaaagtcgggatcgtcggtaaatacgggacccgctatggggcctccctccggaaaatggtgaagaaaattgaaatcagccagcacgccaagtacacttgctctttctgtggcaaaaccaagatgaagagacgagctgtggggatctggcactgtggttcctgcatgaagacagtggctggcggtgcctggacgtacaataccacttccgctgtcacggtaaagtccgccatcagaagactgaaggagttgaaagaccagtagacgctcctctactctttgagacatcactggcctataataaatgggttaatttatgtaacaaaaaaaaaaagtcgacgcggccgcgaatttagtagtagtagnctagtagtagtaggcggccgc

SEQ ID NO: 301304 - DNA, 313 bp, Homo sapiens
ccgcgtcgaccggagggaggccccatagcgggtcccgtatttaccgatgaagaaaattgaaatcagccagcacgccaagtacacttgctctttctgtggcaaaaccaagatgaagagacgagctgtggggatctggcactgtggttcctgcatgaagacagtggctggcggtgcctggacgtacaataccacttccgctgtcacggtaaagtccgccatcagaagactgaaggagttgaaagaccagtagacgctcctctactctttgagacatcactggcctataataaatgggttaatttatgtaacaaaa

SEQ ID NO: 301305 - DNA, 275 bp, Homo sapiens
ccccttcgagttcccgtccgaaattcgcggccgactactactactaaattcgcggccgcgtcgacaccaagatgaagagacgagctgtggggatctggcactgtggttcctgcatgaagacagtggctggcggtgcctggacgtacaataccacttccgctgtcacggtaaagtccgccatcagaagactgaaggagttgaaagaccagtagacgctcctctactctttgagacatcactggcctataataaatgggttaatttatgtaacaaaa

SEQ ID NO: 301306 - DNA, 195 bp, Homo sapiens
ccccttcgagttcccgtccgaaattcgcggccgactactactactaaattcgcggccgcgtcgacctttaccgtgacagcggaagtggtaaagtccgccatcagaagactgaaggagttgaaagaccagtagacgctcctctactctttgagacatcactggcctataataaatgggttaatttatgtaacaaaa

SEQ ID NO: 301307 - DNA, 2273 bp, Homo sapiens
cgtccgcctaataccgcgcctgcgcaccgcgtctcttcctttctgggctcggacctaggtcgcggcgacatggccaaacgtaccaagaaagtcgggatcgtcggtaaatacgggacccgctatggggcctccctccggaaaatggtgaagaaaattgaaatcagccagcacgccaagtacacttgctctttctgtggcaaaaagtaagtaaggcaaagtctctggtgagaggagagggagggcaggtttcttacccaagtgaggcctgacttcaaggtattttataagccgtgtgctggtgggcagttggaattactcataccgttgattatgagttttaagataaaagtgttgatggtaacttcagattttgtgagacgtttttcatttaaagaaaaccgcttaaacgttaatgggtaaaataatcatttgacagagtgcccccagcctaagccaaacctgctttgtgggaaatgattccatcagttttgtctactgatgtttctgcaccaactcccaaaatgtctgtgcatctaataccattctacttgttctgcgagggatttttgtttgataaaggtttgaacgtttatgtgcaaaatactgcattacagcaatccttgttttgtttttgagggagaaagggaggctttcacatccctgacaataaggtgaatccaaatttagacttctggatgcttgtaagagaaaatacttacttggttcatagtgaaaattggttctcttttatagaccaagatgaagagacgagctgtggggatctggcactgtggttcctgcatgaagacagtggctggcggtgcctggacgtacaaagtgagtctagttccttgtggtatttggaagtgtgtggaccacataggcccaaattccaggttgctgctggatgggctagttttaacactttctcaggactgagagaataaggatgcctttgtattttcaggattcttccgtggtggtttattttcagttattgaaagagtaaacacaaaactaccaaaatagaagtcggaaatctaattcacagactactttagaatttgatggtcactgggcacattgttgtgaacattgtcatgatactgtgcaggtccattagtggggctgaatctactgaacgttgatttgcactgcaagttttgataaaaataggtgaaggggtcagttagttcaaaactgtatttggaacttgaggccatcaggaccaccacagtttcgtctttctgaacagtattagactgctgcaggtttgtgaatctgcaactcagtatcacctgacagggcgatactacaaacactatactacaaactagcatctagacctgtgttgtccaatacactaagcacatatatggctagtgtaattaaagaattggattttaaagtttcagtcaatttaaacttaaaccgaagcagtggaaaatgttgaaatatatatatattccttgtgggggtttttattagggcagaatggaaaatgggaactagagtgctttcttggttctgataggaaagtgaattatttatatacttacaatacaggatggtgattttcaggtatagttcctgaattttatggtaaaacttttgtagtcatttcaatagctgtctttcccaaaggcactttagtgtccgctcttatttccttaatcattgttctcactgtatcatcttgtaatttattcatttcttgtaatctgtccattcccttttaataagtttaggtcagcctcttagaaccatttctttttcatgggatggggtagggggagttaaagcttgcttgtccacaactgagttacttataaaaaaaaaagcaactctggttgagaaatcagatgcatgagattgtatgtctaattctgcaagatcctgaaggcatggctcttaaaggatgccatcatgtagtttagaagccactaatttccgaggagtaatctaatgttggttagatctttggattgactgcagcaaagtattggtagagcagtctatctcagtataattctttctaggaaaatttgggaagcgactttaacacaaaaacgaggcagatttacttatttgccattttctatgttaacatgcttaattatgttggaaactgaatctttctttccagtaccacttccgctgtcacggtaaagtccgccatcagaagactgaaggagttgaaagaccagtagacgctcctctactctttgagacatcactggcctataataaatgggttaatttatgtaacaaaa

SEQ ID NO: 301308 - DNA, 715 bp, Homo sapiens
  misc_feature (604)..(604): n is a, c, g, or t
  misc_feature (712)..(712): n is a, c, g, or t
cgtccgcctaataccgcgcctgcgcaccgcgtctcttcctttctgggctcggacctaggtcgcggcgacatggccaaacgtaccaagaaagtcgggatcgtcggtaaatacgggacccgctatggggcctccctccggaaaatggtgaagaaaattgaaatcagccagcacgccaagtacacttgctctttctgtggcaaaaccaagatgaagagacgagctgtggggatctggcactgtggttcctgcatgaagacagtggctggcggtgcctggacgtacaacatgaagacagtggctggcggtgcctggacgtacaataccacttccgctgtcacggtaaagtccgccatcagaagactgaaggagttgaaagaccagtagacgctcctctactctttgagacatcactggcctataataaatgggttaatttatgtaacaaaaaaaaaaaaaaaaaacaaaaaaaaaaaaaaaaaaaaaaaaaaaaaaaaaaaaaagccggggggcccggggggtttttgtgggggggggggaaaaagggggtaagagaaaggggccatggggccaaaaggcggggttccgggacccaaggttttcttgnggcgacaagggggggaaattcgggcggggtcccccataataaggggaggccggataataaattccgagaaaaacccggggtacccggggttaagacacgcagaaaaanagc

SEQ ID NO: 301309 - DNA, 572 bp, Homo sapiens
  misc_feature (32)..(32): n is a, c, g, or t
  misc_feature (388)..(388): n is a, c, g, or t
  misc_feature (411)..(411): n is a, c, g, or t
  misc_feature (459)..(459): n is a, c, g, or t
  misc_feature (477)..(478): n is a, c, g, or t
  misc_feature (488)..(488): n is a, c, g, or t
  misc_feature (495)..(495): n is a, c, g, or t
  misc_feature (508)..(508): n is a, c, g, or t
  misc_feature (517)..(517): n is a, c, g, or t
  misc_feature (548)..(548): n is a, c, g, or t
tcggatccaacgttggatccgaattcggcacnagccggcgacatggccaaacgtaccaagaaagtcgggatcgtcggtaaatacgggacccgctatggggcctccctccggaaaatggtgaagaaaattgaaatcagccagcacgccaagtacacttgctctttctgtggcaaaaccaagatgaagagacgagctgtggggatctggcactgtggttcctgcatgaagacagtggctggcggtgcctggacgtacaataccacttccgctgtcacggtaaagtccgccatcagaagactgaaggagttgaaagaccagtagacgctcctctactctttgagacatcactggcctataataaatgggttaatttatgtaacaaaaaatnaaaaaaaaaaacttcgaaggggnggggccccggtaccccaatttcggcccctattaggtgaagtccgtatnacaaatttaacttggccnntcggttttanaaccgtnggttgacttgggnaaaaccctngggggttacccaactttaattcgccttttgnaggaaaatccccccttttggccag

SEQ ID NO: 301310 - DNA, 384 bp, Homo sapiens
  misc_feature (32)..(32): n is a, c, g, or t
tcggatccaacgttggatccgaattcggcacnagccggcgacatggccaaacgtaccaagaaagtcgggatcgtcggtaaatacgggacccgctatggggcctccctccggaaaatggtgaagaaaattgaaatcagccagcacgccaagtacacttgctctttctgtggcaaaaccaagatgaagagacgagctgtggggatctggcactgtggttcctgcatgaagacagtggctggcggtgcctggacgtacaataccacttccgctgtcacggtaaagtccgccatcagaagactgaaggagttgaaagaccagtagacgctcctctactctttgagacatcactggcctataataaatgggttaatttatgtaacaaaa

SEQ ID NO: 301311 - DNA, 308 bp, Homo sapiens
  misc_feature (197)..(197): n is a, c, g, or t
  misc_feature (240)..(240): n is a, c, g, or t
acgtttgccagattgacgggttgacggatgaagcagatagtgaggtgaagaaaattgaaatcagccagcacgccaagtacacttgctctttctgtggcaaaaccaagatgaagagacgagctgtggggatctggcactgtggttcctgcatgaagacagtggctggcggtgcctggacgtacaataccacttccgcngtcacggtaaaggccgcctccgggccattcaacgcctccgggncattcaacgcctccgggccattcaacgcctccgggccattcaacgcctccgggccattcaacgcctcc

SEQ ID NO: 301312 - DNA, 290 bp, Homo sapiens
actagttctctctctctctctctgtgaagaaaattgaaatcagccagcacgccaagtacacttgctctttctgtggcaaaaccaagatgaagagacgagctgtggggatctggcactgtggttcctgcatgaagacagtggctggcggtgcctggacgtacaataccacttccgctgtcacggtaaagtccgccatcagaagactgaaggagttgaaagaccagtagacgctcctctactctttgagacatcactggcctataataaatgggttaatttatgtaacaaaa

SEQ ID NO: 301313 - DNA, 186 bp, Homo sapiens
ccacgtagagctgggaatctgcactgtgtcgaaagtgctggcggtgcctggacgtacaataccacttccgctgtcacggtaaagtccgccatcagaagactgaaggagttgaaagaccagtagacgctcctctactctttgagacatcactggcctataataaatgggttaatttatgtaacaaaa

SEQ ID NO: 301314 - DNA, 394 bp, Homo sapiens
aaaaaaaaaaaaaaaacttttttttctgggctcggacctaggtcgcggcgacatggccaaacgtaccaagaaagtcgggatcgtcggtaaatacgggacccgctatggggcctccctccggaaaatggtgaagaaaattgaaatcagccagcacgccaagtacacttgctctttctgtggcaaaaccaagatgaagagacgagctgtggggatctggcactgtggttcctgcatgaagacagtggctggcggtgcctggacgtacaataccacttccgctgtcacggtaaagtccgccatcagaagactgaaggagttgaaagaccagtagacgctcctctactctttgagacatcactggcctataataaatgggttaatttatgtaacaaaa

SEQ ID NO: 301315 - DNA, 435 bp, Homo sapiens
  misc_feature (414)..(414): n is a, c, g, or t
cgtccgcctaataccgcgcctgcgcaccgcgtctcttcctttctgggctcggacctaggtcgcggcgacatggccaaacgtaccaagaaagtcgggatcgtcggtaaatacgggacccgctatggggcctccctccggaaaatggtgaagaaaattgaaatcagccagcacgccaagtacacttgctctttctgtggcaaaaccaagatgaagagacgagctgtggggatctggcactgtggttcctgcatgaagacagtggctggcggtgcctggacgtacaataccacttccgctgtcacggtaaagtccgccatcagaagactgaaggagttgaaagaccagtagacgctcctctactctttgagacatcacaaaaaaagtcgacgcggccgcgaatttagtagtagtagnctagtagtagtaggcggccgc

SEQ ID NO: 301316 - DNA, 459 bp, Homo sapiens
ttcagaagttgtagctccactgtatcccgcaggtgcttccattttagccccgggggcttatagaccgcgaaaagcccatgcagccgcgacaagccagcggacctaggtcgcggcgacatggccaaacgtaccaagaaagtcgggatcgtcggtaaatacgggacccgctatggggcctccctccggaaaatggtgaagaaaattgaaatcagccagcacgccaagtacacttgctctttctgtggcaaaaccaagatgaagagacgagctgtggggatctggcactgtggttcctgcatgaagacagtggctggcggtgcctggacgtacaataccacttccgctgtcacggtaaagtccgccatcagaagactgaaggagttgaaagaccagtagacgctcctctactctttgagacatcactggcctataataaatgggttaatttatgtaacaaaa

SEQ ID NO: 301317 - DNA, 730 bp, Homo sapiens
  misc_feature (18)..(18): n is a, c, g, or t
ggcaaccacagccggaanttacggctaggtacgaggcctgggtggtgcgcggcgacatggccaaacgtaccaagaaagtcgggatcgtcggtaaatacgggacccgctatggggcctccctccggaaaatggtgaagaaaattgaaatcagccagcacgccaagtacacttgctctttctgtggcaaaaccaagatgaagagacgagctgtggggatctggcactgtggttcctgcatgaagacagtggctggcggtgcctggacgtacaataccacttccgctgtcacggtaaagtccgccatcagaagactgaaggagttgaaagaccagtagacgctcctctactctttgagacatcactggcctataataaatgggttaatttatgtaacaaaaaaaaataaaaaaaaaaaaaaaaaaaaaaaaaaaaaaaaaaaaaaaaaaaaaaaaaaaagccggggggtctttttttgggggggcggaaaaaaggggttaaaaagggggaaggtggtgccgcatacggttgtcttctgcagaccccccgttttttcgtgcgacagagggggataatatatctcggggggtcccccccatgaggagggggacgagtaatatatctagtgaaaaccggcgggttaaccgttttttgttttagttggagagaaataatataatagcgtgcagatgcgatggaacaagagtgcagtgcatggatggaggacacgagt

SEQ ID NO: 301318 - DNA, 398 bp, Homo sapiens
  misc_feature (18)..(18): n is a, c, g, or t
ggcaaccacagccggaanttacggctaggtacgaggcctgggtggtgcgcggcgacatggccaaacgtaccaagaaagtcgggatcgtcggtaaatacgggacccgctatggggcctccctccggaaaatggtgaagaaaattgaaatcagccagcacgccaagtacacttgctctttctgtggcaaaaccaagatgaagagacgagctgtggggatctggcactgtggttcctgcatgaagacagtggctggcggtgcctggacgtacaataccacttccgctgtcacggtaaagtccgccatcagaagactgaaggagttgaaagaccagtagacgctcctctactctttgagacatcactggcctataataaatgggttaatttatgtaacaaaa

SEQ ID NO: 301319 - DNA, 935 bp, Homo sapiens
  misc_feature (18)..(18): n is a, c, g, or t
ggcaaccacagccggaanttacggctaggtacgaggcctgggtggtgcgcggcgacatggccaaacgtaccaagaaagtcgggatcgtcggtaaatacgggacccgctatggggcctccctccggaaaatggtgaagaaaattgaaatcagccagcacgccaagtacacttgctctttctgtggcaaaaccaagatgaagagacgagctgtggggatctggcactgtggttcctgcatgaagacagtggctggcggtgcctggacgtacaataccacttccgctgtcacggtaaagtccgccatcagaagactgaaggagttgaaagaccagtagacgctcctctactctttgagacatcactggcctataataaatgggttaatttatgtaacaaaaaaaaataaaaaaaaaaaaaaaaaaaaaaaaaaaaaaaaaaaaaaaaaaaaaaaaaagccggggggccccttttcgcgggggggcgggaaaaagaggggaagagaggggcgcccggggccacgggtcccggacccccgttttggggccccggggggacacacggggggagccccccaaaaggggggccggggactaatcaacaaaaacgccaggagaacacctgagttatatgatgttcggtaaggcaggacgatctacacgccgacggaagaaggcagagcggaggcaccatggagggacgccaccaacagcctcacacgccagcagccgcatgctatgcagccgaggagagacagcggctgagccagcaaaacaacaaaacacgccgccggcaagaccgcggagaagtctcagaaggccgaccgacaacacgcacacaacccccacacgggcaacggccacacagaggcgaacacaacgggagacaagcacagacaaggggcaaacagtggacagccagaaccgcagacagcagag

SEQ ID NO: 301320 - DNA, 1401 bp, Homo sapiens
cgggacctgtgtgcatggccaacgtcttgtcgtgttgtcccagtgttgaggcagaccagttctcaggtgagccatgtgcgtcacccagggctctacccacagtagcgtgaatgtgcctcccctggcgacgctgttgaaagttgggaagatttctggagtcccccaacgtcggttgacggtgggtgcccaaagacccagtcagggtcaccaaggggacagccaatattcggaggccatgcccgacatttcgaaagacaccagcgaagttaccagaagtatacggtggcccccgagtgacgacttgaatgttagccccctttctcttctgagagtatttctggcgacatggccaaacgtaccaagaaagtcgggatcgtcggtaaatacgggacccgctatggggcctccctccggaaaatggtgaagaaaattgaaatcagccagcacgccaagtacacttgctctttctgtggcaaaaccaagatgaagagacgagctgtggggatctggcactgtggttcctgcatgaagacagtggctggcggtgcctggacgtacaataccacttccgctgtcacggtaaagtccgccatcagaagactgaaggagttgaaagaccagtagacgctcctctactctttgagacatcactggcctataataaatgggttaatttatgtaacaaaaaaaaaaaaaaaaaaaaaaaaaaaaaaaaaaaaaaacaaaaaaaaaaaaaaaaaaaaaaaaaactcagagggccatcatatgtcggggtcgcgcgagaaaacagagagggtacttggacatggcgcaccaggggtcatagggtggtatcccttgacccaggtttccttggtaccaaaggtgggaaaaatcttcgccgggtcttccccttataggtagagccgcaattaacatttcgcgaaataagcccgggttttacccccgtgcatttagtgtgaaacgtcgcgaaaaaaaacagcaacgacgcaacaagcgacagaagacacacgacgacaacagccagaaccagaaacaagcgacgggacacacgacgacacaaatatggaagaacaacacaaccatagagagagacaagaaaaacacagcagctaaataacaagagtgaaaaaaaaacaaaaaaaagatggaaagaagacaacaacaaaaagaaacacacaagaaagattagcaaggcgacatacagaaacaaaaagtagaaaaaagagagcaagacaagacaagagaaaacaagggaaaaagcaacacgaaagctggcaaaacaagacgagagagaaacagacaaagagaagagaagagaagaaagaaaagagaagagaagaaagaaggcaaaacgaagaaggacgaagcaagagaagcaggaggaccaggaggaaagaa

SEQ ID NO: 301321 - DNA, 733 bp, Homo sapiens
  misc_feature (452)..(452): n is a, c, g, or t
  misc_feature (462)..(462): n is a, c, g, or t
  misc_feature (657)..(657): n is a, c, g, or t
  misc_feature (675)..(675): n is a, c, g, or t
  misc_feature (678)..(678): n is a, c, g, or t
  misc_feature (680)..(680): n is a, c, g, or t
  misc_feature (686)..(686): n is a, c, g, or t
  misc_feature (691)..(691): n is a, c, g, or t
  misc_feature (704)..(704): n is a, c, g, or t
  misc_feature (707)..(707): n is a, c, g, or t
  misc_feature (709)..(709): n is a, c, g, or t
  misc_feature (715)..(715): n is a, c, g, or t
  misc_feature (719)..(719): n is a, c, g, or t
tcggcacgaggactaggctccgcgggtaatggccaaacgtaccaagaaagtcgggatcgtcggtaaatacgggacccgctatggggcctccctccggaaaatggtgaagaaaattgaaatcagccagcacgccaagtacacttgctctttctgtggcaaaaccaagatgaagagacgagctgtggggatctggcactgtggttcctgcatgaagacagtggctggcggtgcctggacgtacaataccacttccgctgtcacggtaaagtccgccatcagaagactgaaggagttgaaagaccagtagacgctcctctactctttgagacatcactggcctataataaatgggttaatttatgtaacaaaaaaaaaaaaaaaaaattcgagactagttctctctctccaggggcctggggaaaaggacgggtcttcttcggccaaaatggtcngggatatggngaaataaaagagccagctgggagaacctgggacacctccaggcctccggagaagaagggcacgctgttgaagattcaggggaccacgggggaaccaataaggctaggaggggtctctccacgggagggaactagactttagaacactggcgaaaccaaaaatcgcaagctgggcagaactgtgggatcagcggcnggccattgaagatgaacntcngnggagcnctgtngaaacaccggcancgnangacggnccanggatgatgcctcac

SEQ ID NO: 301322 - DNA, 719 bp, Homo sapiens
  misc_feature (451)..(451): n is a, c, g, or t
cgtccgcctaataccgcgcctgcgcaccgcgtctcttcctttctgggctcggacctaggtcgcggcgacatggccaaacgtaccaagaaagtcgggatcgtcggtaaatacgggacccgctatggggcctccctccggaaaatggtgaagaaaattgaaatcagccagcacgccaagtacacttgctctttctgtggcaaaaccaagatgaagagacgagctgtggggatctggcactgtggttcctgcatgaagacagtggctggcggtgcctggacgtacaataccacttccgctgtcacggtaaagtccgccatcagaagactgaaggagttgaaagaccagtagacgctcctctactctttgagacatcactggcctataataaatgggttaatttatgtaacaaaaaaaaaaaaaaaaaaaaaaaaaaaaatttttgggccggccngggccctcgaaaaagttttttaaaaccattcggttggggccggccgggccccaagaaaggttattgctgaaacagtgtggtccaaagcggtgttcccaaggagaaaactccggggacatgtgcacatagcgtccttgtggttctcttccccaatttaaaaaaacgcccgcggcgaaaccagcgcttgtgtgaacacattccgaagggagtcgagaggcacatagggggcttattcacgggcgtcccaagagccgacaattaatacccg

SEQ ID NO: 301323 - DNA, 686 bp, Homo sapiens
  misc_feature (655)..(655): n is a, c, g, or t
aaaaaaaaaaaaaaaacttttttttctgggctcggacctaggtcgcggcgacatggccaaacgtaccaagaaagtcgggatcgtcggtaaatacgggacccgctatggggcctccctccggaaaatggtgaagaaaattgaaatcagccagcacgccaagtacacttgctctttctgtggcaaaaccaagatgaagagacgagctgtggggatctggcactgtggttcctgcatgaagacagtggctggcggtgcctggacgtacaataccacttccgctgtcacggtaaagtccgccatcagaagactgaaggagttgaaagaccagtagacgctcctctactctttgagacatcactggcctataataaatgggttaatttatgtaacaaaaaaaaaaagggcagccgctcgcatctagaactataattttaataatcaacaccctcctagccttactactaataattattacattttgggactaccacaactcaacggctacttagaaaaatccaccccttacgagtgcggtttcgaccctattatcccccgcccgggtccctttctccataaaattcttcttagtagctattaccttcttattattggatctagaaattgccctcctttttaccccttaccatgagccctnaaaaaattaacctgccactaatagttatgtc

SEQ ID NO: 301324 - DNA, 654 bp, Homo sapiens
  misc_feature (543)..(543): n is a, c, g, or t
  misc_feature (651)..(651): n is a, c, g, or t
cgtccgcctaataccgcgcctgcgcaccgcgtctcttcctttctgggctcggacctaggtcgcggcgacatggccaaacgtaccaagaaagtcgggatcgtcggtaaatacgggacccgctatggggcctccctccggaaaatggtgaagaaaattgaaatcagccagcacgccaagtacacttgctctttctgtggcaaaaccaagatgaagagacgagctgtggggatctggcactgtggttcctgcatgaagacagtggctggcggtgcctggacgtacaataccacttccgctgtcacggtaaagtccgccatcagaagactgaaggagttgaaagaccagtagacgctcctctactctttgagacatcactggcctataataaatgggttaatttatgtaacaaaaaaaaaaaaaaaaaaaaaaaaaaaaaaaaaaaaaaaaccccggggggtttttgtgggggggggggaaaaagggggtaagagaaaggggccatggggccaaaaggcggggttccgggacccaaggttttcttgnggcgacaagggggggaaattcgggcggggtcccccataataaggggaggccggataataaattccgagaaaaacccggggtacccggggttaagacacgcagaaaaanagc

SEQ ID NO: 301325 - DNA, 1081 bp, Homo sapiens
cgtccgcctaataccgcgcctgcgcaccgcgtctcttcctttctgggctcggacctaggtcgcggcgacatggccaaacgtaccaagaaagtcgggatcgtcggtaaatacgggacccgctatggggcctccctccggaaaatggtgaagaaaattgaaatcagccagcacgccaagtacacttgctctttctgtggcaaaaccaagatgaagagacgagctgtggggatctggcactgtggttcctgcatgaagacagtggctggcggtgcctggacgtacaataccacttccgctgtcacggtaaagtccgccatcagaagactgaaggagttgaaagaccagtagacgctcctctactctttgagacatcactggcctataataaatgggttaatttatgtaacaaaaaaaaaaaaaaaaaaaaaactcagagggccatcatatgtcggggtcgcgcgagaaaacagagagggtacttggacatggcgcaccaggggtcatagggtggtatcccttgacccaggtttccttggtaccaaaggtgggaaaaatcttcgccgggtcttccccttataggtagagccgcaattaacatttcgcgaaataagcccgggttttacccccgtgcatttagtgtgaaacgtcgcgaaaaaaaacagcaacgacgcaacaagcgacagaagacacacgacgacaacagccagaaccagaaacaagcgacgggacacacgacgacacaaatatggaagaacaacacaaccatagagagagacaagaaaaacacagcagctaaataacaagagtgaaaaaaaaacaaaaaaaagatggaaagaagacaacaacaaaaagaaacacacaagaaagattagcaaggcgacatacagaaacaaaaagtagaaaaaagagagcaagacaagacaagagaaaacaagggaaaaagcaacacgaaagctggcaaaacaagacgagagagaaacagacaaagagaagagaagagaagaaagaaaagagaagagaagaaagaaggcaaaacgaagaaggacgaagcaagagaagcaggaggaccaggaggaaagaa

SEQ ID NO: 301326 - DNA, 411 bp, Homo sapiens
cgtccgcctaataccgcgcctgcgcaccgcgtctcttcctttctgggctcggacctaggtcgcggcgacatggccaaacgtaccaagaaagtcgggatcgtcggtaaatacgggacccgctatggggcctccctccggaaaatggtgaagaaaattgaaatcagccagcacgccaagtacacttgctctttctgtggcaaaaccaagatgaagagacgagctgtggggatctggcactgtggttcctgcatgaagacagtggctggcggtgcctggacgtacaataccacttccgctgtcacggtaaagtccgccatcagaagactgaaggagttgaaagaccagtagacgctcctctactctttgagacatcactggcctataataaatgggttaatttatgtaacaaaa

SEQ ID NO: 301327 - DNA, 177 bp, Homo sapiens
gaggagaaggagtgaacaaaatcacgcccgcaatgaaaacaaaaactcagtaccacttccgctgtcacggtaaagtccgccatcagaagactgaaggagttgaaagaccagtagacgctcctctactctttgagacatcactggcctataataaatgggttaatttatgtaacaaaa

SEQ ID NO: 301328 - DNA, 547 bp, Homo sapiens
ggttctgcgtttgactaagctggtggtggatagtcacgtgcagtatcggctgggcaatgtggatgccttccagctggcagatggattgcagtatatatttgcccatgttgggcagttgacgggcatgtatcgatacaaatacaagctgatgcgacagattcgcatgtgcaaggacctgaagcatctcatctattatcgtttcaacacggccaaacgtaccaagaaagtcgggatcgtcggtaaatacgggacccgctatggggcctccctccggaaaatggtgaagaaaattgaaatcagccagcacgccaagtacacttgctctttctgtggcaaaaccaagatgaagagacgagctgtggggatctggcactgtggttcctgcatgaagacagtggctggcggtgcctggacgtacaataccacttccgctgtcacggtaaagtccgccatcagaagactgaaggagttgaaagaccagtagacgctcctctactctttgagacatcactggcctataataaatgggttaatttatgtaacaaaa

SEQ ID NO: 301329 - DNA, 380 bp, Homo sapiens
ggacggcgtgggtcgacccacgcgtcggtcgcggcgacatggccaaacgtaccaagaaagtcgggatcgtcggtaaatacgggacccgctatggggcctccctccggaaaatggtgaagaaaattgaaatcagccagcacgccaagtacacttgctctttctgtggcaaaaccaagatgaagagacgagctgtggggatctggcactgtggttcctgcatgaagacagtggctggcggtgcctggacgtacaataccacttccgctgtcacggtaaagtccgccatcagaagactgaaggagttgaaagaccagtagacgctcctctactctttgagacatcactggcctataataaatgggttaatttatgtaacaaaa

SEQ ID NO: 301330 - DNA, 867 bp, Homo sapiens
cgttgaatggcccggaggcgttgaatggcccggaggcgttgaatggccaaacgtaccaagaaagtcgggatcgtcggtaaatacgggacccgctatggggcctccctccggaaaatggtgaagaaaattgaaatcagccagcacgccaagtacacttgctctttctgtggcaaaggctgaggcaggtggattacttgaggccaggagattgagaccagtgtggccaacatagcaaaaacccgtctcgacgaaaaatacagaaaatagcttggtatggtggcacgtgcctgtagtcccagctactttggaggctcaggcacaagaatcacttgaacctacgaggcggaggttgcagtgagccaggatcgtgccactgcactttatttagccaggacaacactctgtctccaaaaaaaagtttctgaaggtaaaagatatactaaaggatatacatatactgcctcttctatgatgtttcatttgacctacaccatcagcatcttcaggaaacagtatgaaactaatttcacattaaatgttgcaaacgtctgcaattctccagtttttagtttgcacgtaaggattcgtaggattgatttcagattgacagatggttgtagtaacaaaaaaatgaattgccttggagaattcgagttattttaggcctgcctttgacacttttatgcacttaattcactgccaatttagtctaactcctcaaccatctgtggtatggacttctcagtcctcctaattggtatgtcttttatctatcccagagtcagtagtcctttaaggatgcaaatttaattcgataagaatgtggatttacttcatctttaggacagagtaaaaacctttatttca

SEQ ID NO: 301331 - DNA, 634 bp, Homo sapiens
  misc_feature (587)..(587): n is a, c, g, or t
  misc_feature (607)..(607): n is a, c, g, or t
  misc_feature (624)..(624): n is a, c, g, or t
cgtccgcctaataccgcgcctgcgcaccgcgtctcttcctttctgggctcggacctaggtcgcggcgacatggccaaacgtaccaagaaagtcgggatcgtcggtaaatacgggacccgctatggggcctccctccggaaaatggtgaagaaaattgaaatcagccagcacgccaagtacacttgctctttctgtggcaaaaccaagatgaagagacgagctgtggggatctggcactgtggttcctgcatgaagacagtggctggcggtgcctggacgtacaataccacttccgctgtcacggtaaagtccgccatcagaagactgaaggagttgaaagaccagtagacgctcctctactctttgagacatcactggcctataataaatgggttaatttatgtaacaaaaattgccttggcttgttaactttattagacattctgatgtttgcattgtgtaaatactgttgtattggaaaagcatgccaagatggattattgtaattcagtgtcttttttagtagtcaaatggtaaaatgcagcataagaatataagtcttccaagttaaaaaaaaaagaacaagnccaaaacgcccataaaaaanggccacatgtgctcganctgcaggtcg

SEQ ID NO: 301332 - DNA, 442 bp, Homo sapiens
  misc_feature (71)..(71): n is a, c, g, or t
gcggccgcctactactactaaattcgcggccgcgtcgacacgagaagacgacagaaggggctttctgggcncggcgacatcggacctaggtcgcggcgacatggccaaacgtaccaagaaagtcgggatcgtcggtaaatacgggacccgctatggggcctccctccggaaaatggtgaagaaaattgaaatcagccagcacgccaagtacacttgctctttctgtggcaaaaccaagatgaagagacgagctgtggggatctggcactgtggttcctgcatgaagacagtggctggcggtgcctggacgtacaataccacttccgctgtcacggtaaagtccgccatcagaagactgaaggagttgaaagaccagtagacgctcctctactctttgagacatcactggcctataataaatgggttaatttatgtaacaaaa

SEQ ID NO: 301333 - DNA, 420 bp, Homo sapiens
  misc_feature (71)..(71): n is a, c, g, or t
gcggccgcctactactactaaattcgcggccgcgtcgacacgagaagacgacagaaggggctttctgggcncggcgacatggccaaacgtaccaagaaagtcgggatcgtcggtaaatacgggacccgctatggggcctccctccggaaaatggtgaagaaaattgaaatcagccagcacgccaagtacacttgctctttctgtggcaaaaccaagatgaagagacgagctgtggggatctggcactgtggttcctgcatgaagacagtggctggcggtgcctggacgtacaataccacttccgctgtcacggtaaagtccgccatcagaagactgaaggagttgaaagaccagtagacgctcctctactctttgagacatcactggcctataataaatgggttaatttatgtaacaaaa

SEQ ID NO: 301334 - DNA, 624 bp, Homo sapiens
  misc_feature (513)..(513): n is a, c, g, or t
  misc_feature (523)..(523): n is a, c, g, or t
  misc_feature (540)..(540): n is a, c, g, or t
ccccttcgagttcccgtccgaaattcgcggccgactactactactaaattcgcggccgcgtcgaccggacctaggtcgcggcgacatggccaaacgtaccaagaaagtcgggatcgtcggtaaatacgggacccgctatggggcctccctccggaaaatggtgaagaaaattgaaatcagccagcacgccaagtacacttgctctttctgtggcaaaaccaagatgaagagacgagctgtggggatctggcactgtggttcctgcatgaagacagtggctggcggtgcctggacgtacaataccacttccgctgtcacggtaaagtccgccatcagaagactgaaggagttgaaagaccagtagacgctcctctactctttgagacatcactggcctataataaatgggttaatttatgtaacaaaaaaaaaaaaaaaaaaaaaaaaaaaaaaaaaaaaaaaaaaaaaaaaaaaaaaaaaaaaaaaaaaaaaaaaaaaaaagagagagggggnggcgcgcgcnaacaaagaccacacccnggaggggcgccccacacgcagccgccgcgccccctcttttagtgaagcaagggggcgcccccaaaaggggggggcgataaatag

SEQ ID NO: 301335 - DNA, 963 bp, Homo sapiens
ccccttcgagttcccgtccgaaattcgcggccgactactactactaaattcgcggccgcgtcgaccggacctaggtcgcggcgacatggccaaacgtaccaagaaagtcgggatcgtcggtaaatacgggacccgctatggggcctccctccggaaaatggtgaagaaaattgaaatcagccagcacgccaagtacacttgctctttctgtggcaaaaccaagatgaagagacgagctgtggggatctggcactgtggttcctgcatgaagacagtggctggcggtgcctggacgtacaataccacttccgctgtcacggtaaagtccgccatcagaagactgaaggagttgaaagaccagtagacgctcctctactctttgagacatcactggcctataataaatgggttaatttatgtaacaaaaaaaaaaaaaaaaaaaaaaaaaaaaaaaaaaaaaaaaaaaaaaaaaaaaaaaaaaaaaaaaaaaaaaaaggagggggggcgcgcccccacaaaataccccccgcggggggcgcccacaagagaacgagccacccgcgtattattcgaaaaagagagggggccccaataagagagggaggcgaaataataaaaacacgaagcgagagcggacgcgacgaaataaacaaaagagtagagaggaggagagacaaacaggacacagcagaggtacaatgagagagagaagaccacaatcggcggggagggggagaaacaacaatgatggggggcgaacaaaaccccactgaagaaaattatttaaaggcactgatgaggagagaacaaaataaataacattgggcaggggttgttaatgagtgtgaaccaacaagcagacatagtatgtgatgtgccgcatcaaaaaaaactatctggtaaaaccagagttatgttttagaaaaaaattttaaacgcaggggaggggttaaatgaaatggg

SEQ ID NO: 301336 - DNA, 1212 bp, Homo sapiens
  misc_feature (1212)..(1212): n is a, c, g, or t
ccccttcgagttcccgtccgaaattcgcggccgactactactactaaattcgcggccgcgtcgaccggacctaggtcgcggcgacatggccaaacgtaccaagaaagtcgggatcgtcggtaaatacgggacccgctatggggcctccctccggaaaatggtgaagaaaattgaaatcagccagcacgccaagtacacttgctctttctgtggcaaaaccaagatgaagagacgagctgtggggatctggcactgtggttcctgcatgaagacagtggctggcggtgcctggacgtacaataccacttccgctgtcacggtaaagtccgccatcagaagactgaaggagttgaaagaccagtagacgctcctctactctttgagacatcactggcctataataaatgggttaatttatgtaacaaaaaaaaaaaaaaaaaaaaaaaaaaaaaaaaaaaaaaaaaaaaaaaaaaaaaaaaaaaaaaaaaaaaaaaaaaaaaaaaaaaaaaaaaaaaaaaaaaaaaaaaaaaacaaaaaaaaaaaaaaaaaaaaaaaaaaaaaaaaaaaaaaaaaaaaaaaaaaaaaaaaaagccgggggggggggccaataaaacccccggggggggccccctcgccccccctttttttgcaaacagggtggcccctaatagggtagggctattaaatagacgcgagggacgggggaggcatttaaaaaccaatggtgaggacaggtgaaaaaacgatgatagatgtcggagcatctggagggaaggcacagccaattagtggtgttgcgggtccactatacgggggcaccaccatgtccgaagaagatttatagagcgccgataggacaaatcaaaaagtaagcgtgtatattggtgataaccaagatcgtatatgctgtggttagaagacctgtgggcaccgcgggttagtgctttagaacacatctaacgggctcggacgtagacaccgagcggcagagtcactaagacaaacagcaagcaaagagcacggcacggagcacgcgagtctcagcgacaaacacggagacgaaccacacaacaagccatcagacacggaagcgctaaccacaagaacgcagcagaaccagacaacatgactagcaggagagcagaggatcaacgacgtacgaaccagcaagctagacacatggcaaggacatagatcgatgccgccgccacn

SEQ ID NO: 301337 - DNA, 603 bp, Homo sapiens
  misc_feature (17)..(17): n is a, c, g, or t
  misc_feature (492)..(492): n is a, c, g, or t
  misc_feature (502)..(502): n is a, c, g, or t
  misc_feature (519)..(519): n is a, c, g, or t
cgccgccgccgacacgngcgagaagacgacagaagggctgggctcggacctaggtcgcggcgacatggccaaacgtaccaagaaagtcgggatcgtcggtaaatacgggacccgctatggggcctccctccggaaaatggtgaagaaaattgaaatcagccagcacgccaagtacacttgctctttctgtggcaaaaccaagatgaagagacgagctgtggggatctggcactgtggttcctgcatgaagacagtggctggcggtgcctggacgtacaataccacttccgctgtcacggtaaagtccgccatcagaagactgaaggagttgaaagaccagtagacgctcctctactctttgagacatcactggcctataataaatgggttaatttatgtaacaaaaaaaaaaaaaaaaaaaaaaaaaaaaaaaaaaaaaaaaaaaaaaaaaaaaaaaaaaaaaaaaaaaaaaaaaaaaaagagagagggggnggcgcgcgcnaacaaagaccacacccnggaggggcgccccacacgcagccgccgcgccccctcttttagtgaagcaagggggcgcccccaaaaggggggggcgataaatag

SEQ ID NO: 301338 - DNA, 587 bp, Homo sapiens
  misc_feature (476)..(476): n is a, c, g, or t
  misc_feature (486)..(486): n is a, c, g, or t
  misc_feature (503)..(503): n is a, c, g, or t
tactactaagttcgcggcagctacaaaccggacctaggtcgcggcgacatggccaaacgtaccaagaaagtcgggatcgtcggtaaatacgggacccgctatggggcctccctccggaaaatggtgaagaaaattgaaatcagccagcacgccaagtacacttgctctttctgtggcaaaaccaagatgaagagacgagctgtggggatctggcactgtggttcctgcatgaagacagtggctggcggtgcctggacgtacaataccacttccgctgtcacggtaaagtccgccatcagaagactgaaggagttgaaagaccagtagacgctcctctactctttgagacatcactggcctataataaatgggttaatttatgtaacaaaaaaaaaaaaaaaaaaaaaaaaaaaaaaaaaaaaaaaaaaaaaaaaaaaaaaaaaaaaaaaaaaaaaaaaaaaaaagagagagggggnggcgcgcgcnaacaaagaccacacccnggaggggcgccccacacgcagccgccgcgccccctcttttagtgaagcaagggggcgcccccaaaaggggggggcgataaatag

SEQ ID NO: 301339 - DNA, 636 bp, Homo sapiens
  misc_feature (475)..(475): n is a, c, g, or t
  misc_feature (482)..(482): n is a, c, g, or t
  misc_feature (485)..(485): n is a, c, g, or t
ccccttcgagttcccgtccgaaattcgcggccgactactactactaaattcgcggccgcgtcgaccggacctaggtcgcggcgacatggccaaacgtaccaagaaagtcgggatcgtcggtaaatacgggacccgctatggggcctccctccggaaaatggtgaagaaaattgaaatcagccagcacgccaagtacacttgctctttctgtggcaaaaccaagatgaagagacgagctgtggggatctggcactgtggttcctgcatgaagacagtggctggcggtgcctggacgtacaataccacttccgctgtcacggtaaagtccgccatcagaagactgaaggagttgaaagaccagtagacgctcctctactctttgagacatcactggcctataataaatgggttaatttatgtaacaaaaaaaaaaaaaaaaaaaaaaaaaaaaaaaaaaaaaaaaaaaaaaacccgnggggagnctnataatggcgcgggggcgcggagaaaaagagggggaaagagaaaggggcacagagggggccacaagaggggtgtcccggggcacccagagttttctggggtcacaaaggggggcaaacgggggggcccccctaaagggggagggaataaatg

SEQ ID NO: 301340 - DNA, 676 bp, Homo sapiens
  misc_feature (565)..(565): n is a, c, g, or t
  misc_feature (673)..(673): n is a, c, g, or t
ccccttcgagttcccgtccgaaattcgcggccgactactactactaaattcgcggccgcgtcgaccggacctaggtcgcggcgacatggccaaacgtaccaagaaagtcgggatcgtcggtaaatacgggacccgctatggggcctccctccggaaaatggtgaagaaaattgaaatcagccagcacgccaagtacacttgctctttctgtggcaaaaccaagatgaagagacgagctgtggggatctggcactgtggttcctgcatgaagacagtggctggcggtgcctggacgtacaataccacttccgctgtcacggtaaagtccgccatcagaagactgaaggagttgaaagaccagtagacgctcctctactctttgagacatcactggcctataataaatgggttaatttatgtaacaaaaaaaaaaaaaaaaaaaaaaaaaaaaaaaaaaaaaaaaaaaaaaacccggggggtttttgtgggggggggggaaaaagggggtaagagaaaggggccatggggccaaaaggcggggttccgggacccaaggttttcttgnggcgacaagggggggaaattcgggcggggtcccccataataaggggaggccggataataaattccgagaaaaacccggggtacccggggttaagacacgcagaaaaanagc

SEQ ID NO: 301341 - DNA, 1187 bp, Homo sapiens
  misc_feature (1187)..(1187): n is a, c, g, or t
ccccttcgagttcccgtccgaaattcgcggccgactactactactaaattcgcggccgcgtcgaccggacctaggtcgcggcgacatggccaaacgtaccaagaaagtcgggatcgtcggtaaatacgggacccgctatggggcctccctccggaaaatggtgaagaaaattgaaatcagccagcacgccaagtacacttgctctttctgtggcaaaaccaagatgaagagacgagctgtggggatctggcactgtggttcctgcatgaagacagtggctggcggtgcctggacgtacaataccacttccgctgtcacggtaaagtccgccatcagaagactgaaggagttgaaagaccagtagacgctcctctactctttgagacatcactggcctataataaatgggttaatttatgtaacaaaaaaaaaaaaaaaaaaaaaaaaaaaaaaaaaaaaaaaaaaaaaaaaaaaaaaaaaaaaaaaaaaaaaaaaaaaaaaaaaaacaaaaaaaaaaaaaaaaaaaaaaaaaaaaaaaaaaaaaaaaaaaaaaaaaaaaaaaaaagccgggggggggggccaataaaacccccggggggggccccctcgccccccctttttttgcaaacagggtggcccctaatagggtagggctattaaatagacgcgagggacgggggaggcatttaaaaaccaatggtgaggacaggtgaaaaaacgatgatagatgtcggagcatctggagggaaggcacagccaattagtggtgttgcgggtccactatacgggggcaccaccatgtccgaagaagatttatagagcgccgataggacaaatcaaaaagtaagcgtgtatattggtgataaccaagatcgtatatgctgtggttagaagacctgtgggcaccgcgggttagtgctttagaacacatctaacgggctcggacgtagacaccgagcggcagagtcactaagacaaacagcaagcaaagagcacggcacggagcacgcgagtctcagcgacaaacacggagacgaaccacacaacaagccatcagacacggaagcgctaaccacaagaacgcagcagaaccagacaacatgactagcaggagagcagaggatcaacgacgtacgaaccagcaagctagacacatggcaaggacatagatcgatgccgccgccacn

SEQ ID NO: 301342 - DNA, 1742 bp, Homo sapiens
ccccttcgagttcccgtccgaaattcgcggccgactactactactaaattcgcggccgcgtcgaccggacctaggtcgcggcgacatggccaaacgtaccaagaaagtcgggatcgtcggtaaatacgggacccgctatggggcctccctccggaaaatggtgaagaaaattgaaatcagccagcacgccaagtacacttgctctttctgtggcaaaaccaagatgaagagacgagctgtggggatctggcactgtggttcctgcatgaagacagtggctggcggtgcctggacgtacaataccacttccgctgtcacggtaaagtccgccatcagaagactgaaggagttgaaagaccagtagacgctcctctactctttgagacatcactggcctataataaatgggttaatttatgtaacaaaaattgccttggcttgttaactttattagacattctgatgtttgcattgtgtaaatactgttgtattggaaaagcatgccaagatggattattgtaattcagtgtcttttttagtagtcaaatggtaaaatgcagcataagaatataagtcttccaagttagatatgagtgttagctttttataagtctgctcctgccagtttgactttgagatacattggagccaactgtaaactttagtttttaaattacagttagtttttttgtttgtttttgaggcggagtctctgttacccaggctggagtgcagtataccagtcttggcccacttcaacctccacttcttaggttcaagcgattctcctgcctcagcctcctgagtagctgggattgcaggcacgcaccaccatacctggctaatttttgtattttgagtagagatggagttttcaccacattggccaggctgttcttgaactgacctcaagcgatccacctgccttggccttccagagtgctgggattgcaggtgtgggccaccacgcccagccttgcatttaatatttttataatgtgtctaggctgggtgcggtgactcacgcctgaaatcccagcactttgggtggctgaggcaggtggattacttgaggccaggagattgagaccagtgtggccaacatagcaaaaacccgtctcgacgaaaaatacagaaaatagcttggtatggtggcacgtgcctgtagtcccagctactttggaggctcaggcacaagaatcacttgaacctacgaggcggaggttgcagtgagccaggatcgtgccactgcactttatttagccaggacaacactctgtctccaaaaaaaagtttctgaaggtaaaagatatactaaaggatatacatatactgcctcttctatgatgtttcatttgacctacaccatcagcatcttcaggaaacagtatgaaactaatttcacattaaatgttgcaaacgtctgcaattctccagtttttagtttgcacgtaaggattcgtaggattgatttcagattgacagatggttgtagtaacaaaaaaatgaattgccttggagaattcgagttattttaggcctgcctttgacacttttatgcacttaattcactgccaatttagtctaactcctcaaccatctgtggtatggacttctcagtcctcctaattggtatgtcttttatctatcccagagtcagtagtcctttaaggatgcaaatttaattcgataagaatgtggatttacttcatctttaggacagagtaaaaacctttatttca

SEQ ID NO: 301343 - DNA, 1822 bp, Homo sapiens
  misc_feature (17)..(17): n is a, c, g, or t
agggcaaactcccagangattttaaccttggtccaagtccaagcaattttagaatcccctggtggtctagtggttagattcgggcgcttttcaccgccgcgggccgggttcgtttcccggtcagggaacccttcctttctgggctcggacctaggtcgcggcgacatggccaaacgtaccaagaaagtcgggatcgtcggtaaatacgggacccgctatggggcctccctccggaaaatggtgaagaaaattgaaatcagccagcacgccaagtacacttgctctttctgtggcaaaaccaagatgaagagacgagctgtggggatctggcactgtggttcctgcatgaagacagtggctggcggtgcctggacgtacaataccacttccgctgtcacggtaaagtccgccatcagaagactgaaggagttgaaagaccagtagacgctcctctactctttgagacatcactggcctataataaatgggttaatttatgtaacaaaaattgccttggcttgttaactttattagacattctgatgtttgcattgtgtaaatactgttgtattggaaaagcatgccaagatggattattgtaattcagtgtcttttttagtagtcaaatggtaaaatgcagcataagaatataagtcttccaagttagatatgagtgttagctttttataagtctgctcctgccagtttgactttgagatacattggagccaactgtaaactttagtttttaaattacagttagtttttttgtttgtttttgaggcggagtctctgttacccaggctggagtgcagtataccagtcttggcccacttcaacctccacttcttaggttcaagcgattctcctgcctcagcctcctgagtagctgggattgcaggcacgcaccaccatacctggctaatttttgtattttgagtagagatggagttttcaccacattggccaggctgttcttgaactgacctcaagcgatccacctgccttggccttccagagtgctgggattgcaggtgtgggccaccacgcccagccttgcatttaatatttttataatgtgtctaggctgggtgcggtgactcacgcctgaaatcccagcactttgggtggctgaggcaggtggattacttgaggccaggagattgagaccagtgtggccaacatagcaaaaacccgtctcgacgaaaaatacagaaaatagcttggtatggtggcacgtgcctgtagtcccagctactttggaggctcaggcacaagaatcacttgaacctacgaggcggaggttgcagtgagccaggatcgtgccactgcactttatttagccaggacaacactctgtctccaaaaaaaagtttctgaaggtaaaagatatactaaaggatatacatatactgcctcttctatgatgtttcatttgacctacaccatcagcatcttcaggaaacagtatgaaactaatttcacattaaatgttgcaaacgtctgcaattctccagtttttagtttgcacgtaaggattcgtaggattgatttcagattgacagatggttgtagtaacaaaaaaatgaattgccttggagaattcgagttattttaggcctgcctttgacacttttatgcacttaattcactgccaatttagtctaactcctcaaccatctgtggtatggacttctcagtcctcctaattggtatgtcttttatctatcccagagtcagtagtcctttaaggatgcaaatttaattcgataagaatgtggatttacttcatctttaggacagagtaaaaacctttatttca

SEQ ID NO: 301344 - DNA, 1365 bp, Homo sapiens
ccccttcgagttcccgtccgaaattcgcggccgactactactactaaattcgcggccgcgtcgaccggacctaggtcgcggcgacatggccaaacgtaccaagaaagtcgggatcgtcggtaaatacgggacccgctatggggcctccctccggaaaatggtgaagaaaattgaaatcagccagcacgccaagtacacttgctctttctgtggcaaaaccaagatgaagagacgagctgtggggatctggcactgtggttcctgcatgaagacagtggctggcggtgcctggacgtacaataccacttccgctgtcacggtaaagtccgccatcagaagactgaaggagttgaaagaccagtagacgctcctctactctttgagacatcactggcctataataaatgggttaatttatgtaacaaaaattgccttggcttgttaactttattagacattctgatgtttgcattgtgtaaatactgttgtattggaaaagcatgccaagatggattattgtaattcagtgtcttttttagtagtcaaatggtaaaatgcagcataagaatataagtcttccaagttagatatgagtgttagctttttataagtctgctcctgccagtttgactttgagatacattggagccaactgtaaactttagtttttaaattacagttagtttttttgtttgtttttgaggcggagtctctgttacccaggctggagtgcagtataccagtcttggcccacttcaacctccacttcttaggttcaagcgattctcctgcctcagctactttggaggctcaggcacaagaatcacttgaacctacgaggcggaggttgcagtgagccaggatcgtgccactgcactttatttagccaggacaacactctgtctccaaaaaaaagtttctgaaggtaaaagatatactaaaggatatacatatactgcctcttctatgatgtttcatttgacctacaccatcagcatcttcaggaaacagtatgaaactaatttcacattaaatgttgcaaacgtctgcaattctccagtttttagtttgcacgtaaggattcgtaggattgatttcagattgacagatggttgtagtaacaaaaaaatgaattgccttggagaattcgagttattttaggcctgcctttgacacttttatgcacttaattcactgccaatttagtctaactcctcaaccatctgtggtatggacttctcagtcctcctaattggtatgtcttttatctatcccagagtcagtagtcctttaaggatgcaaatttaattcgataagaatgtggatttacttcatctttaggacagagtaaaaacctttatttca

SEQ ID NO: 301345 - DNA, 1303 bp, Homo sapiens
ccccttcgagttcccgtccgaaattcgcggccgactactactactaaattcgcggccgcgtcgaccggacctaggtcgcggcgacatggccaaacgtaccaagaaagtcgggatcgtcggtaaatacgggacccgctatggggcctccctccggaaaatggtgaagaaaattgaaatcagccagcacgccaagtacacttgctctttctgtggcaaaaccaagatgaagagacgagctgtggggatctggcactgtggttcctgcatgaagacagtggctggcggtgcctggacgtacaataccacttccgctgtcacggtaaagtccgccatcagaagactgaaggagttgaaagaccagtagacgctcctctactctttgagacatcactggcctataataaatgggttaatttatgtaacaaaaattgccttggcttgttaactttattagacattctgatgtttgcattgtgtaaatactgttgtattggaaaagcatgccaagatggattattgtaattcagtgtcttttttagtagtcaaatggtaaaatgcagcataagaatataagtcttccaagttagatatgagtgttagctttttataagtctgctcctgccagtttgactttgagatacattggagccaactgtaaactttagtttttaaattacagttagtttttttgtttgtttttgaggcggagtctctgttacccaggctggagtgcagtataccagtcttggcccacttcaacctccattgaacctacgaggcggaggttgcagtgagccaggatcgtgccactgcactttatttagccaggacaacactctgtctccaaaaaaaagtttctgaaggtaaaagatatactaaaggatatacatatactgcctcttctatgatgtttcatttgacctacaccatcagcatcttcaggaaacagtatgaaactaatttcacattaaatgttgcaaacgtctgcaattctccagtttttagtttgcacgtaaggattcgtaggattgatttcagattgacagatggttgtagtaacaaaaaaatgaattgccttggagaattcgagttattttaggcctgcctttgacacttttatgcacttaattcactgccaatttagtctaactcctcaaccatctgtggtatggacttctcagtcctcctaattggtatgtcttttatctatcccagagtcagtagtcctttaaggatgcaaatttaattcgataagaatgtggatttacttcatctttaggacagagtaaaaacctttatttca

SEQ ID NO: 301346 - DNA, 790 bp, Homo sapiens
  misc_feature (509)..(509): n is a, c, g, or t
  misc_feature (519)..(519): n is a, c, g, or t
  misc_feature (714)..(714): n is a, c, g, or t
  misc_feature (732)..(732): n is a, c, g, or t
  misc_feature (735)..(735): n is a, c, g, or t
  misc_feature (737)..(737): n is a, c, g, or t
  misc_feature (743)..(743): n is a, c, g, or t
  misc_feature (748)..(748): n is a, c, g, or t
  misc_feature (761)..(761): n is a, c, g, or t
  misc_feature (764)..(764): n is a, c, g, or t
  misc_feature (766)..(766): n is a, c, g, or t
  misc_feature (772)..(772): n is a, c, g, or t
  misc_feature (776)..(776): n is a, c, g, or t
ccccttcgagttcccgtccgaaattcgcggccgactactactactaaattcgcggccgcgtcgaccggacctaggtcgcggcgacatggccaaacgtaccaagaaagtcgggatcgtcggtaaatacgggacccgctatggggcctccctccggaaaatggtgaagaaaattgaaatcagccagcacgccaagtacacttgctctttctgtggcaaaaccaagatgaagagacgagctgtggggatctggcactgtggttcctgcatgaagacagtggctggcggtgcctggacgtacaataccacttccgctgtcacggtaaagtccgccatcagaagactgaaggagttgaaagaccagtagacgctcctctactctttgagacatcactggcctataataaatgggttaatttatgtaacaaaaaaaaaaaaaaaaaattcgagactagttctctctctccaggggcctggggaaaaggacgggtcttcttcggccaaaatggtcngggatatggngaaataaaagagccagctgggagaacctgggacacctccaggcctccggagaagaagggcacgctgttgaagattcaggggaccacgggggaaccaataaggctaggaggggtctctccacgggagggaactagactttagaacactggcgaaaccaaaaatcgcaagctgggcagaactgtgggatcagcggcnggccattgaagatgaacntcngnggagcnctgtngaaacaccggcancgnangacggnccanggatgatgcctcac

SEQ ID NO: 301347 - DNA, 1114 bp, Homo sapiens
  misc_feature (1114)..(1114): n is a, c, g, or t
ccccttcgagttcccgtccgaaattcgcggccgactactactactaaattcgcggccgcgtcgaccggacctaggtcgcggcgacatggccaaacgtaccaagaaagtcgggatcgtcggtaaatacgggacccgctatggggcctccctccggaaaatggtgaagaaaattgaaatcagccagcacgccaagtacacttgctctttctgtggcaaaaccaagatgaagagacgagctgtggggatctggcactgtggttcctgcatgaagacagtggctggcggtgcctggacgtacaataccacttccgctgtcacggtaaagtccgccatcagaagactgaaggagttgaaagaccagtagacgctcctctactctttgagacatcactggcctataataaatgggttaatttatgtaacaaaaaaaaaaaaaaaaaaaaaaaaaaaaaaaaaaaaaaaaaaaaaaaaaaaaaaaaaaaaaaaaaaaaagccgggggggggggccaataaaacccccggggggggccccctcgccccccctttttttgcaaacagggtggcccctaatagggtagggctattaaatagacgcgagggacgggggaggcatttaaaaaccaatggtgaggacaggtgaaaaaacgatgatagatgtcggagcatctggagggaaggcacagccaattagtggtgttgcgggtccactatacgggggcaccaccatgtccgaagaagatttatagagcgccgataggacaaatcaaaaagtaagcgtgtatattggtgataaccaagatcgtatatgctgtggttagaagacctgtgggcaccgcgggttagtgctttagaacacatctaacgggctcggacgtagacaccgagcggcagagtcactaagacaaacagcaagcaaagagcacggcacggagcacgcgagtctcagcgacaaacacggagacgaaccacacaacaagccatcagacacggaagcgctaaccacaagaacgcagcagaaccagacaacatgactagcaggagagcagaggatcaacgacgtacgaaccagcaagctagacacatggcaaggacatagatcgatgccgccgccacn

SEQ ID NO: 301348 - DNA, 487 bp, Homo sapiens
  misc_feature (466)..(466): n is a, c, g, or t
ccccttcgagttcccgtccgaaattcgcggccgactactactactaaattcgcggccgcgtcgaccggacctaggtcgcggcgacatggccaaacgtaccaagaaagtcgggatcgtcggtaaatacgggacccgctatggggcctccctccggaaaatggtgaagaaaattgaaatcagccagcacgccaagtacacttgctctttctgtggcaaaaccaagatgaagagacgagctgtggggatctggcactgtggttcctgcatgaagacagtggctggcggtgcctggacgtacaataccacttccgctgtcacggtaaagtccgccatcagaagactgaaggagttgaaagaccagtagacgctcctctactctttgagacatcactggcctataataaatgggttaatttatgtaacaaaaaaaaaaagtcgacgcggccgcgaatttagtagtagtagnctagtagtagtaggcggccgc

SEQ ID NO: 301349 - DNA, 715 bp, Homo sapiens
ccccttcgagttcccgtccgaaattcgcggccgactactactactaaattcgcggccgcgtcgaccggacctaggtcgcggcgacatggccaaacgtaccaagaaagtcgggatcgtcggtaaatacgggacccgctatggggcctccctccggaaaatggtgaagaaaattgaaatcagccagcacgccaagtacacttgctctttctgtggcaaaaccaagatgaagagacgagctgtggggatctggcactgtggttcctgcatgaagacagtggctggcggtgcctggacgtacaataccacttccgctgtcacggtaaagtccgccatcagaagactgaaggagttgaaagaccagtagacgctcctctactctttgagacatcactggcctataataaatgggttaatttatgtaacaaaaacacactcaacccctccctcctcacctccttccaggaaatacctccctcccctacacacaaccatgccgcccgcctgggccaagtcgattttagattcgggcaggtttatgcatgcggccgaatttcgggttaacttgcccatttcgcctatagcgggccgctttacaattcactggtcgccgttttacaacggcgtgactgtgaaacccctggcgttacccaatttcgcctttgaggacaatcccctttccccagcttggcgctcagccacaggccccccccggccg

SEQ ID NO: 301350 - DNA, 641 bp, Homo sapiens
  misc_feature (466)..(467): n is a, c, g, or t
  misc_feature (469)..(469): n is a, c, g, or t
  misc_feature (476)..(477): n is a, c, g, or t
ccccttcgagttcccgtccgaaattcgcggccgactactactactaaattcgcggccgcgtcgaccggacctaggtcgcggcgacatggccaaacgtaccaagaaagtcgggatcgtcggtaaatacgggacccgctatggggcctccctccggaaaatggtgaagaaaattgaaatcagccagcacgccaagtacacttgctctttctgtggcaaaaccaagatgaagagacgagctgtggggatctggcactgtggttcctgcatgaagacagtggctggcggtgcctggacgtacaataccacttccgctgtcacggtaaagtccgccatcagaagactgaaggagttgaaagaccagtagacgctcctctactctttgagacatcactggcctataataaatgggttaatttatgtaacaaaaaaaaaaaaaaaaaaaaaaaaaaaaaaaaccccggggccnntnttttgcnngggggcgggaacacagggggtatgtgaaggggcccgttggctcattagcgtgttccctgtgccccagtttccttggttccaagggggtaaactcggcgggtcccccttatagggagccgattaaattccgataagcccggggtaccggctatggtccgcgcaat

SEQ ID NO: 301351 - DNA, 719 bp, Homo sapiens
  misc_feature (688)..(688): n is a, c, g, or t
ccccttcgagttcccgtccgaaattcgcggccgactactactactaaattcgcggccgcgtcgaccggacctaggtcgcggcgacatggccaaacgtaccaagaaagtcgggatcgtcggtaaatacgggacccgctatggggcctccctccggaaaatggtgaagaaaattgaaatcagccagcacgccaagtacacttgctctttctgtggcaaaaccaagatgaagagacgagctgtggggatctggcactgtggttcctgcatgaagacagtggctggcggtgcctggacgtacaataccacttccgctgtcacggtaaagtccgccatcagaagactgaaggagttgaaagaccagtagacgctcctctactctttgagacatcactggcctataataaatgggttaatttatgtaacaaaaaaaaaaagggcagccgctcgcatctagaactataattttaataatcaacaccctcctagccttactactaataattattacattttgggactaccacaactcaacggctacttagaaaaatccaccccttacgagtgcggtttcgaccctattatcccccgcccgggtccctttctccataaaattcttcttagtagctattaccttcttattattggatctagaaattgccctcctttttaccccttaccatgagccctnaaaaaattaacctgccactaatagttatgtc

SEQ ID NO: 301352 - DNA, 665 bp, Homo sapiens
ccccttcgagttcccgtccgaaattcgcggccgactactactactaaattcgcggccgcgtcgaccggacctaggtcgcggcgacatggccaaacgtaccaagaaagtcgggatcgtcggtaaatacgggacccgctatggggcctccctccggaaaatggtgaagaaaattgaaatcagccagcacgccaagtacacttgctctttctgtggcaaaaccaagatgaagagacgagctgtggggatctggcactgtggttcctgcatgaagacagtggctggcggtgcctggacgtacaataccacttccgctgtcacggtaaagtccgccatcagaagactgaaggagttgaaagaccagtagacgctcctctactctttgagacatcactggcctataataaatgggttaatttatgtaacaaaaaaaaaaaaaaaaaaaaaaaaaaaaaaaaaaaaaaacacaccggcggcgcctctcttttcccgcggcgggcgacacaacagaagcggtactaacaaacgtagacagtgaggccaataacgtgttcctcaggtcccaagaatttagtggttacccacggggcaacactgggcggccccccataaagagggcgaacaataaatccactaaccccgggtcaccgggtatagaaaacagaaac

SEQ ID NO: 301353 - DNA, 1071 bp, Homo sapiens
ccccttcgagttcccgtccgaaattcgcggccgactactactactaaattcgcggccgcgtcgaccggacctaggtcgcggcgacatggccaaacgtaccaagaaagtcgggatcgtcggtaaatacgggacccgctatggggcctccctccggaaaatggtgaagaaaattgaaatcagccagcacgccaagtacacttgctctttctgtggcaaaaccaagatgaagagacgagctgtggggatctggcactgtggttcctgcatgaagacagtggctggcggtgcctggacgtacaataccacttccgctgtcacggtaaagtccgccatcagaagactgaaggagttgaaagaccagtagacgctcctctactctttgagacatcactggcctataataaatgggttaatttatgtaacaaaaaaaaaaaaaaaaaactcggaattatttcctcctctttttcttccctggggccgaatttcggcacgagggaattttcttctcaggatttaaaaaaaaaatcggggggtggctaggatcccactcttcagatacgggagacactacaagggcagtatccccatcattcttctggtacgggatgcaggtttctccagcgggatttctggagctgatgggacataactaagcttaacgggggaatttggctgacccatttaaacttggcagagtgcaacttggcaatattcatggggccggtatatcagaccctatatgggtggcaaacccttggcgcaagatactcttgcagaaacgaattgcttcgacgctgtgcgttggagctcctcggataaaagggtgccctaggctcaagatgtcctcctgggcaattttggtggacaccacgcttctcctttagattatgggcaggtttcaacagcggttcgccttgacggaggtgggtcgaaatacgaccgaggaatgggcctctaacacaaaattgaccgggcaaccggcctttgaaaagggaaccggcttggactcttgaatgtgccccgatgggggaactcgggggggaggcacatgcgcaacggttatagaagtgc

SEQ ID NO: 301354 - DNA, 913 bp, Homo sapiens
ccccttcgagttcccgtccgaaattcgcggccgactactactactaaattcgcggccgcgtcgaccggacctaggtcgcggcgacatggccaaacgtaccaagaaagtcgggatcgtcggtaaatacgggacccgctatggggcctccctccggaaaatggtgaagaaaattgaaatcagccagcacgccaagtacacttgctctttctgtggcaaaaccaagatgaagagacgagctgtggggatctggcactgtggttcctgcatgaagacagtggctggcggtgcctggacgtacaataccacttccgctgtcacggtaaagtccgccatcagaagactgaaggagttgaaagaccagtagacgctcctctactctttgagacatcactggcctataataaatgggttaatttatgtaacaaaaaaaaaaaaaaaaaaaaaaaaaaaaaaaaaaaaaaaaaaaaacaaaacaacaaaaaaaaacaaaaaagcgcagaagaagacaaacaaaaaaaacaagaaacaagaaaagagccaacacacgaacgaaaacaacgaacagagagcagcagaggagcggggggcggcgcagtaaagacgataacacagaaggaggaaagacaaaaaggagaacacacaaccaaaaagagaagaggaaaagaagagacccgacaacaaaagacacgaaaaatccacaagaagaaaagacacagacagacgaaaaggacaaagagacgaagagagaaagaaaaaacagaccaccagaagcaggaaacgaggaaagaaaaaaaaacaaagagaaggcagaggagcaaacgaggaaaaaacacaaacagaaagaaagaggagccaaaaagcgaaaaagacaaaaaacagagaagtgaaggacaacaagacagaagaaaagaaa

SEQ ID NO: 301355 - DNA, 795 bp, Homo sapiens
  misc_feature (509)..(509): n is a, c, g, or t
ccccttcgagttcccgtccgaaattcgcggccgactactactactaaattcgcggccgcgtcgaccggacctaggtcgcggcgacatggccaaacgtaccaagaaagtcgggatcgtcggtaaatacgggacccgctatggggcctccctccggaaaatggtgaagaaaattgaaatcagccagcacgccaagtacacttgctctttctgtggcaaaaccaagatgaagagacgagctgtggggatctggcactgtggttcctgcatgaagacagtggctggcggtgcctggacgtacaataccacttccgctgtcacggtaaagtccgccatcagaagactgaaggagttgaaagaccagtagacgctcctctactctttgagacatcactggcctataataaatgggttaatttatgtaacaaaaagacacaagaaaaaaaaaaaagaaaaataaaaccgcggggagttgtatgttgtgcgtgcgggcaggggcaaagaagaaaagnggtagcatatgacatacggcggcgcacatctgggtgcaataactgtggtgtcccgcggggaccgcaacttgttcttgtgtggcactaaagcggaggatcaatcgaggcggggggttcgccgcatacataggaggaggcgggacatgtataatgttcagaagataaaccgggtggtattaacgctggccttgatgggatggctggggggaaaagcttgggtttcaattccgaattcttaaaaagaaacgggattgttgaaaacactctgtaagcaggatactactgg

SEQ ID NO: 301356 - DNA, 763 bp, Homo sapiens
ccccttcgagttcccgtccgaaattcgcggccgactactactactaaattcgcggccgcgtcgaccggacctaggtcgcggcgacatggccaaacgtaccaagaaagtcgggatcgtcggtaaatacgggacccgctatggggcctccctccggaaaatggtgaagaaaattgaaatcagccagcacgccaagtacacttgctctttctgtggcaaaaccaagatgaagagacgagctgtggggatctggcactgtggttcctgcatgaagacagtggctggcggtgcctggacgtacaataccacttccgctgtcacggtaaagtccgccatcagaagactgaaggagttgaaagaccagtagacgctcctctactctttgagacatcactggcctataataaatgggttaatttatgtaacaaaaaaaaaaaaaaaaaaaaaaaaaaaaaaaaaagccggggggacgctcgcgatctaaaactagggggggctctgacgctgctcggggaggtcccccgccgcccggcctcccggggtgtcccgggctcgcgcaggacgcagaagggcagtggacccaggtgggagagggagaagcacgaagacggggtgaagtggagacagctggagcacaggggcccgtatttcgacccccatagagccccttcccgaggagtgcgtttcttctatgaaggaaggcctgtgagattgagcgtgcagcggagaggtcgcacttattatgggaggatgttaccatctgata

SEQ ID NO: 301357 - DNA, 688 bp, Homo sapiens
  misc_feature (441)..(441): n is a, c, g, or t
  misc_feature (467)..(467): n is a, c, g, or t
  misc_feature (469)..(469): n is a, c, g, or t
  misc_feature (475)..(475): n is a, c, g, or t
  misc_feature (479)..(479): n is a, c, g, or t
  misc_feature (487)..(487): n is a, c, g, or t
  misc_feature (528)..(528): n is a, c, g, or t
  misc_feature (554)..(554): n is a, c, g, or t
  misc_feature (562)..(562): n is a, c, g, or t
ccccttcgagttcccgtccgaaattcgcggccgactactactactaaattcgcggccgcgtcgaccggacctaggtcgcggcgacatggccaaacgtaccaagaaagtcgggatcgtcggtaaatacgggacccgctatggggcctccctccggaaaatggtgaagaaaattgaaatcagccagcacgccaagtacacttgctctttctgtggcaaaaccaagatgaagagacgagctgtggggatctggcactgtggttcctgcatgaagacagtggctggcggtgcctggacgtacaataccacttccgctgtcacggtaaagtccgccatcagaagactgaaggagttgaaagaccagtagacgctcctctactctttgagacatcactggcctataataaatgggttaatttatgtaacaaaaaaaaaaaaaacccnggaaggcaaaaagggaaaaacaacantnaaaacngggngctccagngctgaacaattgggcagatgaacccatttgacagaggatcnggctttggcaatggggtcagagggcnttgggggncaaagcagagaagtaaagggaatgggcatggggtcgtagagctactaacgggattactcgacaggggaaaccctactatgaaagtatccttgtccatgaccaagggttatgcagggacggggtggc

SEQ ID NO: 301358 - DNA, 1144 bp, Homo sapiens
  misc_feature (1144)..(1144): n is a, c, g, or t
ccccttcgagttcccgtccgaaattcgcggccgactactactactaaattcgcggccgcgtcgaccggacctaggtcgcggcgacatggccaaacgtaccaagaaagtcgggatcgtcggtaaatacgggacccgctatggggcctccctccggaaaatggtgaagaaaattgaaatcagccagcacgccaagtacacttgctctttctgtggcaaaaccaagatgaagagacgagctgtggggatctggcactgtggttcctgcatgaagacagtggctggcggtgcctggacgtacaataccacttccgctgtcacggtaaagtccgccatcagaagactgaaggagttgaaagaccagtagacgctcctctactctttgagacatcactggcctataataaatgggttaatttatgtaacaaaaaaaaaaaaaaaaaaaaaaaaaaaaaaaaaaaaaaaacaaaaaaaaaaaaaaaaaaaaaaaaaaaaaaaaaaaaaaaaaaaaaaaaaaaaaaaaaagccgggggggggggccaataaaacccccggggggggccccctcgccccccctttttttgcaaacagggtggcccctaatagggtagggctattaaatagacgcgagggacgggggaggcatttaaaaaccaatggtgaggacaggtgaaaaaacgatgatagatgtcggagcatctggagggaaggcacagccaattagtggtgttgcgggtccactatacgggggcaccaccatgtccgaagaagatttatagagcgccgataggacaaatcaaaaagtaagcgtgtatattggtgataaccaagatcgtatatgctgtggttagaagacctgtgggcaccgcgggttagtgctttagaacacatctaacgggctcggacgtagacaccgagcggcagagtcactaagacaaacagcaagcaaagagcacggcacggagcacgcgagtctcagcgacaaacacggagacgaaccacacaacaagccatcagacacggaagcgctaaccacaagaacgcagcagaaccagacaacatgactagcaggagagcagaggatcaacgacgtacgaaccagcaagctagacacatggcaaggacatagatcgatgccgccgccacn

SEQ ID NO: 301359 - DNA, 1769 bp, Homo sapiens
gtttgagggcagcgatggctgtggagaaagctgccagcgctagcagagtcctcagcagggcctggggagggaggaggcagagagaaatctttgtgtttcaggtcgcggcgacatggccaaacgtaccaagaaagtcgggatcgtcggtaaatacgggacccgctatggggcctccctccggaaaatggtgaagaaaattgaaatcagccagcacgccaagtacacttgctctttctgtggcaaaaccaagatgaagagacgagctgtggggatctggcactgtggttcctgcatgaagacagtggctggcggtgcctggacgtacaataccacttccgctgtcacggtaaagtccgccatcagaagactgaaggagttgaaagaccagtagacgctcctctactctttgagacatcactggcctataataaatgggttaatttatgtaacaaaaattgccttggcttgttaactttattagacattctgatgtttgcattgtgtaaatactgttgtattggaaaagcatgccaagatggattattgtaattcagtgtcttttttagtagtcaaatggtaaaatgcagcataagaatataagtcttccaagttagatatgagtgttagctttttataagtctgctcctgccagtttgactttgagatacattggagccaactgtaaactttagtttttaaattacagttagtttttttgtttgtttttgaggcggagtctctgttacccaggctggagtgcagtataccagtcttggcccacttcaacctccacttcttaggttcaagcgattctcctgcctcagcctcctgagtagctgggattgcaggcacgcaccaccatacctggctaatttttgtattttgagtagagatggagttttcaccacattggccaggctgttcttgaactgacctcaagcgatccacctgccttggccttccagagtgctgggattgcaggtgtgggccaccacgcccagccttgcatttaatatttttataatgtgtctaggctgggtgcggtgactcacgcctgaaatcccagcactttgggtggctgaggcaggtggattacttgaggccaggagattgagaccagtgtggccaacatagcaaaaacccgtctcgacgaaaaatacagaaaatagcttggtatggtggcacgtgcctgtagtcccagctactttggaggctcaggcacaagaatcacttgaacctacgaggcggaggttgcagtgagccaggatcgtgccactgcactttatttagccaggacaacactctgtctccaaaaaaaagtttctgaaggtaaaagatatactaaaggatatacatatactgcctcttctatgatgtttcatttgacctacaccatcagcatcttcaggaaacagtatgaaactaatttcacattaaatgttgcaaacgtctgcaattctccagtttttagtttgcacgtaaggattcgtaggattgatttcagattgacagatggttgtagtaacaaaaaaatgaattgccttggagaattcgagttattttaggcctgcctttgacacttttatgcacttaattcactgccaatttagtctaactcctcaaccatctgtggtatggacttctcagtcctcctaattggtatgtcttttatctatcccagagtcagtagtcctttaaggatgcaaatttaattcgataagaatgtggatttacttcatctttaggacagagtaaaaacctttatttca

SEQ ID NO: 301360 - DNA, 480 bp, Homo sapiens
  misc_feature (71)..(71): n is a, c, g, or t
  misc_feature (459)..(459): n is a, c, g, or t
gcggccgcctactactactaaattcgcggccgcgtcgacacgagaagacgacagaaggggctttctgggcncggcgacatggccaaacgtaccaagaaagtcgggatcgtcggtaaatacgggacccgctatggggcctccctccggaaaatggtgaagaaaattgaaatcagccagcacgccaagtacacttgctctttctgtggcaaaaccaagatgaagagacgagctgtggggatctggcactgtggttcctgcatgaagacagtggctggcggtgcctggacgtacaataccacttccgctgtcacggtaaagtccgccatcagaagactgaaggagttgaaagaccagtagacgctcctctactctttgagacatcactggcctataataaatgggttaatttatgtaacaaaaaaaaaaagtcgacgcggccgcgaatttagtagtagtagnctagtagtagtaggcggccgc

SEQ ID NO: 301361 - DNA, 1075 bp, Homo sapiens
  misc_feature (1075)..(1075): n is a, c, g, or t
gaaaaaaactaggctagtacgggctggtgttaaatcaggccgaggcatggccaaacgtaccaagaaagtcgggatcgtcggtaaatacgggacccgctatggggcctccctccggaaaatggtgaagaaaattgaaatcagccagcacgccaagtacacttgctctttctgtggcaaaaccaagatgaagagacgagctgtggggatctggcactgtggttcctgcatgaagacagtggctggcggtgcctggacgtacaataccacttccgctgtcacggtaaagtccgccatcagaagactgaaggagttgaaagaccagtagacgctcctctactctttgagacatcactggcctataataaatgggttaatttatgtaacaaaaaaaaaaaaaaaaaaaaaaaaaaaaaaaaaaaaaaaaaaaaaaaaaaaaaaaaaaaaaaaaaaaaagccgggggggggggccaataaaacccccggggggggccccctcgccccccctttttttgcaaacagggtggcccctaatagggtagggctattaaatagacgcgagggacgggggaggcatttaaaaaccaatggtgaggacaggtgaaaaaacgatgatagatgtcggagcatctggagggaaggcacagccaattagtggtgttgcgggtccactatacgggggcaccaccatgtccgaagaagatttatagagcgccgataggacaaatcaaaaagtaagcgtgtatattggtgataaccaagatcgtatatgctgtggttagaagacctgtgggcaccgcgggttagtgctttagaacacatctaacgggctcggacgtagacaccgagcggcagagtcactaagacaaacagcaagcaaagagcacggcacggagcacgcgagtctcagcgacaaacacggagacgaaccacacaacaagccatcagacacggaagcgctaaccacaagaacgcagcagaaccagacaacatgactagcaggagagcagaggatcaacgacgtacgaaccagcaagctagacacatggcaaggacatagatcgatgccgccgccacn

SEQ ID NO: 301362 - DNA, 613 bp, Homo sapiens
  misc_feature (438)..(439): n is a, c, g, or t
  misc_feature (441)..(441): n is a, c, g, or t
  misc_feature (448)..(449): n is a, c, g, or t
gagagagagagagagagagagagagagagagagagagagagagagagtcgcggcgacatggccaaacgtaccaagaaagtcgggatcgtcggtaaatacgggacccgctatggggcctccctccggaaaatggtgaagaaaattgaaatcagccagcacgccaagtacacttgctctttctgtggcaaaaccaagatgaagagacgagctgtggggatctggcactgtggttcctgcatgaagacagtggctggcggtgcctggacgtacaataccacttccgctgtcacggtaaagtccgccatcagaagactgaaggagttgaaagaccagtagacgctcctctactctttgagacatcactggcctataataaatgggttaatttatgtaacaaaaaaaaaaaaaaaaaaaaaaaaaaaaaaaaccccggggccnntnttttgcnngggggcgggaacacagggggtatgtgaaggggcccgttggctcattagcgtgttccctgtgccccagtttccttggttccaagggggtaaactcggcgggtcccccttatagggagccgattaaattccgataagcccggggtaccggctatggtccgcgcaat

SEQ ID NO: 301363 - DNA, 1033 bp, Homo sapiens
gcggccgcctactactactactactactactaaattcgcggccgctcgaggccaaacgtaccaagaaagtcgggatcgtcggtaaatacgggacccgctatggggcctccctccggaaaatggtgaagaaaattgaaatcagccagcacgccaagtacacttgctctttctgtggcaaaaccaagatgaagagacgagctgtggggatctggcactgtggttcctgcatgaagacagtggctggcggtgcctggacgtacaataccacttccgctgtcacggtaaagtccgccatcagaagactgaaggagttgaaagaccagtagacgctcctctactctttgagacatcactggcctataataaatgggttaatttatgtaacaaaaaaaaaaaaaaaaaactcggaattatttcctcctctttttcttccctggggccgaatttcggcacgagggaattttcttctcaggatttaaaaaaaaaatcggggggtggctaggatcccactcttcagatacgggagacactacaagggcagtatccccatcattcttctggtacgggatgcaggtttctccagcgggatttctggagctgatgggacataactaagcttaacgggggaatttggctgacccatttaaacttggcagagtgcaacttggcaatattcatggggccggtatatcagaccctatatgggtggcaaacccttggcgcaagatactcttgcagaaacgaattgcttcgacgctgtgcgttggagctcctcggataaaagggtgccctaggctcaagatgtcctcctgggcaattttggtggacaccacgcttctcctttagattatgggcaggtttcaacagcggttcgccttgacggaggtgggtcgaaatacgaccgaggaatgggcctctaacacaaaattgaccgggcaaccggcctttgaaaagggaaccggcttggactcttgaatgtgccccgatgggggaactcgggggggaggcacatgcgcaacggttatagaagtgc

SEQ ID NO: 301364 - DNA, 1737 bp, Homo sapiens
ccccttcgagttcccgtccgaaattcgcggccgactactactactaaattcgcggccgcgtcgaccggacctaggtcgcggcgacatggccaaacgtaccaagaaagtcgggatcgtcggtaaatacgggacccgctatggggcctccctccggaaaatggtgaagaaaattgaaatcagccagcacgccaagtacacttgctctttctgtggcaaaaccaagatgaagagacgagctgtggggatctggcactgtggttcctgcatgaagacagtggctggcggtgcctggacgtacaaagtgagtctagttccttgtggtatttggaagtgtgtggaccacataggcccaaattccaggttgctgctggatgggctagttttaacactttctcaggactgagagaataaggatgcctttgtattttcaggattcttccgtggtggtttattttcagttattgaaagagtaaacacaaaactaccaaaatagaagtcggaaatctaattcacagactactttagaatttgatggtcactgggcacattgttgtgaacattgtcatgatactgtgcaggtccattagtggggctgaatctactgaacgttgatttgcactgcaagttttgataaaaataggtgaaggggtcagttagttcaaaactgtatttggaacttgaggccatcaggaccaccacagtttcgtctttctgaacagtattagactgctgcaggtttgtgaatctgcaactcagtatcacctgacagggcgatactacaaacactatactacaaactagcatctagacctgtgttgtccaatacactaagcacatatatggctagtgtaattaaagaattggattttaaagtttcagtcaatttaaacttaaaccgaagcagtggaaaatgttgaaatatatatatattccttgtgggggtttttattagggcagaatggaaaatgggaactagagtgctttcttggttctgataggaaagtgaattatttatatacttacaatacaggatggtgattttcaggtatagttcctgaattttatggtaaaacttttgtagtcatttcaatagctgtctttcccaaaggcactttagtgtccgctcttatttccttaatcattgttctcactgtatcatcttgtaatttattcatttcttgtaatctgtccattcccttttaataagtttaggtcagcctcttagaaccatttctttttcatgggatggggtagggggagttaaagcttgcttgtccacaactgagttacttataaaaaaaaaagcaactctggttgagaaatcagatgcatgagattgtatgtctaattctgcaagatcctgaaggcatggctcttaaaggatgccatcatgtagtttagaagccactaatttccgaggagtaatctaatgttggttagatctttggattgactgcagcaaagtattggtagagcagtctatctcagtataattctttctaggaaaatttgggaagcgactttaacacaaaaacgaggcagatttacttatttgccattttctatgttaacatgcttaattatgttggaaactgaatctttctttccagtaccacttccgctgtcacggtaaagtccgccatcagaagactgaaggagttgaaagaccagtagacgctcctctactctttgagacatcactggcctataataaatgggttaatttatgtaacaaaa

SEQ ID NO: 301365 - DNA, 1709 bp, Homo sapiens
gagagagagagagagagagagagagagagagagagagagagagagagtcgcggcgacatggccaaacgtaccaagaaagtcgggatcgtcggtaaatacgggacccgctatggggcctccctccggaaaatggtgaagaaaattgaaatcagccagcacgccaagtacacttgctctttctgtggcaaaaccaagatgaagagacgagctgtggggatctggcactgtggttcctgcatgaagacagtggctggcggtgcctggacgtacaaagtgagtctagttccttgtggtatttggaagtgtgtggaccacataggcccaaattccaggttgctgctggatgggctagttttaacactttctcaggactgagagaataaggatgcctttgtattttcaggattcttccgtggtggtttattttcagttattgaaagagtaaacacaaaactaccaaaatagaagtcggaaatctaattcacagactactttagaatttgatggtcactgggcacattgttgtgaacattgtcatgatactgtgcaggtccattagtggggctgaatctactgaacgttgatttgcactgcaagttttgataaaaataggtgaaggggtcagttagttcaaaactgtatttggaacttgaggccatcaggaccaccacagtttcgtctttctgaacagtattagactgctgcaggtttgtgaatctgcaactcagtatcacctgacagggcgatactacaaacactatactacaaactagcatctagacctgtgttgtccaatacactaagcacatatatggctagtgtaattaaagaattggattttaaagtttcagtcaatttaaacttaaaccgaagcagtggaaaatgttgaaatatatatatattccttgtgggggtttttattagggcagaatggaaaatgggaactagagtgctttcttggttctgataggaaagtgaattatttatatacttacaatacaggatggtgattttcaggtatagttcctgaattttatggtaaaacttttgtagtcatttcaatagctgtctttcccaaaggcactttagtgtccgctcttatttccttaatcattgttctcactgtatcatcttgtaatttattcatttcttgtaatctgtccattcccttttaataagtttaggtcagcctcttagaaccatttctttttcatgggatggggtagggggagttaaagcttgcttgtccacaactgagttacttataaaaaaaaaagcaactctggttgagaaatcagatgcatgagattgtatgtctaattctgcaagatcctgaaggcatggctcttaaaggatgccatcatgtagtttagaagccactaatttccgaggagtaatctaatgttggttagatctttggattgactgcagcaaagtattggtagagcagtctatctcagtataattctttctaggaaaatttgggaagcgactttaacacaaaaacgaggcagatttacttatttgccattttctatgttaacatgcttaattatgttggaaactgaatctttctttccagtaccacttccgctgtcacggtaaagtccgccatcagaagactgaaggagttgaaagaccagtagacgctcctctactctttgagacatcactggcctataataaatgggttaatttatgtaacaaaa

SEQ ID NO: 301366 - DNA, 2289 bp, Homo sapiens
ccccttcgagttcccgtccgaaattcgcggccgactactactactaaattcgcggccgcgtcgaccggacctaggtcgcggcgacatggccaaacgtaccaagaaagtcgggatcgtcggtaaatacgggacccgctatggggcctccctccggaaaatggtgaagaaaattgaaatcagccagcacgccaagtacacttgctctttctgtggcaaaaagtaagtaaggcaaagtctctggtgagaggagagggagggcaggtttcttacccaagtgaggcctgacttcaaggtattttataagccgtgtgctggtgggcagttggaattactcataccgttgattatgagttttaagataaaagtgttgatggtaacttcagattttgtgagacgtttttcatttaaagaaaaccgcttaaacgttaatgggtaaaataatcatttgacagagtgcccccagcctaagccaaacctgctttgtgggaaatgattccatcagttttgtctactgatgtttctgcaccaactcccaaaatgtctgtgcatctaataccattctacttgttctgcgagggatttttgtttgataaaggtttgaacgtttatgtgcaaaatactgcattacagcaatccttgttttgtttttgagggagaaagggaggctttcacatccctgacaataaggtgaatccaaatttagacttctggatgcttgtaagagaaaatacttacttggttcatagtgaaaattggttctcttttatagaccaagatgaagagacgagctgtggggatctggcactgtggttcctgcatgaagacagtggctggcggtgcctggacgtacaaagtgagtctagttccttgtggtatttggaagtgtgtggaccacataggcccaaattccaggttgctgctggatgggctagttttaacactttctcaggactgagagaataaggatgcctttgtattttcaggattcttccgtggtggtttattttcagttattgaaagagtaaacacaaaactaccaaaatagaagtcggaaatctaattcacagactactttagaatttgatggtcactgggcacattgttgtgaacattgtcatgatactgtgcaggtccattagtggggctgaatctactgaacgttgatttgcactgcaagttttgataaaaataggtgaaggggtcagttagttcaaaactgtatttggaacttgaggccatcaggaccaccacagtttcgtctttctgaacagtattagactgctgcaggtttgtgaatctgcaactcagtatcacctgacagggcgatactacaaacactatactacaaactagcatctagacctgtgttgtccaatacactaagcacatatatggctagtgtaattaaagaattggattttaaagtttcagtcaatttaaacttaaaccgaagcagtggaaaatgttgaaatatatatatattccttgtgggggtttttattagggcagaatggaaaatgggaactagagtgctttcttggttctgataggaaagtgaattatttatatacttacaatacaggatggtgattttcaggtatagttcctgaattttatggtaaaacttttgtagtcatttcaatagctgtctttcccaaaggcactttagtgtccgctcttatttccttaatcattgttctcactgtatcatcttgtaatttattcatttcttgtaatctgtccattcccttttaataagtttaggtcagcctcttagaaccatttctttttcatgggatggggtagggggagttaaagcttgcttgtccacaactgagttacttataaaaaaaaaagcaactctggttgagaaatcagatgcatgagattgtatgtctaattctgcaagatcctgaaggcatggctcttaaaggatgccatcatgtagtttagaagccactaatttccgaggagtaatctaatgttggttagatctttggattgactgcagcaaagtattggtagagcagtctatctcagtataattctttctaggaaaatttgggaagcgactttaacacaaaaacgaggcagatttacttatttgccattttctatgttaacatgcttaattatgttggaaactgaatctttctttccagtaccacttccgctgtcacggtaaagtccgccatcagaagactgaaggagttgaaagaccagtagacgctcctctactctttgagacatcactggcctataataaatgggttaatttatgtaacaaaa

SEQ ID NO: 301367 - DNA, 2522 bp, Homo sapiens
  misc_feature (2522)..(2522): n is a, c, g, or t
ccccttcgagttcccgtccgaaattcgcggccgactactactactaaattcgcggccgcgtcgaccggacctaggtcgcggcgacatggccaaacgtaccaagaaagtcgggatcgtcggtaaatacgggacccgctatggggcctccctccggaaaatggtgaagaaaattgaaatcagccagcacgccaagtacacttgctctttctgtggcaaaaccaagatgaagagacgagctgtggggatctggcactgtggttcctgcatgaagacagtggctggcggtgcctggacgtacaaagtgagtctagttccttgtggtatttggaagtgtgtggaccacataggcccaaattccaggttgctgctggatgggctagttttaacactttctcaggactgagagaataaggatgcctttgtattttcaggattcttccgtggtggtttattttcagttattgaaagagtaaacacaaaactaccaaaatagaagtcggaaatctaattcacagactactttagaatttgatggtcactgggcacattgttgtgaacattgtcatgatactgtgcaggtccattagtggggctgaatctactgaacgttgatttgcactgcaagttttgataaaaataggtgaaggggtcagttagttcaaaactgtatttggaacttgaggccatcaggaccaccacagtttcgtctttctgaacagtattagactgctgcaggtttgtgaatctgcaactcagtatcacctgacagggcgatactacaaacactatactacaaactagcatctagacctgtgttgtccaatacactaagcacatatatggctagtgtaattaaagaattggattttaaagtttcagtcaatttaaacttaaaccgaagcagtggaaaatgttgaaatatatatatattccttgtgggggtttttattagggcagaatggaaaatgggaactagagtgctttcttggttctgataggaaagtgaattatttatatacttacaatacaggatggtgattttcaggtatagttcctgaattttatggtaaaacttttgtagtcatttcaatagctgtctttcccaaaggcactttagtgtccgctcttatttccttaatcattgttctcactgtatcatcttgtaatttattcatttcttgtaatctgtccattcccttttaataagtttaggtcagcctcttagaaccatttctttttcatgggatggggtagggggagttaaagcttgcttgtccacaactgagttacttataaaaaaaaaagcaactctggttgagaaatcagatgcatgagattgtatgtctaattctgcaagatcctgaaggcatggctcttaaaggatgccatcatgtagtttagaagccactaatttccgaggagtaatctaatgttggttagatctttggattgactgcagcaaagtattggtagagcagtctatctcagtataattctttctaggaaaatttgggaagcgactttaacacaaaaacgaggcagatttacttatttgccattttctatgttaacatgcttaattatgttggaaactgaatctttctttccagtaccacttccgctgtcacggtaaagtccgccatcagaagactgaaggagttgaaagaccagtagacgctcctctactctttgagacatcactggcctataataaatgggttaatttatgtaacaaaaaaaaaaaaaaaaaaaaaaaaaaaaaaaaaaaaaaaaaaaaaaaaaaaaaaaaaaaaaaaaaaaaaaaaaaaaaaaaaaaaaaaaaaaaaaaaaaaaaaaaaaaacaaaaaaaaaaaaaaaaaaaaaaaaaaaaaaaaaaaaaaaaaaaaaaaaaaaaaaaaaagccgggggggggggccaataaaacccccggggggggccccctcgccccccctttttttgcaaacagggtggcccctaatagggtagggctattaaatagacgcgagggacgggggaggcatttaaaaaccaatggtgaggacaggtgaaaaaacgatgatagatgtcggagcatctggagggaaggcacagccaattagtggtgttgcgggtccactatacgggggcaccaccatgtccgaagaagatttatagagcgccgataggacaaatcaaaaagtaagcgtgtatattggtgataaccaagatcgtatatgctgtggttagaagacctgtgggcaccgcgggttagtgctttagaacacatctaacgggctcggacgtagacaccgagcggcagagtcactaagacaaacagcaagcaaagagcacggcacggagcacgcgagtctcagcgacaaacacggagacgaaccacacaacaagccatcagacacggaagcgctaaccacaagaacgcagcagaaccagacaacatgactagcaggagagcagaggatcaacgacgtacgaaccagcaagctagacacatggcaaggacatagatcgatgccgccgccacn

SEQ ID NO: 301368 - DNA, 679 bp, Homo sapiens
ccccttcgagttcccgtccgaaattcgcggccgactactactactaaattcgcggccgcgtcgaccggacctaggtcgcggcgacatggccaaacgtaccaagaaagtcgggatcgtcggtaaatacgggacccgctatggggcctccctccggaaaatggtgaagaaaattgaaatcagccagcacgccaagtacacttgctctttctgtggcaaaaccaagatgaagagacgagctgtggggatctggcactgtggttcctgcatgaagacagtggctggcggtgcctggacgtacaaagatgccaaaatggaaccaaatctccatgaactctgctaatggaagacgaggaaaaggcaggtaacctaagcaaacccaaatggaccaaatgcaacgctgatggaatctaagtgctcagaccaaggaacggggactgaaataacagtggacaccacatggcatgatccaatcagattgagccctggaaagatcatcccatggcaagatccagttagattacacttcctggcatcacctcattgcaagatccaagatcatgcctcattaccttctgcctgtaaaacctgccccagcccccagctccaggagacagatttgagccaggctcctgtctttctctgcagccttgcaataaacttttctttctacaaaaaccca

SEQ ID NO: 301369 - DNA, 618 bp, Homo sapiens
ccccttcgagttcccgtccgaaattcgcggccgactactactactaaattcgcggccgcgtcgaccggacctaggtcgcggcgacatggccaaacgtaccaagaaagtcgggatcgtcggtaaatacgggacccgctatggggcctccctccggaaaatggtgaagaaaattgaaatcagccagcacgccaagtacacttgctctttctgtggcaaaaccaagatgaagagacgagctgtggggatctggcactgtggttcctgcatgaagacagtggctggcggtgcctggacgtacaagtaacctaagcaaacccaaatggaccaaatgcaacgctgatggaatctaagtgctcagaccaaggaacggggactgaaataacagtggacaccacatggcatgatccaatcagattgagccctggaaagatcatcccatggcaagatccagttagattacacttcctggcatcacctcattgcaagatccaagatcatgcctcattaccttctgcctgtaaaacctgccccagcccccagctccaggagacagatttgagccaggctcctgtctttctctgcagccttgcaataaacttttctttctacaaaaaccca

SEQ ID NO: 301370 - DNA, 715 bp, Homo sapiens
ccccttcgagttcccgtccgaaattcgcggccgactactactactaaattcgcggccgcgtcgaccggacctaggtcgcggcgacatggccaaacgtaccaagaaagtcgggatcgtcggtaaatacgggacccgctatggggcctccctccggaaaatggtgaagaaaattgaaatcagccagcacgccaagtacacttgctctttctgtggcaaaaccaagatgaagagacgagctgtggggatctggcactgtggttcctgcatgaagacagtggctggcggtgcctggacgtacaaagtgagtctagttccttgtggtatttggaagtgtgtggaccacataggcccaaattccaggttgctgctggatgggctagttttaacactttctcaggactgagagaataaggatgcctttgtattttcaggattcttccgtggtggtttattttcagttattgaaagagtaaacacaaaactaccaaaatagaagtcggaaatctaattcacagactactttagaatttgatggtcactgggcacattgttgtgaacattgtcatgatactgtgcaggtccattagtggggctgaatctactgaacgttgatttgcactgcaagttttgataaaaataggtgaaggggtcagttagttcagattagaatggtgtcaggttgggaaatttgcacttaatttcacctggcaaggcg

SEQ ID NO: 301371 - DNA, 1064 bp, Homo sapiens
ccccttcgagttcccgtccgaaattcgcggccgactactactactaaattcgcggccgcgtcgaccggacctaggtcgcggcgacatggccaaacgtaccaagaaagtcgggatcgtcggtaaatacgggacccgctatggggcctccctccggaaaatggtgaagaaaattgaaatcagccagcacgccaagtacacttgctctttctgtggcaaaaccaagatgaagagacgagctgtggggatctggcactgtggttcctgcatgaagacagtggctggcggtgcctggacgtacaagtaacctaagcaaacccaaatggaccaaatgcaacgctgatggaatctaagtgctcagaccaaggaacggggactgaaataacagtggacaccacatggcatgatccaatcagattgagccctggaaagatcatcccatggcaagatccagttagattacacttcctggcatcacctcattgcaagatccaagatcatgcctcattaccttctgcctgtaaaacctgccccagcccccagctccaggagacagatttgagccaggctcctgtctttctctgcagctgtggggatctggcactgtggttcctgcatgaaagacagtggctggcggggctggacgtacaagtaacctaagcaaacccaaatggaccaaatgcaacgctgatggaatctaagtgctcagacccaaggaacggggactgacactacagtggacaccacatggttgatcccaatccagattggagccctgggaaggatcatcccatgcgcagatccagttaagattacaacttcctgggcatacaccttcttgcagatccaagatcatgcctcattaccttttgcctgtaaaactggcccaccccagtccaggagacaattggagcaggccggttcccggcgccggagaaactttttctcagaaaacaaaacaaatcgcggacaacatgcacaaacaaaactcaaacacaaaaacagggggttcgcgagaacactaaccgagtaacaggcaacagcagtgaacgacacacgattgtggg

SEQ ID NO: 301372 - DNA, 353 bp, Homo sapiens
ccccttcgagttcccgtccgaaattcgcggccgactactactactaaattcgcggccgcgtcgaccggacctaggtcgcggcgacatggccaaacgtaccaagaaagtcgggatcgtcggtaaatacgggacccgctatggggcctccctccggaaaatggtgaagaaaattgaaatcagccagcacgccaagtacacttgctctttctgtggcaaaaccaagatgaagagacgagctgtggggatctggcactgtggttcctgcatgaagacagtggctggcggtgcctggacgtacaataccatttcccttttaacgttaagtgccccaataagagagcttaaggagttta

SEQ ID NO: 301373 - DNA, 221 bp, Homo sapiens
gcggccgcctactactactactactgctcgaattcaagcttctaacgatgtacggggacatgaagacagtggctggcggtgcctggacgtacaataccacttccgctgtcacggtaaagtccgccatcagaagactgaaggagttgaaagaccagtagacgctcctctactctttgagacatcactggcctataataaatgggttaatttatgtaacaaaa

SEQ ID NO: 301374 - DNA, 1301 bp, Homo sapiens
gcggccgcctactactactactactgctcgaattcaagcttctaacgatgtacggggacatgccaagatggattattgtaattcagtgtcttttttagtagtcaaatggtaaaatgcagcataagaatataagtcttccaagttagatatgagtgttagctttttataagtctgctcctgccagtttgactttgagatacattggagccaactgtaaactttagtttttaaattacagttagtttttttgtttgtttttgaggcggagtctctgttacccaggctggagtgcagtataccagtcttggcccacttcaacctccacttcttaggttcaagcgattctcctgcctcagcctcctgagtagctgggattgcaggcacgcaccaccatacctggctaatttttgtattttgagtagagatggagttttcaccacattggccaggctgttcttgaactgacctcaagcgatccacctgccttggccttccagagtgctgggattgcaggtgtgggccaccacgcccagccttgcatttaatatttttataatgtgtctaggctgggtgcggtgactcacgcctgaaatcccagcactttgggtggctgaggcaggtggattacttgaggccaggagattgagaccagtgtggccaacatagcaaaaacccgtctcgacgaaaaatacagaaaatagcttggtatggtggcacgtgcctgtagtcccagctactttggaggctcaggcacaagaatcacttgaacctacgaggcggaggttgcagtgagccaggatcgtgccactgcactttatttagccaggacaacactctgtctccaaaaaaaagtttctgaaggtaaaagatatactaaaggatatacatatactgcctcttctatgatgtttcatttgacctacaccatcagcatcttcaggaaacagtatgaaactaatttcacattaaatgttgcaaacgtctgcaattctccagtttttagtttgcacgtaaggattcgtaggattgatttcagattgacagatggttgtagtaacaaaaaaatgaattgccttggagaattcgagttattttaggcctgcctttgacacttttatgcacttaattcactgccaatttagtctaactcctcaaccatctgtggtatggacttctcagtcctcctaattggtatgtcttttatctatcccagagtcagtagtcctttaaggatgcaaatttaattcgataagaatgtggatttacttcatctttaggacagagtaaaaacctttatttca

SEQ ID NO: 301375 - DNA, 910 bp, Homo sapiens
ccccttcgagttcccgtccgaaattcgcggccgactactactactaaattcgcggccgcgtcgaccggacctaggtcgcggcgacatggccaaacgtaccaagaaagtcgggatcgtcggtaaatacgggacccgctatggggcctccctccggaaaatggtgaagaaaattgaaatcagccagcacgccaagtacacttgctctttctgtggcaaaggctgaggcaggtggattacttgaggccaggagattgagaccagtgtggccaacatagcaaaaacccgtctcgacgaaaaatacagaaaatagcttggtatggtggcacgtgcctgtagtcccagctactttggaggctcaggcacaagaatcacttgaacctacgaggcggaggttgcagtgagccaggatcgtgccactgcactttatttagccaggacaacactctgtctccaaaaaaaagtttctgaaggtaaaagatatactaaaggatatacatatactgcctcttctatgatgtttcatttgacctacaccatcagcatcttcaggaaacagtatgaaactaatttcacattaaatgttgcaaacgtctgcaattctccagtttttagtttgcacgtaaggattcgtaggattgatttcagattgacagatggttgtagtaacaaaaaaatgaattgccttggagaattcgagttattttaggcctgcctttgacacttttatgcacttaattcactgccaatttagtctaactcctcaaccatctgtggtatggacttctcagtcctcctaattggtatgtcttttatctatcccagagtcagtagtcctttaaggatgcaaatttaattcgataagaatgtggatttacttcatctttaggacagagtaaaaacctttatttca

SEQ ID NO: 301376 - DNA, 1006 bp, Homo sapiens
  misc_feature (1006)..(1006): n is a, c, g, or t
gcggccgcctactactactactactgctcgaattcaagcttctaacgatgtacggggacatgaagacagtggctggcggtgcctggacgtacaataccacttccgctgtcacggtaaagtccgccatcagaagactgaaggagttgaaagaccagtagacgctcctctactctttgagacatcactggcctataataaatgggttaatttatgtaacaaaaaaaaaaaaaaaaaaaaaaaaaaaaaaaaaaaaaaaaaaaaaaaaaaaaaaaaaaaaaaaaaaaaaaaaaaaaaaaaaaaaaaaaaaaaaaaaaaaaaaaaaaaacaaaaaaaaaaaaaaaaaaaaaaaaaaaaaaaaaaaaaaaaaaaaaaaaaaaaaaaaaagccgggggggggggccaataaaacccccggggggggccccctcgccccccctttttttgcaaacagggtggcccctaatagggtagggctattaaatagacgcgagggacgggggaggcatttaaaaaccaatggtgaggacaggtgaaaaaacgatgatagatgtcggagcatctggagggaaggcacagccaattagtggtgttgcgggtccactatacgggggcaccaccatgtccgaagaagatttatagagcgccgataggacaaatcaaaaagtaagcgtgtatattggtgataaccaagatcgtatatgctgtggttagaagacctgtgggcaccgcgggttagtgctttagaacacatctaacgggctcggacgtagacaccgagcggcagagtcactaagacaaacagcaagcaaagagcacggcacggagcacgcgagtctcagcgacaaacacggagacgaaccacacaacaagccatcagacacggaagcgctaaccacaagaacgcagcagaaccagacaacatgactagcaggagagcagaggatcaacgacgtacgaaccagcaagctagacacatggcaaggacatagatcgatgccgccgccacn

SEQ ID NO: 301377 - DNA, 485 bp, Homo sapiens
aaaacaacccccagcttagaccaaaacaaccctaagacaattgttacgagcatcgagagaacagatgtgaagcagagggagcccttgatgagttttgaccatcaagagatgccaaaatggaaccaaatctccatgaactctgctaatggaagacgaggaaaaggcaggtaacctaagcaaacccaaatggaccaaatgcaacgctgatggaatctaagtgctcagaccaaggaacggggactgaaataacagtggacaccacatggcatgatccaatcagattgagccctggaaagatcatcccatggcaagatccagttagattacacttcctggcatcacctcattgcaagatccaagatcatgcctcattaccttctgcctgtaaaacctgccccagcccccagctccaggagacagatttgagccaggctcctgtctttctctgcagccttgcaataaacttttctttctacaaaaaccca

SEQ ID NO: 301378 - DNA, 608 bp, Homo sapiens
atcaccctgcaggagctgacacatacagaggagaggtcaaaagaggtccctggagaacacagtgatgcttctgagccacagtaaggatctagtccagccctaaatgagtccttgactgtattcagagtctggtaatgggaataacaggagaggggggtgggtttctaactgcatgaattaatccacaaagcagttttcctttgggaaggagaagaggtcttgcataccagcacagtggatggggaatggtgtgacctctgtccctgctctcttctctgctggcttaagggtctattctccatgtgtctatttctttgatgactttatactttttatgaaaggagcatcttttcattaaaccttcaaaaataaaggaagatacaaaaactaaagtacaaattacctgaaactcagcacccttttgtaaccattgtcagccctttggtgaatgtccttccagatatctccctgtacctgtgtacccagatagatatatgtatagataagagtgaccaaatataagtgctgttctatactgtgtatttttcaccaaataatgtatctcgtggacttctatgtcgatgaatatatataaatatctaacttca

SEQ ID NO: 301379 - DNA, 3508 bp, Homo sapiens
ggccctgacgtcaggggcaggggagggacggcgcaggcgcagaaaagggggcggcggactcggcttgttgtgttgctgcctgagtgccggagacggtcctgctgctgccgcagtcctgccagctgtccgacgatgtcgtcccacctagtcgagccgccgccgcccctgcacaacaacaacaacaactgcgaggaaaatgagcagtctctgcccccgccggccggcctcaacagttcctgggtggagctacccatgaacagcagcaatggcaatgataatggcaatgggaaaaatggggggctggaacacgtaccatcctcatcctccatccacaatggagacatggagaagattcttttggatgcacaacatgaatcaggacagagtagttccagaggcagttctcactgtgacagcccttcgccacaagaagatgggcagatcatgtttgatgtggaaatgcacaccagcagggaccatagctctcagtcagaagaagaagttgtagaaggagagaaggaagtcgaggctttgaagaaaagtgcggactgggtatcagactggtccagtagacccgaaaacattccacccaaggagttccacttcagacaccctaaacgttctgtgtctttaagcatgaggaaaagtggagccatgaagaaagggggtattttctccgcagaatttctgaaggtgttcattccatctctcttcctttctcatgttttggctttggggctaggcatctatattggaaagcgactgagcacaccctctgccagcacctactgagggaaaggaaaagcccctggaaatgcgtgtgacctgtgaagtggtgtattgtcacagtagcttatttgaacttgagaccattgtaagcatgacccaacctaccaccctgtttttacatatccaattccagtaactctcaaattcaatattttattcaaactctgttgaggcattttactaaccttataccctttttggcctgaagacattttagaatttcctaacagagtttactgttgtttagaaatttgcaagggcttcttttccgcaaatgccaccagcagattataattttgtcagcaatgctattatctctaattagtgccaccagactagacctgtatcattcatggtataaattttactcttgcaacataactaccatctctctcttaaaacgagatcaggttagcaaatgatgtaaaagaagctttattgtctagttgttttttttcccccaagacaaaggcaagtttccctaagtttgagttgatagttattaaaaagaaaacaaaacaaaaaaaaaaggcaaggcacaacaaaaaaatatcctgggcaataaaaaaaatattttaaaccagctttggagccacttttttgtctaagcctcctaatagcgtcttttaatttataggaggcaaactgtataaatgataggtatgaaatagaataagaagtaaaatacatcagcagattttcatactagtatgttgtaatgctgtcttttctatggtgtagaatctttctttctgataaggaacgtctcaggcttagaaatatatgaaattgctttttgagatttttgcgtgtgtgtttgatattttttacgataattagctgcatgtgaatttttcatgaccttctttacattttttattttttatttctttatttttttttctctaagaagaggctttggaatgagttccaatttgtgatgttaatacaggcttcttgttttaggaagcatcacctatactctgaagcctttaaactctgaagagaattgtttcagagttattccaagcacttgtgcaacttggaaaaacagacttgggttgtgggaacagttgacagcgttctgaaaagatgccatttgtttccttctgatctctcactgaataatgtttactgtacagtcttcccaaggtgattcctgcgactgcaggcactggtcattttctcatgtagctgtcttttcagttatggtaaactcttaaagttcagaacactcaacagattccttcagtgatatacttgttcgttcatttctaaaatgtgaagctttaggaccaaattgttagaaagcatcaggatgaccagttatctcgagtagattttcttggatttcagaacatctagcatgactctgaaggataccacatgttttatatataaataattactgtttatgatatagacattgatattgactatttagagaaccgttgttaattttaaaactagcaatctataaagtgcatcaggtcaacttgaataaaaacactatgacagacaggtttgccagtttgcagaaactaactcttttctcacatcaacatttgtaaaattgatgtgttatagtggaaaataacatatagattaaacaaaatttttatcttttttcaagaatatagctggctatctttaagaaagatgatatatcctagttttgaaagtaattttcttttttctttctagcatttgatgtctaaataattttggacatctttttcctagaccatgtttctgtcttactcttaaacctggtaacacttgatttgccttctataacctatttatttcaagtgttcatatttgaatttctttgggaagaaagtaaatctgatggctcactgatttttgaaaagcctgaataaaattggaaagactggaaagttaggagaactgactagctaaactgctacagtatgcaatttctattacaattggtattacaggggggaaaagtaaaattacactttacctgaaagtgacttcttacagctagtgcattgtgctctttccaagttcagcagcagttctatcagtggtgccactgaaactgggtatatttatgatttctttcagcgttaaaaagaaacatagtgttgccctttttcttaaagcatcagtgaaattatggaaaattacttaaaacgtgaatacatcatcacagtagaatttattatgagagcatgtagtatgtatctgtagccctaacacatgggatgaacgttttactgctacacccagatttgtgttgaacgaaaacattgtggtttggaaaggagaattcaacaattaatagttgaaattgtgaggttaatgtttaaaaagctttacacctgtttacaatttggggacaaaaaggcaggcttcatttttcatatgtttgatgaaaactggctcaagatgtttgtaaatagaatcaagagcaaaactgcacaaacttgcacattggaaagtgcaacaagttcccgtgattgcagtaaaaatatttactattctaaaaaaatgagaattgaagacttagccagtcagataagttttttcatgaacccgttgtggaaattattggaattaactgagccaaagtgattatgcattcttcatctattttagttagcactttgtatcgttatatacagtttacaatacatgtataacttgtagctataaacattttgtgccattaaagctctcacaaaacttt

SEQ ID NO: 301380 - DNA, 346 bp, Homo sapiens
ccctagttttagaagtttcaaagtttcaatagcagtttaaatgtttttcctagttttagaagtttcaatagcacctactgagggaaaggaaaagcccctggaaatgcgtgtgacctgtgaagtggtgtattgtcacagtagcttatttgaacttgagaccattgtaagcatgacccaacctaccaccctgtttttacatatccaattccagtaactctcaaattcaatattttattcaaactctgttgaggcattttactaaccttataccctttttggccggtaaagttaagctacttctccatgtttacatcctactgatcttcaaaaagttgcagaaatgatt

SEQ ID NO: 301381 - DNA, 3590 bp, Homo sapiens
ggccctgacgtcaggggcaggggagggacggcgcaggcgcagaaaagggggcggcggactcggcttgttgtgttgctgcctgagtgccggagacggtcctgctgctgccgcagtcctgccagctgtccgacgatgtcgtcccacctagtcgagccgccgccgcccctgcacaacaacaacaacaactgcgaggaaaatgagcagtctctgcccccgccggccggcctcaacagttcctgggtggagctacccatgaacagcagcaatggcaatgataatggcaatgggaaaaatggggggctggaacacgtaccatcctcatcctccatccacaatggagacatggagaagattcttttggatgcacaacatgaatcaggacagagtagttccagaggcagttctcactgtgacagcccttcgccacaagaagatgggcagatcatgtttgatgtggaaatgcacaccagcagggaccatagctctcagtcagaagaagaagttgtagaaggagagaaggaagtcgaggctttgaagaaaagtgcggactgggtatcagactggtccagtagacccgaaaacattccacccaaggagttccacttcagacaccctaaacgttctgtgtctttaagcatgaggaaaagtggagccatgaagaaagggggtattttctccgcagaatttctgaaggtgttcattccatctctcttcctttctcatgttttggctttggggctaggcatctatattggaaagcgactgagcacaccctctgccagcacctactgagggaaaggaaaagcccctggaaatgcgtgtgacctgtgaagtggtgtattgtcacagtagcttatttgaacttgagaccattgtaagcatgacccaacctaccaccctgtttttacatatccaattccagtaactctcaaattcaatattttattcaaactctgttgaggcattttactaaccttataccctttttggcctgaagacattttagaatttcctaacagagtttactgttgtttagaaatttgcaagggcttcttttccgcaaatgccaccagcagattataattttgtcagcaatgctattatctctaattagtgccaccagactagacctgtatcattcatggtataaattttactcttgcaacataactaccatctctctcttaaaacgagatcaggttagcaaatgatgtaaaagaagctttattgtctagttgttttttttcccccaagacaaaggcaagtttccctaagtttgagttgatagttattaaaaagaaaacaaaacaaaaaaaaaaggcaaggcacaacaaaaaaatatcctgggcaataaaaaaaatattttaaaccagctttggagccacttttttgtctaagcctcctaatagcgtcttttaatttataggaggcaaactgtataaatgataggtatgaaatagaataagaagtaaaatacatcagcagattttcatactagtatgttgtaatgctgtcttttctatggtgtagaatctttctttctgataaggaacgtctcaggcttagaaatatatgaaattgctttttgagatttttgcgtgtgtgtttgatattttttacgataattagctgcatgtgaatttttcatgaccttctttacattttttattttttatttctttatttttttttctctaagaagaggctttggaatgagttccaatttgtgatgttaatacaggcttcttgttttaggaagcatcacctatactctgaagcctttaaactctgaagagaattgtttcagagttattccaagcacttgtgcaacttggaaaaacagacttgggttgtgggaacagttgacagcgttctgaaaagatgccatttgtttccttctgatctctcactgaataatgtttactgtacagtcttcccaaggtgattcctgcgactgcaggcactggtcattttctcatgtagctgtcttttcagttatggtaaactcttaaagttcagaacactcaacagattccttcagtgatatacttgttcgttcatttctaaaatgtgaagctttaggaccaaattgttagaaagcatcaggatgaccagttatctcgagtagattttcttggatttcagaacatctagcatgactctgaaggataccacatgttttatatataaataattactgtttatgatatagacattgatattgactatttagagaaccgttgttaattttaaaactagcaatctataaagtgcatcaggtcaacttgaataaaaacactatgacagacaggtttgccagtttgcagaaactaactcttttctcacatcaacatttgtaaaattgatgtgttatagtggaaaataacatatagattaaacaaaatttttatcttttttcaagaatatagctggctatctttaagaaagatgatatatcctagttttgaaagtaattttcttttttctttctagcatttgatgtctaaataattttggacatctttttcctagaccatgtttctgtcttactcttaaacctggtaacacttgatttgccttctataacctatttatttcaagtgttcatatttgaatttctttgggaagaaagtaaatctgatggctcactgatttttgaaaagcctgaataaaattggaaagactggaaagttaggagaactgactagctaaactgctacagtatgcaatttctattacaattggtattacaggggggaaaagtaaaattacactttacctgaaagtgacttcttacagctagtgcattgtgctctttccaagttcagcagcagttctatcagtggtgccactgaaactgggtatatttatgatttctttcagcgttaaaaagaaacatagtgttgccctttttcttaaagcatcagtgaaattatggaaaattacttaaaacgtgaatacatcatcacagtagaatttattatgagagcatgtagtatgtatctgtagccctaacacatgggatgaacgttttactgctacacccagatttgtgttgaacgaaaacattgtggtttggaaaggagaattcaacaattaatagttgaaattgtgaggttaatgtttaaaaagctttacacctgtttacaatttggggacaaaaaggcaggcttcatttttcatatgtttgatgaaaactggctcaagatgtttgtaaatagaatcaagagcaaaactgcacaaacttgcacattggaaagtgcaacaagttcccgtgattgcagtaaaaatatttactattctaaaaaaatgagaattgaagacttagccagtcagataagttttttcatgaacccgttgtggaaattattggaattaactgagccaaagtgattatgcattcttcatctattttagttagcactttgtatcgttatatacagtttacaatacatgtataacttgtagctataaacattttgtgccattaaagctctcacaaaactttaaaaaaaaaaaaaaaaaaaaaaaaaaaaaaaaaaaaaaaaaaaaaaaaaaaaaaaaaaaaaaaagggggggggcacaaaaaa

SEQ ID NO: 301382 - DNA, 3566 bp, Homo sapiens
ggccctgacgtcaggggcaggggagggacggcgcaggcgcagaaaagggggcggcggactcggcttgttgtgttgctgcctgagtgccggagacggtcctgctgctgccgcagtcctgccagctgtccgacgatgtcgtcccacctagtcgagccgccgccgcccctgcacaacaacaacaacaactgcgaggaaaatgagcagtctctgcccccgccggccggcctcaacagttcctgggtggagctacccatgaacagcagcaatggcaatgataatggcaatgggaaaaatggggggctggaacacgtaccatcctcatcctccatccacaatggagacatggagaagattcttttggatgcacaacatgaatcaggacagagtagttccagaggcagttctcactgtgacagcccttcgccacaagaagatgggcagatcatgtttgatgtggaaatgcacaccagcagggaccatagctctcagtcagaagaagaagttgtagaaggagagaaggaagtcgaggctttgaagaaaagtgcggactgggtatcagactggtccagtagacccgaaaacattccacccaaggagttccacttcagacaccctaaacgttctgtgtctttaagcatgaggaaaagtggagccatgaagaaagggggtattttctccgcagaatttctgaaggtgttcattccatctctcttcctttctcatgttttggctttggggctaggcatctatattggaaagcgactgagcacaccctctgccagcacctactgagggaaaggaaaagcccctggaaatgcgtgtgacctgtgaagtggtgtattgtcacagtagcttatttgaacttgagaccattgtaagcatgacccaacctaccaccctgtttttacatatccaattccagtaactctcaaattcaatattttattcaaactctgttgaggcattttactaaccttataccctttttggcctgaagacattttagaatttcctaacagagtttactgttgtttagaaatttgcaagggcttcttttccgcaaatgccaccagcagattataattttgtcagcaatgctattatctctaattagtgccaccagactagacctgtatcattcatggtataaattttactcttgcaacataactaccatctctctcttaaaacgagatcaggttagcaaatgatgtaaaagaagctttattgtctagttgttttttttcccccaagacaaaggcaagtttccctaagtttgagttgatagttattaaaaagaaaacaaaacaaaaaaaaaaggcaaggcacaacaaaaaaatatcctgggcaataaaaaaaatattttaaaccagctttggagccacttttttgtctaagcctcctaatagcgtcttttaatttataggaggcaaactgtataaatgataggtatgaaatagaataagaagtaaaatacatcagcagattttcatactagtatgttgtaatgctgtcttttctatggtgtagaatctttctttctgataaggaacgtctcaggcttagaaatatatgaaattgctttttgagatttttgcgtgtgtgtttgatattttttacgataattagctgcatgtgaatttttcatgaccttctttacattttttattttttatttctttatttttttttctctaagaagaggctttggaatgagttccaatttgtgatgttaatacaggcttcttgttttaggaagcatcacctatactctgaagcctttaaactctgaagagaattgtttcagagttattccaagcacttgtgcaacttggaaaaacagacttgggttgtgggaacagttgacagcgttctgaaaagatgccatttgtttccttctgatctctcactgaataatgtttactgtacagtcttcccaaggtgattcctgcgactgcaggcactggtcattttctcatgtagctgtcttttcagttatggtaaactcttaaagttcagaacactcaacagattccttcagtgatatacttgttcgttcatttctaaaatgtgaagctttaggaccaaattgttagaaagcatcaggatgaccagttatctcgagtagattttcttggatttcagaacatctagcatgactctgaaggataccacatgttttatatataaataattactgtttatgatatagacattgatattgactatttagagaaccgttgttaattttaaaactagcaatctataaagtgcatcaggtcaacttgaataaaaacactatgacagacaggtttgccagtttgcagaaactaactcttttctcacatcaacatttgtaaaattgatgtgttatagtggaaaataacatatagattaaacaaaatttttatcttttttcaagaatatagctggctatctttaagaaagatgatatatcctagttttgaaagtaattttcttttttctttctagcatttgatgtctaaataattttggacatctttttcctagaccatgtttctgtcttactcttaaacctggtaacacttgatttgccttctataacctatttatttcaagtgttcatatttgaatttctttgggaagaaagtaaatctgatggctcactgatttttgaaaagcctgaataaaattggaaagactggaaagttaggagaactgactagctaaactgctacagtatgcaatttctattacaattggtattacaggggggaaaagtaaaattacactttacctgaaagtgacttcttacagctagtgcattgtgctctttccaagttcagcagcagttctatcagtggtgccactgaaactgggtatatttatgatttctttcagcgttaaaaagaaacatagtgttgccctttttcttaaagcatcagtgaaattatggaaaattacttaaaacgtgaatacatcatcacagtagaatttattatgagagcatgtagtatgtatctgtagccctaacacatgggatgaacgttttactgctacacccagatttgtgttgaacgaaaacattgtggtttggaaaggagaattcaacaattaatagttgaaattgtgaggttaatgtttaaaaagctttacacctgtttacaatttggggacaaaaaggcaggcttcatttttcatatgtttgatgaaaactggctcaagatgtttgtaaatagaatcaagagcaaaactgcacaaacttgcacattggaaagtgcaacaagttcccgtgattgcagtaaaaatatttactattctaaaaaaatgagaattgaagacttagccagtcagataagttttttcatgaacccgttgtggaaattattggaattaactgagccaaagtgattatgcattcttcatctattttagttagcactttgtatcgttatatacagtttacaatacatgtataacttgtagctataaacattttgtgccattaaagctctcacaaaactttaaaaaaaaaaaaaaaaaaaaaaaaaaaaaaaaaaaaaaaagggggggggcacaaaaaa

SEQ ID NO: 301383 - DNA, 1380 bp, Homo sapiens
  misc_feature (1380)..(1380): n is a, c, g, or t
ggccctgacgtcaggggcaggggagggacggcgcaggcgcagaaaagggggcggcggactcggcttgttgtgttgctgcctgagtgccggagacggtcctgctgctgccgcagtcctgccagctgtccgacgatgtcgtcccacctagtcgagccgccgccgcccctgcacaacaacaacaacaactgcgaggaaaatgagcagtctctgcccccgccggccggcctcaacagttcctgggtggagctacccatgaacagcagcaatggcaatgataatggcaatgggaaaaatggggggctggaacacgtaccatcctcatcctccatccacaatggagacatggagaagattcttttggatgcacaacatgaatcaggacagagtagttccagaggcagttctcactgtgacagcccttcgccacaagaagatgggcagatcatgtttgatgtggaaatgcacaccagcagggaccatagctctcagtcagaagaagaagttgtagaaggagagaaggaagtcgaggctttgaagaaaagtgcggactgggtatcagactggtccagtagacccgaaaacattccacccaaggagttccacttcagacaccctaaacgttctgtgtctttaagcatgaggaaaagtggagccatgaagaaagggggtattttctccgcagaatttctgaaggtgttcattccatctctcttcctttctcatgttttggctttggggctaggcatctatattggaaagcgactgagcacaccctctgccagcacctactgagggaaaggaaaagcccctggaaatgcgtgtgacctgtgaagtggtgtattgtcacagtagcttatttgaacttgagaccattgtaagcatgacccaacctaccaccctgtttttacatatccaattccagtaactctcaaattcaatattttattcaaactctgttgaggcattttactaaccttataccctttttggcctgaagacattttagaatttcctaacagagtttactgttgtttagaaatttgcaagggcttcttttccgcaaatgccaccagcagattataattttgtcagcaatgctattatctctaattagtgccaccagactagacctgtatcattcatggtataaattttactcttgcaacataactaccatctctctcttaaaacgagatcaggttagcaaatgatgtaaaagaagctttattgtctagttgttttttttcccccaagacaaaggcaagtttccctaagtttgagttgatagttattaaaaagaaaacaaaacaaaaaaaaaaggcaaggcacaacaaaaaaatatcctgggcaataaaggtgatccccggtcggcaaaagcan

SEQ ID NO: 301384 - DNA, 3454 bp, Homo sapiens
ggccctgacgtcaggggcaggggagggacggcgcaggcgcagaaaagggggcggcggactcggcttgttgtgttgctgcctgagtgccggagacggtcctgctgctgccgcagtcctgccagctgtccgacgatgtcgtcccacctagtcgagccgccgccgcccctgcacaacaacaacaacaactgcgaggaaaatgagcagtctctgcccccgccggccggcctcaacagttcctgggtggagctacccatgaacagcagcaatggcaatgataatggcaatgggaaaaatggggggctggaacacgtaccatcctcatcctccatccacaatggagacatggagaagattcttttggatgcacaacatgaatcaggacagagtagttccagaggcagttctcactgtgacagcccttcgccacaagaagatgggcagatcatgtttgatgtggaaatgcacaccagcagggaccatagctctcagtcagaagaagaagttgtagaaggagagaaggaagtcgaggctttgaagaaaagtgcggactgggtatcagactggtccagtagacccgaaaacattccacccaaggagttccacttcagacaccctaaacgttctgtgtctttaagcatgaggaaaagtggagccatgaagaaagggggtattttctccgcagaatttctgaaggtgttcattccatctctcttcctttctcatgttttggctttggggctaggcatctatattggaaagcgactgagcacaccctctgccagcacctactgagggaaaggtatttgaacttgagaccattgtaagcatgacccaacctaccaccctgtttttacatatccaattccagtaactctcaaattcaatattttattcaaactctgttgaggcattttactaaccttataccctttttggcctgaagacattttagaatttcctaacagagtttactgttgtttagaaatttgcaagggcttcttttccgcaaatgccaccagcagattataattttgtcagcaatgctattatctctaattagtgccaccagactagacctgtatcattcatggtataaattttactcttgcaacataactaccatctctctcttaaaacgagatcaggttagcaaatgatgtaaaagaagctttattgtctagttgttttttttcccccaagacaaaggcaagtttccctaagtttgagttgatagttattaaaaagaaaacaaaacaaaaaaaaaaggcaaggcacaacaaaaaaatatcctgggcaataaaaaaaatattttaaaccagctttggagccacttttttgtctaagcctcctaatagcgtcttttaatttataggaggcaaactgtataaatgataggtatgaaatagaataagaagtaaaatacatcagcagattttcatactagtatgttgtaatgctgtcttttctatggtgtagaatctttctttctgataaggaacgtctcaggcttagaaatatatgaaattgctttttgagatttttgcgtgtgtgtttgatattttttacgataattagctgcatgtgaatttttcatgaccttctttacattttttattttttatttctttatttttttttctctaagaagaggctttggaatgagttccaatttgtgatgttaatacaggcttcttgttttaggaagcatcacctatactctgaagcctttaaactctgaagagaattgtttcagagttattccaagcacttgtgcaacttggaaaaacagacttgggttgtgggaacagttgacagcgttctgaaaagatgccatttgtttccttctgatctctcactgaataatgtttactgtacagtcttcccaaggtgattcctgcgactgcaggcactggtcattttctcatgtagctgtcttttcagttatggtaaactcttaaagttcagaacactcaacagattccttcagtgatatacttgttcgttcatttctaaaatgtgaagctttaggaccaaattgttagaaagcatcaggatgaccagttatctcgagtagattttcttggatttcagaacatctagcatgactctgaaggataccacatgttttatatataaataattactgtttatgatatagacattgatattgactatttagagaaccgttgttaattttaaaactagcaatctataaagtgcatcaggtcaacttgaataaaaacactatgacagacaggtttgccagtttgcagaaactaactcttttctcacatcaacatttgtaaaattgatgtgttatagtggaaaataacatatagattaaacaaaatttttatcttttttcaagaatatagctggctatctttaagaaagatgatatatcctagttttgaaagtaattttcttttttctttctagcatttgatgtctaaataattttggacatctttttcctagaccatgtttctgtcttactcttaaacctggtaacacttgatttgccttctataacctatttatttcaagtgttcatatttgaatttctttgggaagaaagtaaatctgatggctcactgatttttgaaaagcctgaataaaattggaaagactggaaagttaggagaactgactagctaaactgctacagtatgcaatttctattacaattggtattacaggggggaaaagtaaaattacactttacctgaaagtgacttcttacagctagtgcattgtgctctttccaagttcagcagcagttctatcagtggtgccactgaaactgggtatatttatgatttctttcagcgttaaaaagaaacatagtgttgccctttttcttaaagcatcagtgaaattatggaaaattacttaaaacgtgaatacatcatcacagtagaatttattatgagagcatgtagtatgtatctgtagccctaacacatgggatgaacgttttactgctacacccagatttgtgttgaacgaaaacattgtggtttggaaaggagaattcaacaattaatagttgaaattgtgaggttaatgtttaaaaagctttacacctgtttacaatttggggacaaaaaggcaggcttcatttttcatatgtttgatgaaaactggctcaagatgtttgtaaatagaatcaagagcaaaactgcacaaacttgcacattggaaagtgcaacaagttcccgtgattgcagtaaaaatatttactattctaaaaaaatgagaattgaagacttagccagtcagataagttttttcatgaacccgttgtggaaattattggaattaactgagccaaagtgattatgcattcttcatctattttagttagcactttgtatcgttatatacagtttacaatacatgtataacttgtagctataaacattttgtgccattaaagctctcacaaaacttt

SEQ ID NO: 301385 - DNA, 3455 bp, Homo sapiens
ggccctgacgtcaggggcaggggagggacggcgcaggcgcagaaaagggggcggcggactcggcttgttgtgttgctgcctgagtgccggagacggtcctgctgctgccgcagtcctgccagctgtccgacgatgtcgtcccacctagtcgagccgccgccgcccctgcacaacaacaacaacaactgcgaggaaaatgagcagtctctgcccccgccggccggcctcaacagttcctgggtggagctacccatgaacagcagcaatggcaatgataatggcaatgggaaaaatggggggctggaacacgtaccatcctcatcctccatccacaatggagacatggagaagattcttttggatgcacaacatgaatcaggacagagtagttccagaggcagttctcactgtgacagcccttcgccacaagaagatgggcagatcatgtttgatgtggaaatgcacaccagcagggaccatagctctcagtcagaagaagaagttgtagaaggagagaaggaagtcgaggctttgaagaaaagtgcggactgggtatcagactggtccagtagacccgaaaacattccacccaaggagttccacttcagacaccctaaacgttctgtgtctttaagcatgagtgttcattccatctctcttcctttctcatgttttggctttggggctaggcatctatattggaaagcgactgagcacaccctctgccagcacctactgagggaaaggaaaagcccctggaaatgcgtgtgacctgtgaagtggtgtattgtcacagtagcttatttgaacttgagaccattgtaagcatgacccaacctaccaccctgtttttacatatccaattccagtaactctcaaattcaatattttattcaaactctgttgaggcattttactaaccttataccctttttggcctgaagacattttagaatttcctaacagagtttactgttgtttagaaatttgcaagggcttcttttccgcaaatgccaccagcagattataattttgtcagcaatgctattatctctaattagtgccaccagactagacctgtatcattcatggtataaattttactcttgcaacataactaccatctctctcttaaaacgagatcaggttagcaaatgatgtaaaagaagctttattgtctagttgttttttttcccccaagacaaaggcaagtttccctaagtttgagttgatagttattaaaaagaaaacaaaacaaaaaaaaaaggcaaggcacaacaaaaaaatatcctgggcaataaaaaaaatattttaaaccagctttggagccacttttttgtctaagcctcctaatagcgtcttttaatttataggaggcaaactgtataaatgataggtatgaaatagaataagaagtaaaatacatcagcagattttcatactagtatgttgtaatgctgtcttttctatggtgtagaatctttctttctgataaggaacgtctcaggcttagaaatatatgaaattgctttttgagatttttgcgtgtgtgtttgatattttttacgataattagctgcatgtgaatttttcatgaccttctttacattttttattttttatttctttatttttttttctctaagaagaggctttggaatgagttccaatttgtgatgttaatacaggcttcttgttttaggaagcatcacctatactctgaagcctttaaactctgaagagaattgtttcagagttattccaagcacttgtgcaacttggaaaaacagacttgggttgtgggaacagttgacagcgttctgaaaagatgccatttgtttccttctgatctctcactgaataatgtttactgtacagtcttcccaaggtgattcctgcgactgcaggcactggtcattttctcatgtagctgtcttttcagttatggtaaactcttaaagttcagaacactcaacagattccttcagtgatatacttgttcgttcatttctaaaatgtgaagctttaggaccaaattgttagaaagcatcaggatgaccagttatctcgagtagattttcttggatttcagaacatctagcatgactctgaaggataccacatgttttatatataaataattactgtttatgatatagacattgatattgactatttagagaaccgttgttaattttaaaactagcaatctataaagtgcatcaggtcaacttgaataaaaacactatgacagacaggtttgccagtttgcagaaactaactcttttctcacatcaacatttgtaaaattgatgtgttatagtggaaaataacatatagattaaacaaaatttttatcttttttcaagaatatagctggctatctttaagaaagatgatatatcctagttttgaaagtaattttcttttttctttctagcatttgatgtctaaataattttggacatctttttcctagaccatgtttctgtcttactcttaaacctggtaacacttgatttgccttctataacctatttatttcaagtgttcatatttgaatttctttgggaagaaagtaaatctgatggctcactgatttttgaaaagcctgaataaaattggaaagactggaaagttaggagaactgactagctaaactgctacagtatgcaatttctattacaattggtattacaggggggaaaagtaaaattacactttacctgaaagtgacttcttacagctagtgcattgtgctctttccaagttcagcagcagttctatcagtggtgccactgaaactgggtatatttatgatttctttcagcgttaaaaagaaacatagtgttgccctttttcttaaagcatcagtgaaattatggaaaattacttaaaacgtgaatacatcatcacagtagaatttattatgagagcatgtagtatgtatctgtagccctaacacatgggatgaacgttttactgctacacccagatttgtgttgaacgaaaacattgtggtttggaaaggagaattcaacaattaatagttgaaattgtgaggttaatgtttaaaaagctttacacctgtttacaatttggggacaaaaaggcaggcttcatttttcatatgtttgatgaaaactggctcaagatgtttgtaaatagaatcaagagcaaaactgcacaaacttgcacattggaaagtgcaacaagttcccgtgattgcagtaaaaatatttactattctaaaaaaatgagaattgaagacttagccagtcagataagttttttcatgaacccgttgtggaaattattggaattaactgagccaaagtgattatgcattcttcatctattttagttagcactttgtatcgttatatacagtttacaatacatgtataacttgtagctataaacattttgtgccattaaagctctcacaaaacttt

SEQ ID NO: 301386 - DNA, 3345 bp, Homo sapiens
tggggtcttgggcccggggccgtttgggctcgcggtccgggagcggcgcgggtagcgcggatccccctggttcctgggtggagctacccatgaacagcagcaatggcaatgataatggcaatgggaaaaatggggggctggaacacgtaccatcctcatcctccatccacaatggagacatggagaagattcttttggatgcacaacatgaatcaggacagagtagttccagaggcagttctcactgtgacagcccttcgccacaagaagatgggcagatcatgtttgatgtggaaatgcacaccagcagggaccatagctctcagtcagaagaagaagttgtagaaggagagaaggaagtcgaggctttgaagaaaagtgcggactgggtatcagactggtccagtagacccgaaaacattccacccaaggagttccacttcagacaccctaaacgttctgtgtctttaagcatgaggaaaagtggagccatgaagaaagggggtattttctccgcagaatttctgaaggtgttcattccatctctcttcctttctcatgttttggctttggggctaggcatctatattggaaagcgactgagcacaccctctgccagcacctactgagggaaaggaaaagcccctggaaatgcgtgtgacctgtgaagtggtgtattgtcacagtagcttatttgaacttgagaccattgtaagcatgacccaacctaccaccctgtttttacatatccaattccagtaactctcaaattcaatattttattcaaactctgttgaggcattttactaaccttataccctttttggcctgaagacattttagaatttcctaacagagtttactgttgtttagaaatttgcaagggcttcttttccgcaaatgccaccagcagattataattttgtcagcaatgctattatctctaattagtgccaccagactagacctgtatcattcatggtataaattttactcttgcaacataactaccatctctctcttaaaacgagatcaggttagcaaatgatgtaaaagaagctttattgtctagttgttttttttcccccaagacaaaggcaagtttccctaagtttgagttgatagttattaaaaagaaaacaaaacaaaaaaaaaaggcaaggcacaacaaaaaaatatcctgggcaataaaaaaaatattttaaaccagctttggagccacttttttgtctaagcctcctaatagcgtcttttaatttataggaggcaaactgtataaatgataggtatgaaatagaataagaagtaaaatacatcagcagattttcatactagtatgttgtaatgctgtcttttctatggtgtagaatctttctttctgataaggaacgtctcaggcttagaaatatatgaaattgctttttgagatttttgcgtgtgtgtttgatattttttacgataattagctgcatgtgaatttttcatgaccttctttacattttttattttttatttctttatttttttttctctaagaagaggctttggaatgagttccaatttgtgatgttaatacaggcttcttgttttaggaagcatcacctatactctgaagcctttaaactctgaagagaattgtttcagagttattccaagcacttgtgcaacttggaaaaacagacttgggttgtgggaacagttgacagcgttctgaaaagatgccatttgtttccttctgatctctcactgaataatgtttactgtacagtcttcccaaggtgattcctgcgactgcaggcactggtcattttctcatgtagctgtcttttcagttatggtaaactcttaaagttcagaacactcaacagattccttcagtgatatacttgttcgttcatttctaaaatgtgaagctttaggaccaaattgttagaaagcatcaggatgaccagttatctcgagtagattttcttggatttcagaacatctagcatgactctgaaggataccacatgttttatatataaataattactgtttatgatatagacattgatattgactatttagagaaccgttgttaattttaaaactagcaatctataaagtgcatcaggtcaacttgaataaaaacactatgacagacaggtttgccagtttgcagaaactaactcttttctcacatcaacatttgtaaaattgatgtgttatagtggaaaataacatatagattaaacaaaatttttatcttttttcaagaatatagctggctatctttaagaaagatgatatatcctagttttgaaagtaattttcttttttctttctagcatttgatgtctaaataattttggacatctttttcctagaccatgtttctgtcttactcttaaacctggtaacacttgatttgccttctataacctatttatttcaagtgttcatatttgaatttctttgggaagaaagtaaatctgatggctcactgatttttgaaaagcctgaataaaattggaaagactggaaagttaggagaactgactagctaaactgctacagtatgcaatttctattacaattggtattacaggggggaaaagtaaaattacactttacctgaaagtgacttcttacagctagtgcattgtgctctttccaagttcagcagcagttctatcagtggtgccactgaaactgggtatatttatgatttctttcagcgttaaaaagaaacatagtgttgccctttttcttaaagcatcagtgaaattatggaaaattacttaaaacgtgaatacatcatcacagtagaatttattatgagagcatgtagtatgtatctgtagccctaacacatgggatgaacgttttactgctacacccagatttgtgttgaacgaaaacattgtggtttggaaaggagaattcaacaattaatagttgaaattgtgaggttaatgtttaaaaagctttacacctgtttacaatttggggacaaaaaggcaggcttcatttttcatatgtttgatgaaaactggctcaagatgtttgtaaatagaatcaagagcaaaactgcacaaacttgcacattggaaagtgcaacaagttcccgtgattgcagtaaaaatatttactattctaaaaaaatgagaattgaagacttagccagtcagataagttttttcatgaacccgttgtggaaattattggaattaactgagccaaagtgattatgcattcttcatctattttagttagcactttgtatcgttatatacagtttacaatacatgtataacttgtagctataaacattttgtgccattaaagctctcacaaaacttt

SEQ ID NO: 301387 - DNA, 3097 bp, Homo sapiens
tgaataggaacagctccggtctacagctcccagcatgagcgacgcagaagacgggtgatttctgcatttccatctgagtcagaagaagaagttgtagaaggagagaaggaagtcgaggctttgaagaaaagtgcggactgggtatcagactggtccagtagacccgaaaacattccacccaaggagttccacttcagacaccctaaacgttctgtgtctttaagcatgaggaaaagtggagccatgaagaaagggggtattttctccgcagaatttctgaaggtgttcattccatctctcttcctttctcatgttttggctttggggctaggcatctatattggaaagcgactgagcacaccctctgccagcacctactgagggaaaggaaaagcccctggaaatgcgtgtgacctgtgaagtggtgtattgtcacagtagcttatttgaacttgagaccattgtaagcatgacccaacctaccaccctgtttttacatatccaattccagtaactctcaaattcaatattttattcaaactctgttgaggcattttactaaccttataccctttttggcctgaagacattttagaatttcctaacagagtttactgttgtttagaaatttgcaagggcttcttttccgcaaatgccaccagcagattataattttgtcagcaatgctattatctctaattagtgccaccagactagacctgtatcattcatggtataaattttactcttgcaacataactaccatctctctcttaaaacgagatcaggttagcaaatgatgtaaaagaagctttattgtctagttgttttttttcccccaagacaaaggcaagtttccctaagtttgagttgatagttattaaaaagaaaacaaaacaaaaaaaaaaggcaaggcacaacaaaaaaatatcctgggcaataaaaaaaatattttaaaccagctttggagccacttttttgtctaagcctcctaatagcgtcttttaatttataggaggcaaactgtataaatgataggtatgaaatagaataagaagtaaaatacatcagcagattttcatactagtatgttgtaatgctgtcttttctatggtgtagaatctttctttctgataaggaacgtctcaggcttagaaatatatgaaattgctttttgagatttttgcgtgtgtgtttgatattttttacgataattagctgcatgtgaatttttcatgaccttctttacattttttattttttatttctttatttttttttctctaagaagaggctttggaatgagttccaatttgtgatgttaatacaggcttcttgttttaggaagcatcacctatactctgaagcctttaaactctgaagagaattgtttcagagttattccaagcacttgtgcaacttggaaaaacagacttgggttgtgggaacagttgacagcgttctgaaaagatgccatttgtttccttctgatctctcactgaataatgtttactgtacagtcttcccaaggtgattcctgcgactgcaggcactggtcattttctcatgtagctgtcttttcagttatggtaaactcttaaagttcagaacactcaacagattccttcagtgatatacttgttcgttcatttctaaaatgtgaagctttaggaccaaattgttagaaagcatcaggatgaccagttatctcgagtagattttcttggatttcagaacatctagcatgactctgaaggataccacatgttttatatataaataattactgtttatgatatagacattgatattgactatttagagaaccgttgttaattttaaaactagcaatctataaagtgcatcaggtcaacttgaataaaaacactatgacagacaggtttgccagtttgcagaaactaactcttttctcacatcaacatttgtaaaattgatgtgttatagtggaaaataacatatagattaaacaaaatttttatcttttttcaagaatatagctggctatctttaagaaagatgatatatcctagttttgaaagtaattttcttttttctttctagcatttgatgtctaaataattttggacatctttttcctagaccatgtttctgtcttactcttaaacctggtaacacttgatttgccttctataacctatttatttcaagtgttcatatttgaatttctttgggaagaaagtaaatctgatggctcactgatttttgaaaagcctgaataaaattggaaagactggaaagttaggagaactgactagctaaactgctacagtatgcaatttctattacaattggtattacaggggggaaaagtaaaattacactttacctgaaagtgacttcttacagctagtgcattgtgctctttccaagttcagcagcagttctatcagtggtgccactgaaactgggtatatttatgatttctttcagcgttaaaaagaaacatagtgttgccctttttcttaaagcatcagtgaaattatggaaaattacttaaaacgtgaatacatcatcacagtagaatttattatgagagcatgtagtatgtatctgtagccctaacacatgggatgaacgttttactgctacacccagatttgtgttgaacgaaaacattgtggtttggaaaggagaattcaacaattaatagttgaaattgtgaggttaatgtttaaaaagctttacacctgtttacaatttggggacaaaaaggcaggcttcatttttcatatgtttgatgaaaactggctcaagatgtttgtaaatagaatcaagagcaaaactgcacaaacttgcacattggaaagtgcaacaagttcccgtgattgcagtaaaaatatttactattctaaaaaaatgagaattgaagacttagccagtcagataagttttttcatgaacccgttgtggaaattattggaattaactgagccaaagtgattatgcattcttcatctattttagttagcactttgtatcgttatatacagtttacaatacatgtataacttgtagctataaacattttgtgccattaaagctctcacaaaacttt

SEQ ID NO: 301388 - DNA, 3482 bp, Homo sapiens
ccttaagcgattggtgtctataccttgccgtctctctttcagtcatcttcagattgtttgtcttggctgtaagtataactattgctatagatgaatgtaaaaagagtgtttaaaaagttcgttgctttaattgcactggaggtgaagctagttacatactttccttaacttcccttctgcttttgctgttgaagaggccaaatactttcttggcatgaaaaagtattataaggcccctaatccttaggagttattagtaagagctgtctttaaagcactggcagcttttaaggttttttttttcttttgtcctacatagagcaccagaataatttcacatattactatatttttgtgtctgaaatgtcagtagaaccttctgtccaccaaagaggaacatcttgaaggagttgggctgctttatttactctgtggagggatctgttctctctggctttactttgtctaatcactacccctttgctgtcgagccccgatatttaatgagtaaacaaactcatataaaaccagtttggccgggctggtgactggttttaagaaagtcagtgatgatttcacggtgtttggggagcggtacccacaaacctttagagccttttacaaagactgaagagttttaagtagagttcaacctgtggacaagctggtatagaactgttgaaacaggtgaaacatgatgcttctgcttcctttcagcatctatattggaaagcgactgagcacaccctctgccagcacctactgagggaaaggaaaagcccctggaaatgcgtgtgacctgtgaagtggtgtattgtcacagtagcttatttgaacttgagaccattgtaagcatgacccaacctaccaccctgtttttacatatccaattccagtaactctcaaattcaatattttattcaaactctgttgaggcattttactaaccttataccctttttggcctgaagacattttagaatttcctaacagagtttactgttgtttagaaatttgcaagggcttcttttccgcaaatgccaccagcagattataattttgtcagcaatgctattatctctaattagtgccaccagactagacctgtatcattcatggtataaattttactcttgcaacataactaccatctctctcttaaaacgagatcaggttagcaaatgatgtaaaagaagctttattgtctagttgttttttttcccccaagacaaaggcaagtttccctaagtttgagttgatagttattaaaaagaaaacaaaacaaaaaaaaaaggcaaggcacaacaaaaaaatatcctgggcaataaaaaaaatattttaaaccagctttggagccacttttttgtctaagcctcctaatagcgtcttttaatttataggaggcaaactgtataaatgataggtatgaaatagaataagaagtaaaatacatcagcagattttcatactagtatgttgtaatgctgtcttttctatggtgtagaatctttctttctgataaggaacgtctcaggcttagaaatatatgaaattgctttttgagatttttgcgtgtgtgtttgatattttttacgataattagctgcatgtgaatttttcatgaccttctttacattttttattttttatttctttatttttttttctctaagaagaggctttggaatgagttccaatttgtgatgttaatacaggcttcttgttttaggaagcatcacctatactctgaagcctttaaactctgaagagaattgtttcagagttattccaagcacttgtgcaacttggaaaaacagacttgggttgtgggaacagttgacagcgttctgaaaagatgccatttgtttccttctgatctctcactgaataatgtttactgtacagtcttcccaaggtgattcctgcgactgcaggcactggtcattttctcatgtagctgtcttttcagttatggtaaactcttaaagttcagaacactcaacagattccttcagtgatatacttgttcgttcatttctaaaatgtgaagctttaggaccaaattgttagaaagcatcaggatgaccagttatctcgagtagattttcttggatttcagaacatctagcatgactctgaaggataccacatgttttatatataaataattactgtttatgatatagacattgatattgactatttagagaaccgttgttaattttaaaactagcaatctataaagtgcatcaggtcaacttgaataaaaacactatgacagacaggtttgccagtttgcagaaactaactcttttctcacatcaacatttgtaaaattgatgtgttatagtggaaaataacatatagattaaacaaaatttttatcttttttcaagaatatagctggctatctttaagaaagatgatatatcctagttttgaaagtaattttcttttttctttctagcatttgatgtctaaataattttggacatctttttcctagaccatgtttctgtcttactcttaaacctggtaacacttgatttgccttctataacctatttatttcaagtgttcatatttgaatttctttgggaagaaagtaaatctgatggctcactgatttttgaaaagcctgaataaaattggaaagactggaaagttaggagaactgactagctaaactgctacagtatgcaatttctattacaattggtattacaggggggaaaagtaaaattacactttacctgaaagtgacttcttacagctagtgcattgtgctctttccaagttcagcagcagttctatcagtggtgccactgaaactgggtatatttatgatttctttcagcgttaaaaagaaacatagtgttgccctttttcttaaagcatcagtgaaattatggaaaattacttaaaacgtgaatacatcatcacagtagaatttattatgagagcatgtagtatgtatctgtagccctaacacatgggatgaacgttttactgctacacccagatttgtgttgaacgaaaacattgtggtttggaaaggagaattcaacaattaatagttgaaattgtgaggttaatgtttaaaaagctttacacctgtttacaatttggggacaaaaaggcaggcttcatttttcatatgtttgatgaaaactggctcaagatgtttgtaaatagaatcaagagcaaaactgcacaaacttgcacattggaaagtgcaacaagttcccgtgattgcagtaaaaatatttactattctaaaaaaatgagaattgaagacttagccagtcagataagttttttcatgaacccgttgtggaaattattggaattaactgagccaaagtgattatgcattcttcatctattttagttagcactttgtatcgttatatacagtttacaatacatgtataacttgtagctataaacattttgtgccattaaagctctcacaaaacttt

SEQ ID NO: 301389 - DNA, 1343 bp, Homo sapiens
ggccctgacgtcaggggcaggggagggacggcgcaggcgcagaaaagggggcggcggactcggcttgttgtgttgctgcctgagtgccggagacggtcctgctgctgccgcagtcctgccagctgtccgacgatgtcgtcccacctagtcgagccgccgccgcccctgcacaacaacaacaacaactgcgaggaaaatgagcagtctctgcccccgccggccggcctcaacagttcctgggtggagctacccatgaacagcagcaatggcaatgataatggcaatgggaaaaatggggggctggaacacgtaccatcctcatcctccatccacaatggagacatggagaagattcttttggatgcacaacatgaatcaggacagagtagttccagaggcagttctcactgtgacagcccttcgccacaagaagatgggcagatcatgtttgatgtggaaatgcacaccagcagggaccatagctctcagtcagaagaagaagttgtagaaggagagaaggaagtcgaggctttgaagaaaagtgcggactgggtatcagactggtccagtagacccgaaaacattccacccaaggagttccacttcagacaccctaaacgttctgtgtctttaagcatgaggaaaagtggagccatgaagaaagggggtattttctccgcagaatttctgaaggtgttcattccatctctcttcctttctcatgttttggctttggggctaggcatctatattggaaagcgactgagcacaccctctgccagcacctactgagggaaaggaaaagcccctggaaatgcgtgtgacctgtgaagtggtgtattgtcacagtagcttatttgaacttgagaccattgtaagcatgacccaacctaccaccctgtttttacatatccaattccagtaactctcaaattcaatattttattcaaactctgttgaggcattttactaaccttataccctttttggcctgaagacattttagaatttcctaacagagtttactgttgtttagaaatttgcaagggcttcttttccgcaaatgccaccagcagattataattttgtcagcaatgctattatctctaattagtgccaccagactagacctgtatcattcatggtataaattttactcttgcaacataactaccatctctctcttaaaacgagatcaggttagcaaatgatgtaaaagaagctttattgtctagttgttttttttcccccaagacaaaggcaagtttccctaagtttgagctagttgttttttttcccccaagacaaaggcaagtttccctaagtttgagttgatagttatt

SEQ ID NO: 301390 - DNA, 2415 bp, Homo sapiens
gcggccatctacacggtgaggcacccggagtggcatctcaactcggattactcctacggtttcgcctacatcctggcctgggtggccttccccctggcccttctcagcggtgtcatctatgtgatcttgcggaaacgcgaatgaggcgcccagacggtctgtctgaggctctgagcgtacatagggaagggaggaagggaaaacagaaaacaaaacaaaaaaaaaaggcaaggcacaacaaaaaaatatcctgggcaataaaaaaaatattttaaaccagctttggagccacttttttgtctaagcctcctaatagcgtcttttaatttataggaggcaaactgtataaatgataggtatgaaatagaataagaagtaaaatacatcagcagattttcatactagtatgttgtaatgctgtcttttctatggtgtagaatctttctttctgataaggaacgtctcaggcttagaaatatatgaaattgctttttgagatttttgcgtgtgtgtttgatattttttacgataattagctgcatgtgaatttttcatgaccttctttacattttttattttttatttctttatttttttttctctaagaagaggctttggaatgagttccaatttgtgatgttaatacaggcttcttgttttaggaagcatcacctatactctgaagcctttaaactctgaagagaattgtttcagagttattccaagcacttgtgcaacttggaaaaacagacttgggttgtgggaacagttgacagcgttctgaaaagatgccatttgtttccttctgatctctcactgaataatgtttactgtacagtcttcccaaggtgattcctgcgactgcaggcactggtcattttctcatgtagctgtcttttcagttatggtaaactcttaaagttcagaacactcaacagattccttcagtgatatacttgttcgttcatttctaaaatgtgaagctttaggaccaaattgttagaaagcatcaggatgaccagttatctcgagtagattttcttggatttcagaacatctagcatgactctgaaggataccacatgttttatatataaataattactgtttatgatatagacattgatattgactatttagagaaccgttgttaattttaaaactagcaatctataaagtgcatcaggtcaacttgaataaaaacactatgacagacaggtttgccagtttgcagaaactaactcttttctcacatcaacatttgtaaaattgatgtgttatagtggaaaataacatatagattaaacaaaatttttatcttttttcaagaatatagctggctatctttaagaaagatgatatatcctagttttgaaagtaattttcttttttctttctagcatttgatgtctaaataattttggacatctttttcctagaccatgtttctgtcttactcttaaacctggtaacacttgatttgccttctataacctatttatttcaagtgttcatatttgaatttctttgggaagaaagtaaatctgatggctcactgatttttgaaaagcctgaataaaattggaaagactggaaagttaggagaactgactagctaaactgctacagtatgcaatttctattacaattggtattacaggggggaaaagtaaaattacactttacctgaaagtgacttcttacagctagtgcattgtgctctttccaagttcagcagcagttctatcagtggtgccactgaaactgggtatatttatgatttctttcagcgttaaaaagaaacatagtgttgccctttttcttaaagcatcagtgaaattatggaaaattacttaaaacgtgaatacatcatcacagtagaatttattatgagagcatgtagtatgtatctgtagccctaacacatgggatgaacgttttactgctacacccagatttgtgttgaacgaaaacattgtggtttggaaaggagaattcaacaattaatagttgaaattgtgaggttaatgtttaaaaagctttacacctgtttacaatttggggacaaaaaggcaggcttcatttttcatatgtttgatgaaaactggctcaagatgtttgtaaatagaatcaagagcaaaactgcacaaacttgcacattggaaagtgcaacaagttcccgtgattgcagtaaaaatatttactattctaaaaaaatgagaattgaagacttagccagtcagataagttttttcatgaacccgttgtggaaattattggaattaactgagccaaagtgattatgcattcttcatctattttagttagcactttgtatcgttatatacagtttacaatacatgtataacttgtagctataaacattttgtgccattaaagctctcacaaaacttt

SEQ ID NO: 301391 - DNA, 3453 bp, Homo sapiens
ggccctgacgtcaggggcaggggagggacggcgcaggcgcagaaaagggggcggcggactcggcttgttgtgttgctgcctgagtgccggagacggtcctgctgctgccgcagtcctgccagctgtccgacgatgtcgtcccacctagtcgagccgccgccgcccctgcacaacaacaacaacaactgcgaggaaaatgagcagtctctgcccccgccggccggcctcaacagttcctgggtggagctacccatgaacagcagcaatggcaatgataatggcaatgggaaaaatggggggctggaacacgtaccatcctcatcctccatccacaatggagacatggagaagattcttttggatgcacaacatgaatcaggacagagtagttccagaggcagttctcactgtgacagcccttcgccacaagaagatgggcagatcatgtttgatgtggaaatgcacaccagcagggaccatagctctcagtcagaagaagaagttgtagaaggagagaaggaagtcgaggctttgaagaaaagtgcggactgggtatcagactggtccagtagacccgaaaacattccacccaaggagttccacttcagacaccctaaacgttctgtgtctttaagcatgaggaaaagtggagccatgaagaaagggggtattttctccgcagaatttctgaaggtgttcattccatctctcttcctttctcatgttttggctttggggctaggcatctatattggaaagcgactgagcacaccctctgccagcacctactgagggaaaggaaaagcccctggaaatgcgtgtgacctgtgaagtggtgtattgtcacagtagcttatttgaacttgagaccattgtaagcatgacccaacctaccaccctgtttttacatatccaattccagtaactctcaaattcaatattttattcaaactctgttgaggcattttactaaccttataccctttttggcctgaagacattttagaatttcctaacagagtttactgttgtttagaaatttgcaagggcttcttttccgcaaatgccaccagcagattataattttgtcagcaatgctattatctctaattagtgccaccagactagacctgtatcattcatggtataaattttactcttgcaacataactaccatctctctcttaaaacgagatcaggttagcaaatgatgtaaaagaagctttattgtctagttgttttttttcccccaagacaaaggcaagtttccctaagtttgagttgatagttattaaaaagaaaacaaaacaaaaaaaaaaggcaaggcacaacaaaaaaatatcctgggcaataaagtcttttaatttataggaggcaaactgtataaatgataggtatgaaatagaataagaagtaaaatacatcagcagattttcatactagtatgttgtaatgctgtcttttctatggtgtagaatctttctttctgataaggaacgtctcaggcttagaaatatatgaaattgctttttgagatttttgcgtgtgtgtttgatattttttacgataattagctgcatgtgaatttttcatgaccttctttacattttttattttttatttctttatttttttttctctaagaagaggctttggaatgagttccaatttgtgatgttaatacaggcttcttgttttaggaagcatcacctatactctgaagcctttaaactctgaagagaattgtttcagagttattccaagcacttgtgcaacttggaaaaacagacttgggttgtgggaacagttgacagcgttctgaaaagatgccatttgtttccttctgatctctcactgaataatgtttactgtacagtcttcccaaggtgattcctgcgactgcaggcactggtcattttctcatgtagctgtcttttcagttatggtaaactcttaaagttcagaacactcaacagattccttcagtgatatacttgttcgttcatttctaaaatgtgaagctttaggaccaaattgttagaaagcatcaggatgaccagttatctcgagtagattttcttggatttcagaacatctagcatgactctgaaggataccacatgttttatatataaataattactgtttatgatatagacattgatattgactatttagagaaccgttgttaattttaaaactagcaatctataaagtgcatcaggtcaacttgaataaaaacactatgacagacaggtttgccagtttgcagaaactaactcttttctcacatcaacatttgtaaaattgatgtgttatagtggaaaataacatatagattaaacaaaatttttatcttttttcaagaatatagctggctatctttaagaaagatgatatatcctagttttgaaagtaattttcttttttctttctagcatttgatgtctaaataattttggacatctttttcctagaccatgtttctgtcttactcttaaacctggtaacacttgatttgccttctataacctatttatttcaagtgttcatatttgaatttctttgggaagaaagtaaatctgatggctcactgatttttgaaaagcctgaataaaattggaaagactggaaagttaggagaactgactagctaaactgctacagtatgcaatttctattacaattggtattacaggggggaaaagtaaaattacactttacctgaaagtgacttcttacagctagtgcattgtgctctttccaagttcagcagcagttctatcagtggtgccactgaaactgggtatatttatgatttctttcagcgttaaaaagaaacatagtgttgccctttttcttaaagcatcagtgaaattatggaaaattacttaaaacgtgaatacatcatcacagtagaatttattatgagagcatgtagtatgtatctgtagccctaacacatgggatgaacgttttactgctacacccagatttgtgttgaacgaaaacattgtggtttggaaaggagaattcaacaattaatagttgaaattgtgaggttaatgtttaaaaagctttacacctgtttacaatttggggacaaaaaggcaggcttcatttttcatatgtttgatgaaaactggctcaagatgtttgtaaatagaatcaagagcaaaactgcacaaacttgcacattggaaagtgcaacaagttcccgtgattgcagtaaaaatatttactattctaaaaaaatgagaattgaagacttagccagtcagataagttttttcatgaacccgttgtggaaattattggaattaactgagccaaagtgattatgcattcttcatctattttagttagcactttgtatcgttatatacagtttacaatacatgtataacttgtagctataaacattttgtgccattaaagctctcacaaaacttt

SEQ ID NO: 301392 - DNA, 3454 bp, Homo sapiens
ggccctgacgtcaggggcaggggagggacggcgcaggcgcagaaaagggggcggcggactcggcttgttgtgttgctgcctgagtgccggagacggtcctgctgctgccgcagtcctgccagctgtccgacgatgtcgtcccacctagtcgagccgccgccgcccctgcacaacaacaacaacaactgcgaggaaaatgagcagtctctgcccccgccggccggcctcaacagttcctgggtggagctacccatgaacagcagcaatggcaatgataatggcaatgggaaaaatggggggctggaacacgtaccatcctcatcctccatccacaatggagacatggagaagattcttttggatgcacaacatgaatcaggacagagtagttccagaggcagttctcactgtgacagcccttcgccacaagaagatgggcagatcatgtttgatgtggaaatgcacaccagcagggaccatagctctcagtcagaagaagaagttgtagaaggagagaaggaagtcgaggctttgaagaaaagtgcggactgggtatcagactggtccagtagacccgaaaacattccacccaaggagttccacttcagacaccctaaacgttctgtgtctttaagcatgaggaaaagtggagccatgaagaaagggggtattttctccgcagaatttctgaaggtgttcattccatctctcttcctttctcatgttttggctttggggctaggcatctatattggaaagcgactgagcacaccctctgccagcacctactgagggaaaggaaaagcccctggaaatgcgtgtgacctgtgaagtggtgtattgtcacagtagcttatttgaacttgagaccattgtaagcatgacccaacctaccaccctgtttttacatatccaattccagtaactctcaaattcaatattttattcaaactctgttgaggcattttactaaccttataccctttttggcctgaagacattttagaatttcctaacagagtttactgttgtttagaaatttgcaagggcttcttttccgcaaatgccaccagcagattataattttgtcagcaatgctattatctctaattagtgccaccagactagacctgtatcattcatggtataaattttactcttgcaacataactaccatctctctcttaaaacgagatcaggttagcaaatgatgtaaaagaagctttattgtctagttgttttttttcccccaagacaaaggcaagtttccctaagtttgagttgatagttattaaaaagaaaacaaaacaaaaaaaaaaggcaaggcacaacaaaaaaatatcctgggcaataaaaaaaatattttaaaccagctttggagccacttttttgtctaagcctcctaatagcgtcttttaatttataggaggcaaactgtataaatgataggtatgaaatagaataagaagtaaaatacatcagcagattttcatactagtatgttgtaatgctgtcttttctatggtgtagaatctttctttctgataaggaacgtctcaggcttagaaatatatgaaattgctttttgagatttttgcgtgtgtgtttgatattttttacgataattagctgcatgtgaatttttcatgaccttctttacattttttattttttatttctttatttttttttctctaagaagaggctttggaatgagttccaatttgtgatgttaatacaggcttcttgttttaggaagcatcacctatactctgaagcctttaaactctgaagagaattgtttcagagttattccaagcacttgtgcaacttggaaaaacagacttgggttgtgggaacagttgacagcgttctgatcttcccaaggtgattcctgcgactgcaggcactggtcattttctcatgtagctgtcttttcagttatggtaaactcttaaagttcagaacactcaacagattccttcagtgatatacttgttcgttcatttctaaaatgtgaagctttaggaccaaattgttagaaagcatcaggatgaccagttatctcgagtagattttcttggatttcagaacatctagcatgactctgaaggataccacatgttttatatataaataattactgtttatgatatagacattgatattgactatttagagaaccgttgttaattttaaaactagcaatctataaagtgcatcaggtcaacttgaataaaaacactatgacagacaggtttgccagtttgcagaaactaactcttttctcacatcaacatttgtaaaattgatgtgttatagtggaaaataacatatagattaaacaaaatttttatcttttttcaagaatatagctggctatctttaagaaagatgatatatcctagttttgaaagtaattttcttttttctttctagcatttgatgtctaaataattttggacatctttttcctagaccatgtttctgtcttactcttaaacctggtaacacttgatttgccttctataacctatttatttcaagtgttcatatttgaatttctttgggaagaaagtaaatctgatggctcactgatttttgaaaagcctgaataaaattggaaagactggaaagttaggagaactgactagctaaactgctacagtatgcaatttctattacaattggtattacaggggggaaaagtaaaattacactttacctgaaagtgacttcttacagctagtgcattgtgctctttccaagttcagcagcagttctatcagtggtgccactgaaactgggtatatttatgatttctttcagcgttaaaaagaaacatagtgttgccctttttcttaaagcatcagtgaaattatggaaaattacttaaaacgtgaatacatcatcacagtagaatttattatgagagcatgtagtatgtatctgtagccctaacacatgggatgaacgttttactgctacacccagatttgtgttgaacgaaaacattgtggtttggaaaggagaattcaacaattaatagttgaaattgtgaggttaatgtttaaaaagctttacacctgtttacaatttggggacaaaaaggcaggcttcatttttcatatgtttgatgaaaactggctcaagatgtttgtaaatagaatcaagagcaaaactgcacaaacttgcacattggaaagtgcaacaagttcccgtgattgcagtaaaaatatttactattctaaaaaaatgagaattgaagacttagccagtcagataagttttttcatgaacccgttgtggaaattattggaattaactgagccaaagtgattatgcattcttcatctattttagttagcactttgtatcgttatatacagtttacaatacatgtataacttgtagctataaacattttgtgccattaaagctctcacaaaacttt

SEQ ID NO: 301393 - DNA, 3415 bp, Homo sapiens
actttttgtccaagaaaacttttcgtgtttgcctgtagctgatgtgcagttgtttctgctcccaaatcaacagggtttaatgaaaaccctagaaagtagaaacccgtgggagagaaaagaaaaaagacaagttcacaaggttcctgggtggagctacccatgaacagcagcaatggcaatgataatggcaatgggaaaaatggggggctggaacacgtaccatcctcatcctccatccacaatggagacatggagaagattcttttggatgcacaacatgaatcaggacagagtagttccagaggcagttctcactgtgacagcccttcgccacaagaagatgggcagatcatgtttgatgtggaaatgcacaccagcagggaccatagctctcagtcagaagaagaagttgtagaaggagagaaggaagtcgaggctttgaagaaaagtgcggactgggtatcagactggtccagtagacccgaaaacattccacccaaggagttccacttcagacaccctaaacgttctgtgtctttaagcatgaggaaaagtggagccatgaagaaagggggtattttctccgcagaatttctgaaggtgttcattccatctctcttcctttctcatgttttggctttggggctaggcatctatattggaaagcgactgagcacaccctctgccagcacctactgagggaaaggaaaagcccctggaaatgcgtgtgacctgtgaagtggtgtattgtcacagtagcttatttgaacttgagaccattgtaagcatgacccaacctaccaccctgtttttacatatccaattccagtaactctcaaattcaatattttattcaaactctgttgaggcattttactaaccttataccctttttggcctgaagacattttagaatttcctaacagagtttactgttgtttagaaatttgcaagggcttcttttccgcaaatgccaccagcagattataattttgtcagcaatgctattatctctaattagtgccaccagactagacctgtatcattcatggtataaattttactcttgcaacataactaccatctctctcttaaaacgagatcaggttagcaaatgatgtaaaagaagctttattgtctagttgttttttttcccccaagacaaaggcaagtttccctaagtttgagttgatagttattaaaaagaaaacaaaacaaaaaaaaaaggcaaggcacaacaaaaaaatatcctgggcaataaaaaaaatattttaaaccagctttggagccacttttttgtctaagcctcctaatagcgtcttttaatttataggaggcaaactgtataaatgataggtatgaaatagaataagaagtaaaatacatcagcagattttcatactagtatgttgtaatgctgtcttttctatggtgtagaatctttctttctgataaggaacgtctcaggcttagaaatatatgaaattgctttttgagatttttgcgtgtgtgtttgatattttttacgataattagctgcatgtgaatttttcatgaccttctttacattttttattttttatttctttatttttttttctctaagaagaggctttggaatgagttccaatttgtgatgttaatacaggcttcttgttttaggaagcatcacctatactctgaagcctttaaactctgaagagaattgtttcagagttattccaagcacttgtgcaacttggaaaaacagacttgggttgtgggaacagttgacagcgttctgaaaagatgccatttgtttccttctgatctctcactgaataatgtttactgtacagtcttcccaaggtgattcctgcgactgcaggcactggtcattttctcatgtagctgtcttttcagttatggtaaactcttaaagttcagaacactcaacagattccttcagtgatatacttgttcgttcatttctaaaatgtgaagctttaggaccaaattgttagaaagcatcaggatgaccagttatctcgagtagattttcttggatttcagaacatctagcatgactctgaaggataccacatgttttatatataaataattactgtttatgatatagacattgatattgactatttagagaaccgttgttaattttaaaactagcaatctataaagtgcatcaggtcaacttgaataaaaacactatgacagacaggtttgccagtttgcagaaactaactcttttctcacatcaacatttgtaaaattgatgtgttatagtggaaaataacatatagattaaacaaaatttttatcttttttcaagaatatagctggctatctttaagaaagatgatatatcctagttttgaaagtaattttcttttttctttctagcatttgatgtctaaataattttggacatctttttcctagaccatgtttctgtcttactcttaaacctggtaacacttgatttgccttctataacctatttatttcaagtgttcatatttgaatttctttgggaagaaagtaaatctgatggctcactgatttttgaaaagcctgaataaaattggaaagactggaaagttaggagaactgactagctaaactgctacagtatgcaatttctattacaattggtattacaggggggaaaagtaaaattacactttacctgaaagtgacttcttacagctagtgcattgtgctctttccaagttcagcagcagttctatcagtggtgccactgaaactgggtatatttatgatttctttcagcgttaaaaagaaacatagtgttgccctttttcttaaagcatcagtgaaattatggaaaattacttaaaacgtgaatacatcatcacagtagaatttattatgagagcatgtagtatgtatctgtagccctaacacatgggatgaacgttttactgctacacccagatttgtgttgaacgaaaacattgtggtttggaaaggagaattcaacaattaatagttgaaattgtgaggttaatgtttaaaaagctttacacctgtttacaatttggggacaaaaaggcaggcttcatttttcatatgtttgatgaaaactggctcaagatgtttgtaaatagaatcaagagcaaaactgcacaaacttgcacattggaaagtgcaacaagttcccgtgattgcagtaaaaatatttactattctaaaaaaatgagaattgaagacttagccagtcagataagttttttcatgaacccgttgtggaaattattggaattaactgagccaaagtgattatgcattcttcatctattttagttagcactttgtatcgttatatacagtttacaatacatgtataacttgtagctataaacattttgtgccattaaagctctcacaaaacttt

SEQ ID NO: 301394 - DNA, 3483 bp, Homo sapiens
ggccctgacgtcaggggcaggggagggacggcgcaggcgcagaaaagggggcggcggactcggcttgttgtgttgctgcctgagtgccggagacggtcctgctgctgccgcagtcctgccagctgtccgacgatgtcgtcccacctagtcgagccgccgccgcccctgcacaacaacaacaacaactgcgaggaaaatgagcagtctgttcctgggtggagctacccatgaacagcagcaatggcaatgataatggcaatgggaaaaatggggggctggaacacgtaccatcctcatcctccatccacaatggagacatggagaagattcttttggatgcacaacatgaatcaggacagagtagttccagaggcagttctcactgtgacagcccttcgccacaagaagatgggcagatcatgtttgatgtggaaatgcacaccagcagggaccatagctctcagtcagaagaagaagttgtagaaggagagaaggaagtcgaggctttgaagaaaagtgcggactgggtatcagactggtccagtagacccgaaaacattccacccaaggagttccacttcagacaccctaaacgttctgtgtctttaagcatgaggaaaagtggagccatgaagaaagggggtattttctccgcagaatttctgaaggtgttcattccatctctcttcctttctcatgttttggctttggggctaggcatctatattggaaagcgactgagcacaccctctgccagcacctactgagggaaaggaaaagcccctggaaatgcgtgtgacctgtgaagtggtgtattgtcacagtagcttatttgaacttgagaccattgtaagcatgacccaacctaccaccctgtttttacatatccaattccagtaactctcaaattcaatattttattcaaactctgttgaggcattttactaaccttataccctttttggcctgaagacattttagaatttcctaacagagtttactgttgtttagaaatttgcaagggcttcttttccgcaaatgccaccagcagattataattttgtcagcaatgctattatctctaattagtgccaccagactagacctgtatcattcatggtataaattttactcttgcaacataactaccatctctctcttaaaacgagatcaggttagcaaatgatgtaaaagaagctttattgtctagttgttttttttcccccaagacaaaggcaagtttccctaagtttgagttgatagttattaaaaagaaaacaaaacaaaaaaaaaaggcaaggcacaacaaaaaaatatcctgggcaataaaaaaaatattttaaaccagctttggagccacttttttgtctaagcctcctaatagcgtcttttaatttataggaggcaaactgtataaatgataggtatgaaatagaataagaagtaaaatacatcagcagattttcatactagtatgttgtaatgctgtcttttctatggtgtagaatctttctttctgataaggaacgtctcaggcttagaaatatatgaaattgctttttgagatttttgcgtgtgtgtttgatattttttacgataattagctgcatgtgaatttttcatgaccttctttacattttttattttttatttctttatttttttttctctaagaagaggctttggaatgagttccaatttgtgatgttaatacaggcttcttgttttaggaagcatcacctatactctgaagcctttaaactctgaagagaattgtttcagagttattccaagcacttgtgcaacttggaaaaacagacttgggttgtgggaacagttgacagcgttctgaaaagatgccatttgtttccttctgatctctcactgaataatgtttactgtacagtcttcccaaggtgattcctgcgactgcaggcactggtcattttctcatgtagctgtcttttcagttatggtaaactcttaaagttcagaacactcaacagattccttcagtgatatacttgttcgttcatttctaaaatgtgaagctttaggaccaaattgttagaaagcatcaggatgaccagttatctcgagtagattttcttggatttcagaacatctagcatgactctgaaggataccacatgttttatatataaataattactgtttatgatatagacattgatattgactatttagagaaccgttgttaattttaaaactagcaatctataaagtgcatcaggtcaacttgaataaaaacactatgacagacaggtttgccagtttgcagaaactaactcttttctcacatcaacatttgtaaaattgatgtgttatagtggaaaataacatatagattaaacaaaatttttatcttttttcaagaatatagctggctatctttaagaaagatgatatatcctagttttgaaagtaattttcttttttctttctagcatttgatgtctaaataattttggacatctttttcctagaccatgtttctgtcttactcttaaacctggtaacacttgatttgccttctataacctatttatttcaagtgttcatatttgaatttctttgggaagaaagtaaatctgatggctcactgatttttgaaaagcctgaataaaattggaaagactggaaagttaggagaactgactagctaaactgctacagtatgcaatttctattacaattggtattacaggggggaaaagtaaaattacactttacctgaaagtgacttcttacagctagtgcattgtgctctttccaagttcagcagcagttctatcagtggtgccactgaaactgggtatatttatgatttctttcagcgttaaaaagaaacatagtgttgccctttttcttaaagcatcagtgaaattatggaaaattacttaaaacgtgaatacatcatcacagtagaatttattatgagagcatgtagtatgtatctgtagccctaacacatgggatgaacgttttactgctacacccagatttgtgttgaacgaaaacattgtggtttggaaaggagaattcaacaattaatagttgaaattgtgaggttaatgtttaaaaagctttacacctgtttacaatttggggacaaaaaggcaggcttcatttttcatatgtttgatgaaaactggctcaagatgtttgtaaatagaatcaagagcaaaactgcacaaacttgcacattggaaagtgcaacaagttcccgtgattgcagtaaaaatatttactattctaaaaaaatgagaattgaagacttagccagtcagataagttttttcatgaacccgttgtggaaattattggaattaactgagccaaagtgattatgcattcttcatctattttagttagcactttgtatcgttatatacagtttacaatacatgtataacttgtagctataaacattttgtgccattaaagctctcacaaaacttt

SEQ ID NO: 301395 - DNA, 2635 bp, Homo sapiens
  misc_feature (17)..(17): n is a, c, g, or t
  misc_feature (104)..(104): n is a, c, g, or t
  misc_feature (122)..(122): n is a, c, g, or t
aaagtaggtgtgaaagnaagaggtcctaccagtcggcaagctcacacagacgtcagggaagaccacacagacacacagagagacagcaggagatggaaagagcntcaaagcgtttaaggganatttgcaaagcagatgctggacccagcaaactatggaactgggatggagaggtggccaagaacacctaaggaagaggcccaatcactagaagacctggccggcttcaaagagctcttccagacaccagactagacctgtatcattcatggtataaattttactcttgcaacataactaccatctctctcttaaaacgagatcaggttagcaaatgatgtaaaagaagctttattgtctagttgttttttttcccccaagacaaaggcaagtttccctaagtttgagttgatagttattaaaaagaaaacaaaacaaaaaaaaaaggcaaggcacaacaaaaaaatatcctgggcaataaaaaaaatattttaaaccagctttggagccacttttttgtctaagcctcctaatagcgtcttttaatttataggaggcaaactgtataaatgataggtatgaaatagaataagaagtaaaatacatcagcagattttcatactagtatgttgtaatgctgtcttttctatggtgtagaatctttctttctgataaggaacgtctcaggcttagaaatatatgaaattgctttttgagatttttgcgtgtgtgtttgatattttttacgataattagctgcatgtgaatttttcatgaccttctttacattttttattttttatttctttatttttttttctctaagaagaggctttggaatgagttccaatttgtgatgttaatacaggcttcttgttttaggaagcatcacctatactctgaagcctttaaactctgaagagaattgtttcagagttattccaagcacttgtgcaacttggaaaaacagacttgggttgtgggaacagttgacagcgttctgaaaagatgccatttgtttccttctgatctctcactgaataatgtttactgtacagtcttcccaaggtgattcctgcgactgcaggcactggtcattttctcatgtagctgtcttttcagttatggtaaactcttaaagttcagaacactcaacagattccttcagtgatatacttgttcgttcatttctaaaatgtgaagctttaggaccaaattgttagaaagcatcaggatgaccagttatctcgagtagattttcttggatttcagaacatctagcatgactctgaaggataccacatgttttatatataaataattactgtttatgatatagacattgatattgactatttagagaaccgttgttaattttaaaactagcaatctataaagtgcatcaggtcaacttgaataaaaacactatgacagacaggtttgccagtttgcagaaactaactcttttctcacatcaacatttgtaaaattgatgtgttatagtggaaaataacatatagattaaacaaaatttttatcttttttcaagaatatagctggctatctttaagaaagatgatatatcctagttttgaaagtaattttcttttttctttctagcatttgatgtctaaataattttggacatctttttcctagaccatgtttctgtcttactcttaaacctggtaacacttgatttgccttctataacctatttatttcaagtgttcatatttgaatttctttgggaagaaagtaaatctgatggctcactgatttttgaaaagcctgaataaaattggaaagactggaaagttaggagaactgactagctaaactgctacagtatgcaatttctattacaattggtattacaggggggaaaagtaaaattacactttacctgaaagtgacttcttacagctagtgcattgtgctctttccaagttcagcagcagttctatcagtggtgccactgaaactgggtatatttatgatttctttcagcgttaaaaagaaacatagtgttgccctttttcttaaagcatcagtgaaattatggaaaattacttaaaacgtgaatacatcatcacagtagaatttattatgagagcatgtagtatgtatctgtagccctaacacatgggatgaacgttttactgctacacccagatttgtgttgaacgaaaacattgtggtttggaaaggagaattcaacaattaatagttgaaattgtgaggttaatgtttaaaaagctttacacctgtttacaatttggggacaaaaaggcaggcttcatttttcatatgtttgatgaaaactggctcaagatgtttgtaaatagaatcaagagcaaaactgcacaaacttgcacattggaaagtgcaacaagttcccgtgattgcagtaaaaatatttactattctaaaaaaatgagaattgaagacttagccagtcagataagttttttcatgaacccgttgtggaaattattggaattaactgagccaaagtgattatgcattcttcatctattttagttagcactttgtatcgttatatacagtttacaatacatgtataacttgtagctataaacattttgtgccattaaagctctcacaaaacttt

SEQ ID NO: 301396 - DNA, 886 bp, Homo sapiens
  misc_feature (421)..(421): n is a, c, g, or t
ggccctgacgtcaggggcaggggagggacggcgcaggcgcagaaaagggggcggcggactcggcttgttgtgttgctgcctgagtgccggagacggtcctgctgctgccgcagtcctgccagctgtccgacgatgtcgtcccacctagtcgagccgccgccgcccctgcacaacaacaacaacaactgcgaggaaaatgagcagtctctgcccccgccggccggcctcaacagttcctgggtggagctacccatgaacagcagcaatggcaatgataatggcaatgggaaaaatggggggctggaacacgtaccatcctcatcctccatccacaaaaataatgaaaaaggaaaagacttatataatgcacttacaaaggaactgggagcagaatataagccaaacaacattgcactgctgnagatttctccttgggccatctatgtatgagaggtcgtgaacaaataataaatggatatatagagcacggcaacgggaatccatgatctactcgagggggatagaattaataggaggatcatatcagaattatcaacgagggaaaggtatggagtacgtgatgtaattatcgggttataaaccgttaatgccgccgaaaacgtaacctgcccatagttaggggctactggcagaacactgcaagtatatagctaaaatacgaatgatcgggaacagagaagcgatgaagtagacccataaaatgataaggaggaaagaaaaggtactctcgagcgaacaggggatctaaattggaaaaaggctataacctatattacaactgtgtcgtgatgacgataatattttaactgaattttgacgaattaccatctaagagggatatgaacatagaaatggcagtgtattg

SEQ ID NO: 301397 - DNA, 1834 bp, Homo sapiens
  misc_feature (1834)..(1834): n is a, c, g, or t
ggcggagcggcgccccggccaatcagcggcagtccccgaacgttgggccggcccagccccgccccgcgctgttgtttgtggtgtcggccgggccgcgggagtcgaaccacaacattcgccgggcgggcggcggcggagcgggcggcggagcggcggcagcagcggtgagcgcgagccccggagccccgggcggccggcctcccgcgcccgcgcagccccgcgtctgcgtccggccggagacgccgggccccgcgccgcgccgcgccatgtcggtgaacatggacgagctgcggcaccaggtcatgatcaaccagttcgtgctggccgcgggctgcgcggccgaccaggcgaagcagctgctgcaggcggcccactggcagttcgagaccgcgctgagcacgttcttccaagaaaccaacattcccaacagccaccaccaccaccagatgatgtgcactcccagcaacacccctgccacgccgcccaacttccccgatgcgctggccatgttctccaagctccgcgcctccgagggcctgcagagcagcaacagccccatgacagccgcagcctgctccccacctgcaaacttcagccccttctgggcctcgtccccgcccagccaccaggcgccctggatcccgccctcctcccccaccaccttccaccacctccaccgcccacagcccacgtggcccccaggagcacagcaggggggcgcccagcagaaagccatggcggccatggacggccagagatgagactggacgccgccgggcgctgggctggagctgggggcagcccagggttgtggggacacaggagggccagggaggggggagccggggagggcagggggtttcccgaagatcgcactggaagattttataaaagaatttttgtgggtcggggggacagtaaacttcctgggccacgtgggtccttcaggagtttttcaggcaagtttttcctctgtttttaatatataactataatatatatgaatagataaatataactaatgtgcgtgagaatgggcctggcacacctggggtgctcgggggtagggctgccatgctgcagagctgatggagtgatgttgtgggcacaaggcatctgtcagctgcctcctttaacagccatgccttctggaatctggaagaggacaccactcctgcagtcactgggcagccacatagcagctgcaggtcccaggagggcctgaggtcaaagctgtggaaggccctcttggtatcagggctctctccccatggcctcttccccacctctgattgctggttgtggccccatagctcatcacccctgtctcctgctgaatgtgcagggctgatgtggcactgaggagctgactttggtcaaaggccaggctctgcccagcaggggacttgactgccctgggcgccctgcccctcccgctgcgtgtccaggtccaaagtggagagcctgcctttgggtttagttcccgaatcagaatcccatctcaccagggcgaaattttaatttaaaaacttaaaaagagacttttctaacttcaaaaaaaaaaggaaaataaaactatgtctaaaagtaaacaaaaaaaggggggggcgaataaatatatccttggggggccatgttggtgcacccgcggttttgtgtaaagggtggcccataagggggcagtataaagcaaggaagggcggggttaaaaacggtgagggaaaagcgatgggggtcttgtgaaagacacgatttgggtgagataatgggaccaccagaggtattagctggatataaattatgttggcacgcttggggatgtgttacaataagn

SEQ ID NO: 301398 - DNA, 1578 bp, Homo sapiens
ggcggagcggcgccccggccaatcagcggcagtccccgaacgttgggccggcccagccccgccccgcgctgttgtttgtggtgtcggccgggccgcgggagtcgaaccacaacattcgccgggcgggcggcggcggagcgggcggcggagcggcggcagcagcggtgagcgcgagccccggagccccgggcggccggcctcccgcgcccgcgcagccccgcgtctgcgtccggccggagacgccgggccccgcgccgcgccgcgccatgtcggtgaacatggacgagctgcggcaccaggtcatgatcaaccagttcgtgctggccgcgggctgcgcggccgaccaggcgaagcagctgctgcaggcggcccactggcagttcgagaccgcgctgagcacgttcttccaagaaaccaacattcccaacagccaccaccaccaccagatgatgtgcactcccagcaacacccctgccacgccgcccaacttccccgatgcgctggccatgttctccaagctccgcgcctccgagggcctgcagagcagcaacagccccatgacagccgcagcctgctccccacctgcaaacttcagccccttctgggcctcgtccccgcccagccaccaggcgccctggatcccgccctcctcccccaccaccttccaccacctccaccgcccacagcccacgtggcccccaggagcacagcaggggggcgcccagcagaaagccatggcggccatggacggccagagatgagactggacgccgccgggcgctgggctggagctgggggcagcccagggttgtggggacacaggagggccagggaggggggagccggggagggcagggggtttcccgaagatcgcactggaagattttataaaagaatttttgtgggtcggggggacagtaaacttcctgggccacgtgggtccttcaggagtttttcaggcaagtttttcctctgtttttaatatataactataatatatatgaatagataaatataactaatgtgcgtgagaatgggcctggcacacctggggtgctcgggggtagggctgccatgctgcagagctgatggagtgatgttgtgggcacaaggcatctgtcagctgcctcctttaacagccatgccttctggaatctggaagaggacaccactcctgcagtcactgggcagccacatagcagctgcaggtcccaggagggcctgaggtcaaagctgtggaaggccctcttggtatcagggctctctccccatggcctcttccccacctctgattgctggttgtggccccatagctcatcacccctgtctcctgctgaatgtgcagggctgatgtggcactgaggagctgactttggtcaaaggccaggctctgcccagcaggggacttgactgccctgggcgccctgcccctcccgctgcgtgtccaggtccaaagtggagagcctgcctttgggtttagttcccgaatcagaatcccatctcaccagggcgaaattttaatttaaaaacttaaaaagagacttttctaacttcaacaaacaacacacgcaagcaacc

SEQ ID NO: 301399 - DNA, 1612 bp, Homo sapiens
  misc_feature (1612)..(1612): n is a, c, g, or t
ggcggagcggcgccccggccaatcagcggcagtccccgaacgttgggccggcccagccccgccccgcgctgttgtttgtggtgtcggccgggccgcgggagtcgaaccacaacattcgccgggcgggcggcggcggagcgggcggcggagcggcggcagcagcgaccgcgctgagcacgttcttccaagaaaccaacattcccaacagccaccaccaccaccagatgatgtgcactcccagcaacacccctgccacgccgcccaacttccccgatgcgctggccatgttctccaagctccgcgcctccgagggcctgcagagcagcaacagccccatgacagccgcagcctgctccccacctgcaaacttcagccccttctgggcctcgtccccgcccagccaccaggcgccctggatcccgccctcctcccccaccaccttccaccacctccaccgcccacagcccacgtggcccccaggagcacagcaggggggcgcccagcagaaagccatggcggccatggacggccagagatgagactggacgccgccgggcgctgggctggagctgggggcagcccagggttgtggggacacaggagggccagggaggggggagccggggagggcagggggtttcccgaagatcgcactggaagattttataaaagaatttttgtgggtcggggggacagtaaacttcctgggccacgtgggtccttcaggagtttttcaggcaagtttttcctctgtttttaatatataactataatatatatgaatagataaatataactaatgtgcgtgagaatgggcctggcacacctggggtgctcgggggtagggctgccatgctgcagagctgatggagtgatgttgtgggcacaaggcatctgtcagctgcctcctttaacagccatgccttctggaatctggaagaggacaccactcctgcagtcactgggcagccacatagcagctgcaggtcccaggagggcctgaggtcaaagctgtggaaggccctcttggtatcagggctctctccccatggcctcttccccacctctgattgctggttgtggccccatagctcatcacccctgtctcctgctgaatgtgcagggctgatgtggcactgaggagctgactttggtcaaaggccaggctctgcccagcaggggacttgactgccctgggcgccctgcccctcccgctgcgtgtccaggtccaaagtggagagcctgcctttgggtttagttcccgaatcagaatcccatctcaccagggcgaaattttaatttaaaaacttaaaaagagacttttctaacttcaaaaaaaaaaggaaaataaaactatgtctaaaagtaaacaaaaaaaggggggggcgaataaatatatccttggggggccatgttggtgcacccgcggttttgtgtaaagggtggcccataagggggcagtataaagcaaggaagggcggggttaaaaacggtgagggaaaagcgatgggggtcttgtgaaagacacgatttgggtgagataatgggaccaccagaggtattagctggatataaattatgttggcacgcttggggatgtgttacaataagn

SEQ ID NO: 301400 - DNA, 1747 bp, Homo sapiens
  misc_feature (1747)..(1747): n is a, c, g, or t
ggcggagcggcgccccggccaatcagcggcagtccccgaacgttgggccggcccagccccgccccgcgctgttgtttgtggtgtcggccgggccgcgggagtcgaaccacaacattcgccgggcgggcggcggcggagcgggcggcggagcggcggcagcagcggtgagcgcgagccccggagccccgggcggccggcctcccgcgcccgcgcagccccgcgtctgcgtccggccggagacgccgggccccgcgccgcgccgcgccatgtcggtgaacatggacgagctgcggcaccaggtcatgatcaaccagttcgtgctggccgcgggctgcgcggccgaccaggcgaagcagctgctgcaggcggcccactggcagttcgagaccgcgctgagcacgttcttccaagaaaccaacattcccaacagccaccaccaccaccagatgatgtgcactcccagcaacacccctgccacgccgcccaacttccccgatgcgctggccatgttctccaagctccgcgcctccgagggcctgcagagcagcaacagccccatgacagccgcagcctgctccccacctgcaaacttcagccccttctgggcctcgtccccgcccagccaccaggcgccccagcagaaagccatggcggccatggacggccagagatgagactggacgccgccgggcgctgggctggagctgggggcagcccagggttgtggggacacaggagggccagggaggggggagccggggagggcagggggtttcccgaagatcgcactggaagattttataaaagaatttttgtgggtcggggggacagtaaacttcctgggccacgtgggtccttcaggagtttttcaggcaagtttttcctctgtttttaatatataactataatatatatgaatagataaatataactaatgtgcgtgagaatgggcctggcacacctggggtgctcgggggtagggctgccatgctgcagagctgatggagtgatgttgtgggcacaaggcatctgtcagctgcctcctttaacagccatgccttctggaatctggaagaggacaccactcctgcagtcactgggcagccacatagcagctgcaggtcccaggagggcctgaggtcaaagctgtggaaggccctcttggtatcagggctctctccccatggcctcttccccacctctgattgctggttgtggccccatagctcatcacccctgtctcctgctgaatgtgcagggctgatgtggcactgaggagctgactttggtcaaaggccaggctctgcccagcaggggacttgactgccctgggcgccctgcccctcccgctgcgtgtccaggtccaaagtggagagcctgcctttgggtttagttcccgaatcagaatcccatctcaccagggcgaaattttaatttaaaaacttaaaaagagacttttctaacttcaaaaaaaaaaggaaaataaaactatgtctaaaagtaaacaaaaaaaggggggggcgaataaatatatccttggggggccatgttggtgcacccgcggttttgtgtaaagggtggcccataagggggcagtataaagcaaggaagggcggggttaaaaacggtgagggaaaagcgatgggggtcttgtgaaagacacgatttgggtgagataatgggaccaccagaggtattagctggatataaattatgttggcacgcttggggatgtgttacaataagn

SEQ ID NO: 301401 - DNA, 1458 bp, Homo sapiens
  misc_feature (1458)..(1458): n is a, c, g, or t
ggcggagcggcgccccggccaatcagcggcagtccccgaacgttgggccggcccagccccgccccgcgctgttgtttgtggtgtcggccgggccgcgggagtcgaaccacaacattcgccgggcgggcggcggcggagcgggcggcggagcggcggcagcagcggtgagcgcgagccccggagccccgggcggccggcctcccgcgcccgcgcagccccgcgtctgcgtccggccggagacgccgggccccgcgccgcgccgcgccatgtcggtgaacatggacgagctgcggcaccaggtcatgatcaaccagttcgtgctggccgcgggctgcgcggccgaccaggcgaagcagctgctgcaggcggcccactggcagttcgagaccgcgctgagcacgttcttccaagaaaccaacattcccaacagccaccaccaccaccagatgatgtgcactcccagcaacacccctgccacgccgcccaacttccccgatgcgtggaagattttataaaagaatttttgtgggtcggggggacagtaaacttcctgggccacgtgggtccttcaggagtttttcaggcaagtttttcctctgtttttaatatataactataatatatatgaatagataaatataactaatgtgcgtgagaatgggcctggcacacctggggtgctcgggggtagggctgccatgctgcagagctgatggagtgatgttgtgggcacaaggcatctgtcagctgcctcctttaacagccatgccttctggaatctggaagaggacaccactcctgcagtcactgggcagccacatagcagctgcaggtcccaggagggcctgaggtcaaagctgtggaaggccctcttggtatcagggctctctccccatggcctcttccccacctctgattgctggttgtggccccatagctcatcacccctgtctcctgctgaatgtgcagggctgatgtggcactgaggagctgactttggtcaaaggccaggctctgcccagcaggggacttgactgccctgggcgccctgcccctcccgctgcgtgtccaggtccaaagtggagagcctgcctttgggtttagttcccgaatcagaatcccatctcaccagggcgaaattttaatttaaaaacttaaaaagagacttttctaacttcaaaaaaaaaaggaaaataaaactatgtctaaaagtaaacaaaaaaaggggggggcgaataaatatatccttggggggccatgttggtgcacccgcggttttgtgtaaagggtggcccataagggggcagtataaagcaaggaagggcggggttaaaaacggtgagggaaaagcgatgggggtcttgtgaaagacacgatttgggtgagataatgggaccaccagaggtattagctggatataaattatgttggcacgcttggggatgtgttacaataagn

SEQ ID NO: 301402 - DNA, 1737 bp, Homo sapiens
  misc_feature (1737)..(1737): n is a, c, g, or t
ggcggagcggcgccccggccaatcagcggcagtccccgaacgttgggccggcccagccccgccccgcgctgttgtttgtggtgtcggccgggccgcgggagtcgaaccacaacattcgccgggcgggcggcggcggagcgggcggcggagcggcggcagcagcggtgagcgcgagccccggagccccgggcggccggcctcccgcgcccgcgcagccccgcgtctgcgtccggccggagacgccgggccccgcgccgcgccgcgccatgtcggtgaacatggacgagctgcggcaccaggtcatgatcaaccagttcgtgctggccgcgggctgcgcggccgaccaggcgaagcagctgctgcaggcggcccactggcagttcgagaccgcgctgagcacgttcttccaagaaaccaacattcccaacagccaccaccaccaccagatgatgtgcactcccagcaacacccctgccacgccgcccaacttccccgatgcgctggccatgttctccaagctccgcgcctccgagggcctgcagagcagcaacagccccatgacagccgcagcctgctccccacctgcaaacttcagccccttctgggcctcgtccccgcccagccaccaggcgccctggatcccgccctcctcccccaccaccttccaccacctccaccgcccacagcccacgtggcccccaggagcacagcaggggggcgcccagcagaaagccatggcggccatggacggccagagatgagactggacgccgccgggcgctgggctggagctgggggcagcccagggttgtggggacacaggagggccagggaggggggagccggggagggcagggggtttcccgaagatcgcactggaagattttataaaagaatttttgtgggtcggggggacagtaaacttcctgggccacgtgggtccttcaggagtttttcaggcaagtttttcctctgtttttaatatataactataatatatatgaatagataaatataactaatgtgcgtgagaatgggcctggcacacctggggtgctcgggggtagggctgccatgctgcagtcactgggcagccacatagcagctgcaggtcccaggagggcctgaggtcaaagctgtggaaggccctcttggtatcagggctctctccccatggcctcttccccacctctgattgctggttgtggccccatagctcatcacccctgtctcctgctgaatgtgcagggctgatgtggcactgaggagctgactttggtcaaaggccaggctctgcccagcaggggacttgactgccctgggcgccctgcccctcccgctgcgtgtccaggtccaaagtggagagcctgcctttgggtttagttcccgaatcagaatcccatctcaccagggcgaaattttaatttaaaaacttaaaaagagacttttctaacttcaaaaaaaaaaggaaaataaaactatgtctaaaagtaaacaaaaaaaggggggggcgaataaatatatccttggggggccatgttggtgcacccgcggttttgtgtaaagggtggcccataagggggcagtataaagcaaggaagggcggggttaaaaacggtgagggaaaagcgatgggggtcttgtgaaagacacgatttgggtgagataatgggaccaccagaggtattagctggatataaattatgttggcacgcttggggatgtgttacaataagn

SEQ ID NO: 301403 - DNA, 1736 bp, Homo sapiens
  misc_feature (1736)..(1736): n is a, c, g, or t
ggcggagcggcgccccggccaatcagcggcagtccccgaacgttgggccggcccagccccgccccgcgctgttgtttgtggtgtcggccgggccgcgggagtcgaaccacaacattcgccgggcgggcggcggcggagcgggcggcggagcggcggcagcagcggtgagcgcgagccccggagccccgggcggccggcctcccgcgcccgcgcagccccgcgtctgcgtccggccggagacgccgggccccgcgccgcgccgcgccatgtcggtgaacatggacgagctgcggcaccaggtcatgatcaaccagttcgtgctggccgcgggctgcgcggccgaccaggcgaagcagctgctgcaggcggcccactggcagttcgagaccgcgctgagcacgttcttccaagaaaccaacattcccaacagccaccaccaccaccagatgatgtgcactcccagcaacacccctgccacgccgcccaacttccccgatgcgctggccatgttctccaagctccgcgcctccgagggcctgcagagcagcaacagccccatgacagccgcagcctgctccccacctgcaaacttcagccccttctgggcctcgtccccgcccagccaccaggcgccctggatcccgccctcctcccccaccaccttccaccacctccaccgcccacagcccacgtggcccccaggagcacagcaggggggcgcccagcagaaagccatggcggccatggacggccagagatgagactggacgccgccgggcgctgggctggagctgggggcagcccagggttgtggggacacaggagggccagggaggggggagccggggagggcagggggtttcccgaagatcgcactggaagattttataaaagaatttttgtgggtcggggggacagtaaacttcctgggccacgtgggtccttcaggagtttttcaggcaagtttttcctctgtttttaatatataactataatatatatgaatagataaatataactaatgtgcgtgagaatgggcctggcacacctggggtgctcgggggtagggctgccatgctgcagagctgatggagtgatgttgtgggcacaaggcatctgtcagctgcctcctttaacagccatgccttctggaatctggaagaggacaccactcctgcagtcactgggcagccacatagcagctgcaggtcccaggagggcctgaggtcaaagctgtggaaggccctcttggtatcagggctctctccccatggcctcttccccacctctgattgctggttgtggccccatagctcatcacccctgtctcctgctgaatgtgcagggctgatgtggcactgaggagctgcctttgggtttagttcccgaatcagaatcccatctcaccagggcgaaattttaatttaaaaacttaaaaagagacttttctaacttcaaaaaaaaaaggaaaataaaactatgtctaaaagtaaacaaaaaaaggggggggcgaataaatatatccttggggggccatgttggtgcacccgcggttttgtgtaaagggtggcccataagggggcagtataaagcaaggaagggcggggttaaaaacggtgagggaaaagcgatgggggtcttgtgaaagacacgatttgggtgagataatgggaccaccagaggtattagctggatataaattatgttggcacgcttggggatgtgttacaataagn

SEQ ID NO: 301404 - DNA, 1644 bp, Homo sapiens
  misc_feature (1644)..(1644): n is a, c, g, or t
ggcggagcggcgccccggccaatcagcggcagtccccgaacgttgggccggcccagccccgccccgcgctgttgtttgtggtgtcggccgggccgcgggagtcgaaccacaacattcgccgggcgggcggcggcggagcgggcggcggagcggcggcagcagcggtgagcgcgagccccggagccccgggcggccggcctcccgcgcccgcgcagccccgcgtctgcgtccggccggagacgccgggccccgcgccgcgccgcgccatgtcggtgaacatggacgagctgcggcaccaggtcatgatcaaccagttcgtgctggccgcgggctgcgcggccgaccaggcgaagcagctgctgcaggcggcccactggcagttcgagaccgcgctgagcacgttcttccaagaaaccaacattcccaacagccaccaccaccaccagatgatgtgcactcccagcaacacccctgccacgccgcccaacttccccgatgcgctggccatgttctccaagctccgcgcctccgagggcctgcagagcagcaacagccccatgacagccgcagcctgctccccacctgcaaacttcagccccttctgggcctcgtccccgcccagccaccaggcgccctggatcccgccctcctcccccaccaccttccaccacctccaccgcccacagcccacgtggcccccaggagcacagcaggggggcgcccagcagaaagccatggcggccatggacggccagagatgagactggacgccgccgggcgctgggctggagctgggggcagcccagggttgtggggacacaggagggccagggaggggggagccggggagggcagggggtttcccgaagatcgcactggaagattttataaaagaatttttgtgggtcggggggacagtaaacttcctgggccacgtgggtccttcaggagtttttcaggcaagtttttcctctgtttttaatatataactataatatatatgaatagataaatataactaatgtgcgtgagaatgggcctggcacacctggggtgctcgggggtagggctgccatgctgcagagctgatggagtgatgttgtgggcacaaggcatctgtcagctgcctcctttaacagccatgccttctggaagggctgatgtggcactgaggagctgactttggtcaaaggccaggctctgcccagcaggggacttgactgccctgggcgccctgcccctcccgctgcgtgtccaggtccaaagtggagagcctgcctttgggtttagttcccgaatcagaatcccatctcaccagggcgaaattttaatttaaaaacttaaaaagagacttttctaacttcaaaaaaaaaaggaaaataaaactatgtctaaaagtaaacaaaaaaaggggggggcgaataaatatatccttggggggccatgttggtgcacccgcggttttgtgtaaagggtggcccataagggggcagtataaagcaaggaagggcggggttaaaaacggtgagggaaaagcgatgggggtcttgtgaaagacacgatttgggtgagataatgggaccaccagaggtattagctggatataaattatgttggcacgcttggggatgtgttacaataagn

SEQ ID NO: 301405 - DNA, 1152 bp, Homo sapiens
  misc_feature (1141)..(1141): n is a, c, g, or t
  misc_feature (1146)..(1146): n is a, c, g, or t
ggcggagcggcgccccggccaatcagcggcagtccccgaacgttgggccggcccagccccgccccgcgctgttgtttgtggtgtcggccgggccgcgggagtcgaaccacaacattcgccgggcgggcggcggcggagcgggcggcggagcggcggcagcagcggtgagcgcgagccccggagccccgggcggccggcctcccgcgcccgcgcagccccgcgtctgcgtccggccggagacgccgggccccgcgccgcgccgcgccatgtcggtgaacatggacgagctgcggcaccaggtcatgatcaaccagttcgtgctggccgcgggctgcgcggccgaccaggcgaagcagctgctgcaggcggcccactggcagttcgagaccgcgctgagcacgttcttccaagaaaccaacattcccaacagccaccaccaccaccagatgatgtgcactcccagcaacacccctgccacgccgcccaacttccccgatgcgctggccatgttctccaagctccgcgcctccgagggcctgcagagcagcaacagccccatgacagccgcagcctgctccccacctgcaaacttcagccccttctgggcctcgtccccgcccagccaccaggcgccctggatcccgccctcctcccccaccaccttccaccacctccaccgcccacagcccacgtggcccccaggagcacagcaggggggcgcccagcagaaagccatggcggccatggacggccagagatgagactggacgccgccgggcgctgggctggagctgggggcagcccagggttgtggggacacaggagggccagggaggggggagccggggagggcagggggtttcccgaagatcgcactggaagattttataaaagaatttttgtgggtcggggggacagtaaacttcctgggccacgtgggtccttcaggagtttttcaggcaagtttttcctctgtttttaatatataactataatatatatgaatagataaatataactaatgtgcgtgagaatgggcctggcacacctggggtgctcgggggtagggctgccatgctgcagagctgatggagtgatgttgtgggcaggggggggggggggggggggggggctttaacanccatnccttct

SEQ ID NO: 301406 - DNA, 950 bp, Homo sapiens
ggcggagcggcgccccggccaatcagcggcagtccccgaacgttgggccggcccagccccgccccgcgctgttgtttgtggtgtcggccgggccgcgggagtcgaaccacaacattcgccgggcgggcggcggcggagcgggcggcggagcggcggcagcagcggtgagcgcgagccccggagccccgggcggccggcctcccgcgcccgcgcagccccgcgtctgcgtccggccggagacgccgggccccgcgccgcgccgcgccatgtcggtgaacatggacgagctgcggcaccaggtcatgatcaaccagttcgtgctggccgcgggctgcgcggccgaccaggcgaagcagctgctgcaggcggcccactggcagttcgagaccgcgctgagcacgttcttccaagaaaccaacattcccaacagccaccaccaccaccagatgatgtgcactcccagcaacacccctgccacgccgcccaacttccccgatgcgctggccatgttctccaagctccgcgcctccgagggcctgcagagcagcaacagccccatgacagccgcagcctgctccccacctgcaaacttcagccccttctgggcctcgtccccgcccagccaccaggcgccctggatcccgccctcctcccccaccaccttccaccacctccaccgcccacagcccacgtggcccccaggagcacagcaggggggcgcccagcagaaagccatggcggccatggacggccagagatgagactggacgccgccgggcgctgggctggagctgggggcagcccagggttgtggggacacaggagggccagggaggggggagccggggagggcagggggtttcccgaagatcgcactggaagattttataaaagaatttttgtgggtcggggggacagtaaacttcctgggccacgtgggtccttcagga

SEQ ID NO: 301407 - DNA, 751 bp, Homo sapiens
  misc_feature (5)..(5): n is a, c, g, or t
  misc_feature (8)..(8): n is a, c, g, or t
agcgngcntgcgtagccggcgggctggcagtgagactgactgcgtcggggttgagactgggtggatgaggctcaccccggcggggagaagggacgaggaggggcggacagcggaaggtccgggagtgtccgccataaagtcgtttgaggtgaccgttgcgtaattttttaacttctagtcatggcgaatgatcgcaggagagcacagactggaccctgctacgatctctcttggagtggatcagactgatgatcaccaacaaccaactcattcccggataaggaagaagagagtgtcacctacttcagtgtggtttcaaccctacttctgcatcttaaagacacttgtacaacgttggacactgtgcaggatgatgccacttcatcttggatgctaatctgccatgttgacttctgattaaccccaggcccaggaatgcctcaagatttctactttacttactgttgcttgtgtaagccaagacaaccttgatgttatcataaacatgtacttacctaagtcctgtcctttggcaaattatgggctatgagacacagcattcttgcctttccctgaggggtcaatttcagcgatcctacacattccttctgaagcacttatgctctttctatatggtatgtaagctctcggtctggggagtaacagtgcagagatctacctgtcttgttgccacatgtttctaaactttccaataaatcaccttctactgacaaaaaaaaaaagacttcct

SEQ ID NO: 301408 - DNA, 1544 bp, Homo sapiens
  misc_feature (5)..(5): n is a, c, g, or t
  misc_feature (8)..(8): n is a, c, g, or t
agcgngcntgcgtagccggcgggctggcagtgagactgactgcgtcggggttgagactgggtggatgaggctcaccccggcggggagaagggacgaggaggggcggacagcggaaggtccgggagtgtccgccataaagtcgtttgaggtgaccgttgcgtaattgtgagtctgtgagagaagatgtgaagtatggcctcgtcccggtcatctgggcgtgcgggtcccgggttttgatcgcgcgtttgtgtagttttaacttctagtcatggcgaatgatcgcaggagagcacagactggaccctgctacgatctctcttggagtggatcagactgatgatcaccaacaaccaactcattcccggataaggaagaagagagtgtcacctacttcagtgtggtttcaaccctacttctgcatcttaaagacactgtatggtttcagcagtagtgcccctgttcattagtccccctgatgttttcattcctcatctcatctttttcttagcagcattcaatgaatccttcattctagaaacactctatatctttggttttcatgagaccattctcaccttgttttgtcctgtgacttttttgaaaaaaacaaaaacaaaaaaccctttttttctttttaaattctggtaaaaaacacaatgaaaatttgctatcttaaccatgttgaaatgtgcagttagtaaagtacattcacattgtggtgcaagccatcactaccatccatcactagaacccttttcatcttgcagatctgaaactctacccattaaacaacttcccatcttcccatccccacagctcctagcaaccaacattctactttctctatcagtttgactactctaggtacctcatatgagtagaatcatacagcatttatccttctctgcctggcttatttcacttgtataatgtcctcaaggttcattcatgttgtagcatgcatcagaacttcctccccttttaaaggctggataatatttcatggtatgtttagatcacattctgtttatccattcatccatcagtgaacacttgtgctccttccaactttgggctgttgggtgtcctgccactgttgctcctagtgctcaatctcgtttattccctcctaatcaagtgtacaacgttggacactgtgcaggatgatgccacttcatcttggatgctaatctgccatgttgacttctgattaaccccaggcccaggaatgcctcaagatttctactttacttactgttgcttgtgtaagccaagacaaccttgatgttatcataaacatgtacttacctaagtcctgtcctttggcaaattatgggctatgagacacagcattcttgcctttccctgaggggtcaatttcagcgatcctacacattccttctgaagcacttatgctctttctatatggtatgtaagctctcggtctggggagtaacagtgcagagatctacctgtcttgttgccacatgtttctaaactttccaataaatcaccttctactgacaaaaaaaaaaagacttcct

SEQ ID NO: 301409 - DNA, 1412 bp, Homo sapiens
  misc_feature (14)..(14): n is a, c, g, or t
cgtcgaccggctgntagaagacgacagaagggggtgagtctgtgagagaagatgtgaagtatggcctcgtcccggtcatctgggcgtgcgggtcccgggttttgatcgcgcgtttgtgtagttttaacttctagtcatggcgaatgatcgcaggagagcacagactggaccctgctacgatctctcttggagtggatcagactgatgatcaccaacaaccaactcattcccggataaggaagaagagagtgtcacctacttcagtgtggtttcaaccctacttctgcatcttaaagacactgtatggtttcagcagtagtgcccctgttcattagtccccctgatgttttcattcctcatctcatctttttcttagcagcattcaatgaatccttcattctagaaacactctatatctttggttttcatgagaccattctcaccttgttttgtcctgtgacttttttgaaaaaaacaaaaacaaaaaaccctttttttctttttaaattctggtaaaaaacacaatgaaaatttgctatcttaaccatgttgaaatgtgcagttagtaaagtacattcacattgtggtgcaagccatcactaccatccatcactagaacccttttcatcttgcagatctgaaactctacccattaaacaacttcccatcttcccatccccacagctcctagcaaccaacattctactttctctatcagtttgactactctaggtacctcatatgagtagaatcatacagcatttatccttctctgcctggcttatttcacttgtataatgtcctcaaggttcattcatgttgtagcatgcatcagaacttcctccccttttaaaggctggataatatttcatggtatgtttagatcacattctgtttatccattcatccatcagtgaacacttgtgctccttccaactttgggctgttgggtgtcctgccactgttgctcctagtgctcaatctcgtttattccctcctaatcaagtgtacaacgttggacactgtgcaggatgatgccacttcatcttggatgctaatctgccatgttgacttctgattaaccccaggcccaggaatgcctcaagatttctactttacttactgttgcttgtgtaagccaagacaaccttgatgttatcataaacatgtacttacctaagtcctgtcctttggcaaattatgggctatgagacacagcattcttgcctttccctgaggggtcaatttcagcgatcctacacattccttctgaagcacttatgctctttctatatggtatgtaagctctcggtctggggagtaacagtgcagagatctacctgtcttgttgccacatgtttctaaactttccaataaatcaccttctactgacaaaaaaaaaaagacttcct

SEQ ID NO: 301410 - DNA, 1456 bp, Homo sapiens
  misc_feature (5)..(5): n is a, c, g, or t
  misc_feature (8)..(8): n is a, c, g, or t
agcgngcntgcgtagccggcgggctggcagtgagactgactgcgtcggggttgagactgggtggatgaggctcaccccggcggggagaagggacgaggaggggcggacagcggaaggtccgggagtgtccgccataaagtcgtttgaggtgaccgttgcgtaattttttaacttctagtcatggcgaatgatcgcaggagagcacagactggaccctgctacgatctctcttggagtggatcagactgatgatcaccaacaaccaactcattcccggataaggaagaagagagtgtcacctacttcagtgtggtttcaaccctacttctgcatcttaaagacactgtatggtttcagcagtagtgcccctgttcattagtccccctgatgttttcattcctcatctcatctttttcttagcagcattcaatgaatccttcattctagaaacactctatatctttggttttcatgagaccattctcaccttgttttgtcctgtgacttttttgaaaaaaacaaaaacaaaaaaccctttttttctttttaaattctggtaaaaaacacaatgaaaatttgctatcttaaccatgttgaaatgtgcagttagtaaagtacattcacattgtggtgcaagccatcactaccatccatcactagaacccttttcatcttgcagatctgaaactctacccattaaacaacttcccatcttcccatccccacagctcctagcaaccaacattctactttctctatcagtttgactactctaggtacctcatatgagtagaatcatacagcatttatccttctctgcctggcttatttcacttgtataatgtcctcaaggttcattcatgttgtagcatgcatcagaacttcctccccttttaaaggctggataatatttcatggtatgtttagatcacattctgtttatccattcatccatcagtgaacacttgtgctccttccaactttgggctgttgggtgtcctgccactgttgctcctagtgctcaatctcgtttattccctcctaatcaagtgtacaacgttggacactgtgcaggatgatgccacttcatcttggatgctaatctgccatgttgacttctgattaaccccaggcccaggaatgcctcaagatttctactttacttactgttgcttgtgtaagccaagacaaccttgatgttatcataaacatgtacttacctaagtcctgtcctttggcaaattatgggctatgagacacagcattcttgcctttccctgaggggtcaatttcagcgatcctacacattccttctgaagcacttatgctctttctatatggtatgtaagctctcggtctggggagtaacagtgcagagatctacctgtcttgttgccacatgtttctaaactttccaataaatcaccttctactgacaaaaaaaaaaagacttcct

SEQ ID NO: 301411 - DNA, 1656 bp, Homo sapiens
aaacaccacatattgtgatctcatttgtatgaaatgtcccgagtaggcaaatagataaacagaggaattagattggtggttgccaaggactggcgagagaagagaataaaaagtaatggctagtgggtaggatttctttagtcgttaaagtattctcaactattgtggtggctgttgcataactctgattataacaaggccactgaattttatgctgggattacaggcgtgagcaccatgcctggtggacattccattattaactcaccttggccttggaattaatgacttggagaagacctgaatggggaggggagagcagtagaagcatgagcctttctgactgtctacatgttcttgcccagttttaacttctagtcatggcgaatgatcgcaggagagcacagactggaccctgctacgatctctcttggagtggatcagactgatgatcaccaacaaccaactcattcccggataaggaagaagagagtgtcacctacttcagtgtggtttcaaccctacttctgcatcttaaagacactgtatggtttcagcagtagtgcccctgttcattagtccccctgatgttttcattcctcatctcatctttttcttagcagcattcaatgaatccttcattctagaaacactctatatctttggttttcatgagaccattctcaccttgttttgtcctgtgacttttttgaaaaaaacaaaaacaaaaaaccctttttttctttttaaattctggtaaaaaacacaatgaaaatttgctatcttaaccatgttgaaatgtgcagttagtaaagtacattcacattgtggtgcaagccatcactaccatccatcactagaacccttttcatcttgcagatctgaaactctacccattaaacaacttcccatcttcccatccccacagctcctagcaaccaacattctactttctctatcagtttgactactctaggtacctcatatgagtagaatcatacagcatttatccttctctgcctggcttatttcacttgtataatgtcctcaaggttcattcatgttgtagcatgcatcagaacttcctccccttttaaaggctggataatatttcatggtatgtttagatcacattctgtttatccattcatccatcagtgaacacttgtgctccttccaactttgggctgttgggtgtcctgccactgttgctcctagtgctcaatctcgtttattccctcctaatcaagtgtacaacgttggacactgtgcaggatgatgccacttcatcttggatgctaatctgccatgttgacttctgattaaccccaggcccaggaatgcctcaagatttctactttacttactgttgcttgtgtaagccaagacaaccttgatgttatcataaacatgtacttacctaagtcctgtcctttggcaaattatgggctatgagacacagcattcttgcctttccctgaggggtcaatttcagcgatcctacacattccttctgaagcacttatgctctttctatatggtatgtaagctctcggtctggggagtaacagtgcagagatctacctgtcttgttgccacatgtttctaaactttccaataaatcaccttctactgacaaaaaaaaaaagacttcct

SEQ ID NO: 301412 - DNA, 1346 bp, Homo sapiens
ggcgacatggccaaacgtaccaagaaagtcgggttttgatcgcgcgtttgtgtagttttaacttctagtcatggcgaatgatcgcaggagagcacagactggaccctgctacgatctctcttggagtggatcagactgatgatcaccaacaaccaactcattcccggataaggaagaagagagtgtcacctacttcagtgtggtttcaaccctacttctgcatcttaaagacactgtatggtttcagcagtagtgcccctgttcattagtccccctgatgttttcattcctcatctcatctttttcttagcagcattcaatgaatccttcattctagaaacactctatatctttggttttcatgagaccattctcaccttgttttgtcctgtgacttttttgaaaaaaacaaaaacaaaaaaccctttttttctttttaaattctggtaaaaaacacaatgaaaatttgctatcttaaccatgttgaaatgtgcagttagtaaagtacattcacattgtggtgcaagccatcactaccatccatcactagaacccttttcatcttgcagatctgaaactctacccattaaacaacttcccatcttcccatccccacagctcctagcaaccaacattctactttctctatcagtttgactactctaggtacctcatatgagtagaatcatacagcatttatccttctctgcctggcttatttcacttgtataatgtcctcaaggttcattcatgttgtagcatgcatcagaacttcctccccttttaaaggctggataatatttcatggtatgtttagatcacattctgtttatccattcatccatcagtgaacacttgtgctccttccaactttgggctgttgggtgtcctgccactgttgctcctagtgctcaatctcgtttattccctcctaatcaagtgtacaacgttggacactgtgcaggatgatgccacttcatcttggatgctaatctgccatgttgacttctgattaaccccaggcccaggaatgcctcaagatttctactttacttactgttgcttgtgtaagccaagacaaccttgatgttatcataaacatgtacttacctaagtcctgtcctttggcaaattatgggctatgagacacagcattcttgcctttccctgaggggtcaatttcagcgatcctacacattccttctgaagcacttatgctctttctatatggtatgtaagctctcggtctggggagtaacagtgcagagatctacctgtcttgttgccacatgtttctaaactttccaataaatcaccttctactgacaaaaaaaaaaagacttcct

SEQ ID NO: 301413 - DNA, 1573 bp, Homo sapiens
  misc_feature (5)..(5): n is a, c, g, or t
  misc_feature (8)..(8): n is a, c, g, or t
agcgngcntgcgtagccggcgggctggcagtgagactgactgcgtcggggttgagactgggtggatgaggctcaccccggcggggagaagggacgaggaggggcggacagcggaaggtccgggagtgtccgccataaagtcgtttgaggtgaccgttgcgtaattgtgagtctgtgagagaagatgtgaagtatggcctcgtcccggtcatctgggcgtgcgggtcccgggttttgatcgcgcgtttgtgtagttttaacttctagtcatggcgaatgatcgcaggagagcacagactggaccctgctacgatctctcttggagtggatcagactgatgatcaccaacaaccaactcattcccggataaggaagaagagagtgtcacctacttcagtgtggtttcaaccctacttctgcatcttaaagacactgtatggtttcagcagtagtgcccctgttcattagtccccctgatgttttcattcctcatctcatctttttcttagcagcattcaatgaatccttcattctagaaacactctatatctttggttttcatgagaccattctcaccttgttttgtcctgtgacttttttgaaaaaaacaaaaacaaaaaaccctttttttctttttaaattctggtaaaaaacacaatgaaaatttgctatcttaaccatgttgaaatgtgcagttagtaaagtacattcacattgtggtgcaagccatcactaccatccatcactagaacccttttcatcttgcagatctgaaactctacccattaaacaacttcccatcttcccatccccacagctcctagcaaccaacattctactttctctatcagtttgactactctaggtacctcatatgagtagaatcatacagcatttatccttctctgcctggcttatttcacttgtataatgtcctcaaggttcattcatgttgtagcatgcatcagaacttcctccccttttaaaggctggataatatttcatggtatgtttagatcacattctgtttatccattcatccatcagtgaacacttgtgctccttccaactttgggctgttgggtgtcctgccactgttgctcctagtgctcaatctcgtttattccctcctaatcaagtgtacaacgttggacactgtgcaggatgatgccacttcatcttggatgctaatctgccatgttgacttctgattaaccccaggcccaggaatgcctcaagatttctactttacttactgttgcttgtgtaagccaagacaaccttgatgttatcataaacatgtacttacctaagtcctgtcctttggcaaattatgggctatgagacacagcattcttgcctttccctgaggggtcaatttcagcgatcctacacattccttctgaagcacttatgctctttctatatggtatgtaagctctcggtctggggagtaacagtgcagagatctacctgtcttgttgccacatgtttctaaactttccaataaatcaccttgccagatgcggccgaaggagaacgtatacaggtcgacgtgaaccgatccaaaacat

SEQ ID NO: 301414 - DNA, 839 bp, Homo sapiens
  misc_feature (5)..(5): n is a, c, g, or t
  misc_feature (8)..(8): n is a, c, g, or t
agcgngcntgcgtagccggcgggctggcagtgagactgactgcgtcggggttgagactgggtggatgaggctcaccccggcggggagaagggacgaggaggggcggacagcggaaggtccgggagtgtccgccataaagtcgtttgaggtgaccgttgcgtaattgtgagtctgtgagagaagatgtgaagtatggcctcgtcccggtcatctgggcgtgcgggtcccgggttttgatcgcgcgtttgtgtagttttaacttctagtcatggcgaatgatcgcaggagagcacagactggaccctgctacgatctctcttggagtggatcagactgatgatcaccaacaaccaactcattcccggataaggaagaagagagtgtcacctacttcagtgtggtttcaaccctacttctgcatcttaaagacacttgtacaacgttggacactgtgcaggatgatgccacttcatcttggatgctaatctgccatgttgacttctgattaaccccaggcccaggaatgcctcaagatttctactttacttactgttgcttgtgtaagccaagacaaccttgatgttatcataaacatgtacttacctaagtcctgtcctttggcaaattatgggctatgagacacagcattcttgcctttccctgaggggtcaatttcagcgatcctacacattccttctgaagcacttatgctctttctatatggtatgtaagctctcggtctggggagtaacagtgcagagatctacctgtcttgttgccacatgtttctaaactttccaataaatcaccttctactgacaaaaaaaaaaagacttcct

SEQ ID NO: 301415 - DNA, 589 bp, Homo sapiens
ggcgactatagaggacccgcccaggtagaaaggctggataatatttcatggtatgtttagatcacattctgtttatccattcatccatcagtgaacacttgtgctccttccaactttgggctgttgggtgtcctgccactgttgctcctagtgctcaatctcgtttattccctcctaatcaagtgtacaacgttggacactgtgcaggatgatgccacttcatcttggatgctaatctgccatgttgacttctgattaaccccaggcccaggaatgcctcaagatttctactttacttactgttgcttgtgtaagccaagacaaccttgatgttatcataaacatgtacttacctaagtcctgtcctttggcaaattatgggctatgagacacagcattcttgcctttccctgaggggtcaatttcagcgatcctacacattccttctgaagcacttatgctctttctatatggtatgtaagctctcggtctggggagtaacagtgcagagatctacctgtcttgttgccacatgtttctaaactttccaataaatcaccttctactgacaaaaaaaaaaagacttcct

SEQ ID NO: 301416 - DNA, 605 bp, Homo sapiens
tcttctccgaaaggcaacatctgcgcacctgctagcatctttattaaggctggataatatttcatggtatgtttagatcacattctgtttatccattcatccatcagtgaacacttgtgctccttccaactttgggctgttgggtgtcctgccactgttgctcctagtgctcaatctcgtttattccctcctaatcaagtgtacaacgttggacactgtgcaggatgatgccacttcatcttggatgctaatctgccatgttgacttctgattaaccccaggcccaggaatgcctcaagatttctactttacttactgttgcttgtgtaagccaagacaaccttgatgttatcataaacatgtacttacctaagtcctgtcctttggcaaattatgggctatgagacacagcattcttgcctttccctgaggggtcaatttcagcgatcctacacattccttctgaagcacttatgctctttctatatggtatgtaagctctcggtctggggagtaacagtgcagagatctacctgtcttgttgccacatgtttctaaactttccaataaatcaccttctactgacaaaaaaaaaaagacttcct

SEQ ID NO: 301417 - DNA, 4107 bp, Homo sapiens
gcagcttgcggtggcgaaggcggctttagtggcagcatgaagcgcaccccgactgccgaggaacgagagcgcgaagctaagaaactgaggcttcttgaagagcttgaagacacttggctcccttatctgacccccaaagatgatgaattctatcagcagtggcagctgaaatatcctaaactaattctccgagaagccagcagtgtatctgaggagctccataaagaggttcaagaagcctttctcacactgcacaagcatggctgcttatttcgggacctggttaggatccaaggcaaagatctgctcactccggtatctcgcatcctcattggtaatccaggctgcacctacaagtacctgaacaccaggctctttacggtcccctggccagtgaaagggtctaatataaaacacaccgaggctgaaatagccgctgcttgtgagaccttcctcaagctcaatgactacctgcagatagaaaccatccaggctttggaagaacttgctgccaaagagaaggctaatgaggatgctgtgccattgtgtatgtctgcagatttccccagggttgggatgggttcatcctacaacggacaagatgaagtggacattaagagcagagcagcatacaacgtaactttgctgaatttcatggatcctcagaaaatgccatacctgaaagaggaaccttattttggcatggggaaaatggcagtgagctggcatcatgatgaaaatctggtggacaggtcagcggtggcagtgtacagttatagctgtgaaggccctgaagaggaaagtgaggatgactctcatctcgaaggcagggatcctgatatttggcatgttggttttaagatctcatgggacatagagacacctggtttggcgataccccttcaccaaggagactgctatttcatgcttgatgatctcaatgccacccaccaacactgtgttttggccggttcacaacctcggtttagttccacccaccgagtggcagagtgctcaacaggaaccttggattatattttacaacgctgtcagttggctctgcagaatgtctgtgacgatgtggacaatgatgatgtctctttgaaatcctttgagcctgcagttttgaaacaaggagaagaaattcataatgaggtcgagtttgagtggctgaggcagttttggtttcaaggcaatcgatacagaaagtgcactgactggtggtgtcaacccatggctcaactggaagcactgtggaagaagatggagggtgtgacaaatgctgtgcttcatgaagttaaaagagaggggctccccgtggaacaaaggaatgaaatcttgactgccatccttgcctcgctcactgcacgccagaacctgaggagagaatggcatgccaggtgccagtcacgaattgcccgaacattacctgctgatcagaagccagaatgtcggccatactgggaaaaggatgatgcttcgatgcctctgccgtttgacctcacagacatcgtttcagaactcagaggtcagcttctggaagcaaaaccctagaaggagcacaagtctcaggcggaggagaaaaagagatcggcttttctcctccaacgttgtcatgggcttaagcaagagcagtggagacttctcttggcccctagattgtagcacccgggtcccaatccaaaacagctaggaaatggtgcccatgaagttttaaatgttttaaaatgaccctgtgttatagtctgatttggtgttaaacaggaccttcttcccccaaaattgttcagattataaaatgtgagccattcagcccccaaggtccagggcaggcgacaggaacgagcccagcgtgtgacaaagcctaacctactttcctctttcccaagctttttcagagactctggagtggacccagccctctggggaaagacagaacttagagacatcccagttactcaccacacccatagtgctgtccaatatggtagccactagctagctgtggctacttcaatttaaattcagttttaattttaattaaaaatgcagctcttcagtcgccctggccacatttcaagtgcttaacagcctcatgtggctagtgactgctgtattggacggtacagatatggaacattttcatcatcgaagaaagtcctattggacaacacttctataaaaagtttgagagcaggaattctcatttccattcgtctgtagcttctatccccaaaggcaaagaaactaaaagagaaatgactcattgaagattggcctctttcctttctctaagacaaacctaagtaaaagcctgagctttgagtcctatgctcagcacacgggaaggagatgttaataattaaaataaagttgatatcctgtctttagggagttcccttgatctcttgaaagagacacagccccatttacattatttcgtggatttcaccagcatagtatagtttttttctgtaagtccctcattcttatgtaataacaggtggaactgaggtttgaagaacctcagtggcccatcctgatgacattggagactcaaagagacaagagagagtagggtttaaaacctgagctttaagactcccactagcttcgtgtcctttggcatgttaacgtgcctcagtttcctcatctgtataatggggatatatgaaaggcaccagtcctaaggtgaacattaagtgagatgattctagttacagacttagaacaatttccagcacatagttaaatatccaggaaattctggtactgttatgtgtgggtgagctgacctggatgtagatgttttcctctctcttgctgacccctccgccagttttgtcttgtgatgccattaacacatctctccctttctgacctggctcctgcccattggtgtcccaagaaatcgtgagaatagttagccccccgtctccccagcctgttgctttctcgtgtagttgttcacagtagttgagaagttgaagagcttttgcctattgaaggtgcactgagaataaactctttcctgccaccagaattgcagtggttcacggcctgcactcattcccatgaatgcagttaatagccacagaaatgtcacattaagcaaagcagccagggtctcatcgtgttgagactcgagtctctcagaccttggattcattccctggtgtctttgagcctcagtttcctcattggtaaaagagaagtgaagcagtgtctcacagggtcattacagagattaaatgaaataaatgaaataacatagaccaggagggcgtggtgtttaaaagtcacagatggggcaccctcgggccatccagcccagtgttttctttagcccctatgatgttcattttttgttatatcccattaggtgcccatatttaaaaattgggagatttcacataaaattaaaaggtctgcattttcttttttcttttcttttttttttttttgagacacagtctcactctgtcaccaggctagagtgcagtggcacgatctcagctcactgcaacctctgcctcccaggttcaagtaattctcctgcctcagcctcccaagtagctgggactacaggcacgtgccaccacgcccagctaatttttgtatttttagcagagatggggtttcaccacattggccaggatggtctcgatctcaacctcgtgatccacccacctcggtctcccaaagcgctgggattacaggcgtgagccaccgcgccaagccaaggtctgcatttttctttagaactcagaacacccaatagtcctaggcccccatcctcgcatggcagcaagctaaataagcatcttcccactgcgagttggggcatgacccagcctatggtttgccatactccctctttttctccgttttttcattaattgtgaacctgacctgcatcaccctttcatgtcagtgctctccaaacctgcttgcttgcacccctctagtcgaaatattttgtgcttaccccaatatatgtgtgtgactattgaactctattcgtagactgcttgtactaatgtcatttgcatcataaaatattcatatccaataaacatattaaaaggatgagataagaaaccgaga

SEQ ID NO: 301418 - DNA, 4124 bp, Homo sapiens
gcagcttgcggtggcgaaggcggctttagtggcagcatgaagcgcaccccgactgccgaggaacgagagcgcgaagctaagaaactgaggcttcttgaagagcttgaagacacttggctcccttatctgacccccaaagatgatgaattctatcagcagtggcagctgaaatatcctaaactaattctccgagaagccagcagtgtatctgaggagctccataaagaggttcaagaagcctttctcacactgcacaagcatggctgcttatttcgggacctggttaggatccaaggcaaagatctgctcactccggtatctcgcatcctcattggtaatccaggctgcacctacaagtacctgaacaccaggctctttacggtcccctggccagtgaaagggtctaatataaaacacaccgaggctgaaatagccgctgcttgtgagaccttcctcaagctcaatgactacctgcagatagaaaccatccaggctttggaagaacttgctgccaaagagaaggctaatgaggatgctgtgccattgtgtatgtctgcagatttccccagggttgggatgggttcatcctacaacggacaagatgaagtggacattaagagcagagcagcatacaacgtaactttgctgaatttcatggatcctcagaaaatgccatacctgaaagaggaaccttattttggcatggggaaaatggcagtgagctggcatcatgatgaaaatctggtggacaggtcagcggtggcagtgtacagttatagctgtgaaggccctgaagaggaaagtgaggatgactctcatctcgaaggcagggatcctgatatttggcatgttggttttaagatctcatgggacatagagacacctggtttggcgataccccttcaccaaggagactgctatttcatgcttgatgatctcaatgccacccaccaacactgtgttttggccggttcacaacctcggtttagttccacccaccgagtggcagagtgctcaacaggaaccttggattatattttacaacgctgtcagttggctctgcagaatgtctgtgacgatgtggacaatgatgatgtctctttgaaatcctttgagcctgcagttttgaaacaaggagaagaaattcataatgaggtcgagtttgagtggctgaggcagttttggtttcaaggcaatcgatacagaaagtgcactgactggtggtgtcaacccatggctcaactggaagcactgtggaagaagatggagggtgtgacaaatgctgtgcttcatgaagttaaaagagaggggctccccgtggaacaaaggaatgaaatcttgactgccatccttgcctcgctcactgcacgccagaacctgaggagagaatggcatgccagggcagagaggagtgttggtgccagtcacgaattgcccgaacattacctgctgatcagaagccagaatgtcggccatactgggaaaaggatgatgcttcgatgcctctgccgtttgacctcacagacatcgtttcagaactcagaggtcagcttctggaagcaaaaccctagaaggagcacaagtctcaggcggaggagaaaaagagatcggcttttctcctccaacgttgtcatgggcttaagcaagagcagtggagacttctcttggcccctagattgtagcacccgggtcccaatccaaaacagctaggaaatggtgcccatgaagttttaaatgttttaaaatgaccctgtgttatagtctgatttggtgttaaacaggaccttcttcccccaaaattgttcagattataaaatgtgagccattcagcccccaaggtccagggcaggcgacaggaacgagcccagcgtgtgacaaagcctaacctactttcctctttcccaagctttttcagagactctggagtggacccagccctctggggaaagacagaacttagagacatcccagttactcaccacacccatagtgctgtccaatatggtagccactagctagctgtggctacttcaatttaaattcagttttaattttaattaaaaatgcagctcttcagtcgccctggccacatttcaagtgcttaacagcctcatgtggctagtgactgctgtattggacggtacagatatggaacattttcatcatcgaagaaagtcctattggacaacacttctataaaaagtttgagagcaggaattctcatttccattcgtctgtagcttctatccccaaaggcaaagaaactaaaagagaaatgactcattgaagattggcctctttcctttctctaagacaaacctaagtaaaagcctgagctttgagtcctatgctcagcacacgggaaggagatgttaataattaaaataaagttgatatcctgtctttagggagttcccttgatctcttgaaagagacacagccccatttacattatttcgtggatttcaccagcatagtatagtttttttctgtaagtccctcattcttatgtaataacaggtggaactgaggtttgaagaacctcagtggcccatcctgatgacattggagactcaaagagacaagagagagtagggtttaaaacctgagctttaagactcccactagcttcgtgtcctttggcatgttaacgtgcctcagtttcctcatctgtataatggggatatatgaaaggcaccagtcctaaggtgaacattaagtgagatgattctagttacagacttagaacaatttccagcacatagttaaatatccaggaaattctggtactgttatgtgtgggtgagctgacctggatgtagatgttttcctctctcttgctgacccctccgccagttttgtcttgtgatgccattaacacatctctccctttctgacctggctcctgcccattggtgtcccaagaaatcgtgagaatagttagccccccgtctccccagcctgttgctttctcgtgtagttgttcacagtagttgagaagttgaagagcttttgcctattgaaggtgcactgagaataaactctttcctgccaccagaattgcagtggttcacggcctgcactcattcccatgaatgcagttaatagccacagaaatgtcacattaagcaaagcagccagggtctcatcgtgttgagactcgagtctctcagaccttggattcattccctggtgtctttgagcctcagtttcctcattggtaaaagagaagtgaagcagtgtctcacagggtcattacagagattaaatgaaataaatgaaataacatagaccaggagggcgtggtgtttaaaagtcacagatggggcaccctcgggccatccagcccagtgttttctttagcccctatgatgttcattttttgttatatcccattaggtgcccatatttaaaaattgggagatttcacataaaattaaaaggtctgcattttcttttttcttttcttttttttttttttgagacacagtctcactctgtcaccaggctagagtgcagtggcacgatctcagctcactgcaacctctgcctcccaggttcaagtaattctcctgcctcagcctcccaagtagctgggactacaggcacgtgccaccacgcccagctaatttttgtatttttagcagagatggggtttcaccacattggccaggatggtctcgatctcaacctcgtgatccacccacctcggtctcccaaagcgctgggattacaggcgtgagccaccgcgccaagccaaggtctgcatttttctttagaactcagaacacccaatagtcctaggcccccatcctcgcatggcagcaagctaaataagcatcttcccactgcgagttggggcatgacccagcctatggtttgccatactccctctttttctccgttttttcattaattgtgaacctgacctgcatcaccctttcatgtcagtgctctccaaacctgcttgcttgcacccctctagtcgaaatattttgtgcttaccccaatatatgtgtgtgactattgaactctattcgtagactgcttgtactaatgtcatttgcatcataaaatattcatatccaataaacatattaaaaggatgagataagaaaccgaga

SEQ ID NO: 301419 - DNA, 3065 bp, Homo sapiens
ggctggtccggtccggaatcttagcggataagctgtggtggctccacgtttctttagcgggcaggttttatatatataggttaagattatcaccagctcctcctggcccatgggtcgagtttgagtggctgaggcagttttggtttcaaggcaatcgatacagaaagtgcactgactggtggtgtcaacccatggctcaactggaagcactgtggaagaagatggagggtgtgacaaatgctgtgcttcatgaagttaaaagagaggggctccccgtggaacaaaggaatgaaatcttgactgccatccttgcctcgctcactgcacgccagaacctgaggagagaatggcatgccaggtgccagtcacgaattgcccgaacattacctgctgatcagaagccagaatgtcggccatactgggaaaaggatgatgcttcgatgcctctgccgtttgacctcacagacatcgtttcagaactcagaggtcagcttctggaagcaaaaccctagaaggagcacaagtctcaggcggaggagaaaaagagatcggcttttctcctccaacgttgtcatgggcttaagcaagagcagtggagacttctcttggcccctagattgtagcacccgggtcccaatccaaaacagctaggaaatggtgcccatgaagttttaaatgttttaaaatgaccctgtgttatagtctgatttggtgttaaacaggaccttcttcccccaaaattgttcagattataaaatgtgagccattcagcccccaaggtccagggcaggcgacaggaacgagcccagcgtgtgacaaagcctaacctactttcctctttcccaagctttttcagagactctggagtggacccagccctctggggaaagacagaacttagagacatcccagttactcaccacacccatagtgctgtccaatatggtagccactagctagctgtggctacttcaatttaaattcagttttaattttaattaaaaatgcagctcttcagtcgccctggccacatttcaagtgcttaacagcctcatgtggctagtgactgctgtattggacggtacagatatggaacattttcatcatcgaagaaagtcctattggacaacacttctataaaaagtttgagagcaggaattctcatttccattcgtctgtagcttctatccccaaaggcaaagaaactaaaagagaaatgactcattgaagattggcctctttcctttctctaagacaaacctaagtaaaagcctgagctttgagtcctatgctcagcacacgggaaggagatgttaataattaaaataaagttgatatcctgtctttagggagttcccttgatctcttgaaagagacacagccccatttacattatttcgtggatttcaccagcatagtatagtttttttctgtaagtccctcattcttatgtaataacaggtggaactgaggtttgaagaacctcagtggcccatcctgatgacattggagactcaaagagacaagagagagtagggtttaaaacctgagctttaagactcccactagcttcgtgtcctttggcatgttaacgtgcctcagtttcctcatctgtataatggggatatatgaaaggcaccagtcctaaggtgaacattaagtgagatgattctagttacagacttagaacaatttccagcacatagttaaatatccaggaaattctggtactgttatgtgtgggtgagctgacctggatgtagatgttttcctctctcttgctgacccctccgccagttttgtcttgtgatgccattaacacatctctccctttctgacctggctcctgcccattggtgtcccaagaaatcgtgagaatagttagccccccgtctccccagcctgttgctttctcgtgtagttgttcacagtagttgagaagttgaagagcttttgcctattgaaggtgcactgagaataaactctttcctgccaccagaattgcagtggttcacggcctgcactcattcccatgaatgcagttaatagccacagaaatgtcacattaagcaaagcagccagggtctcatcgtgttgagactcgagtctctcagaccttggattcattccctggtgtctttgagcctcagtttcctcattggtaaaagagaagtgaagcagtgtctcacagggtcattacagagattaaatgaaataaatgaaataacatagaccaggagggcgtggtgtttaaaagtcacagatggggcaccctcgggccatccagcccagtgttttctttagcccctatgatgttcattttttgttatatcccattaggtgcccatatttaaaaattgggagatttcacataaaattaaaaggtctgcattttcttttttcttttcttttttttttttttgagacacagtctcactctgtcaccaggctagagtgcagtggcacgatctcagctcactgcaacctctgcctcccaggttcaagtaattctcctgcctcagcctcccaagtagctgggactacaggcacgtgccaccacgcccagctaatttttgtatttttagcagagatggggtttcaccacattggccaggatggtctcgatctcaacctcgtgatccacccacctcggtctcccaaagcgctgggattacaggcgtgagccaccgcgccaagccaaggtctgcatttttctttagaactcagaacacccaatagtcctaggcccccatcctcgcatggcagcaagctaaataagcatcttcccactgcgagttggggcatgacccagcctatggtttgccatactccctctttttctccgttttttcattaattgtgaacctgacctgcatcaccctttcatgtcagtgctctccaaacctgcttgcttgcacccctctagtcgaaatattttgtgcttaccccaatatatgtgtgtgactattgaactctattcgtagactgcttgtactaatgtcatttgcatcataaaatattcatatccaataaacatattaaaaggatgagataagaaaccgaga

SEQ ID NO: 301420 - DNA, 3041 bp, Homo sapiens
caaagtagggtgacctagtctgaaggacaggcgcagaacagtcagtggaacagccagagatagcagcgagagaggtgagaagaggaccaggagtaggtggtagaatggagtggaggaaagtcagcgaatgtaatagtgtcgaaccctgcagggaagttaagaagtggccataccgttgcattcatcatgggaagaatttcagtagaatgacaaatgctgtgcttcatgaagttaaaagagaggggctccccgtggaacaaaggaatgaaatcttgactgccatccttgcctcgctcactgcacgccagaacctgaggagagaatggcatgccaggtgccagtcacgaattgcccgaacattacctgctgatcagaagccagaatgtcggccatactgggaaaaggatgatgcttcgatgcctctgccgtttgacctcacagacatcgtttcagaactcagaggtcagcttctggaagcaaaaccctagaaggagcacaagtctcaggcggaggagaaaaagagatcggcttttctcctccaacgttgtcatgggcttaagcaagagcagtggagacttctcttggcccctagattgtagcacccgggtcccaatccaaaacagctaggaaatggtgcccatgaagttttaaatgttttaaaatgaccctgtgttatagtctgatttggtgttaaacaggaccttcttcccccaaaattgttcagattataaaatgtgagccattcagcccccaaggtccagggcaggcgacaggaacgagcccagcgtgtgacaaagcctaacctactttcctctttcccaagctttttcagagactctggagtggacccagccctctggggaaagacagaacttagagacatcccagttactcaccacacccatagtgctgtccaatatggtagccactagctagctgtggctacttcaatttaaattcagttttaattttaattaaaaatgcagctcttcagtcgccctggccacatttcaagtgcttaacagcctcatgtggctagtgactgctgtattggacggtacagatatggaacattttcatcatcgaagaaagtcctattggacaacacttctataaaaagtttgagagcaggaattctcatttccattcgtctgtagcttctatccccaaaggcaaagaaactaaaagagaaatgactcattgaagattggcctctttcctttctctaagacaaacctaagtaaaagcctgagctttgagtcctatgctcagcacacgggaaggagatgttaataattaaaataaagttgatatcctgtctttagggagttcccttgatctcttgaaagagacacagccccatttacattatttcgtggatttcaccagcatagtatagtttttttctgtaagtccctcattcttatgtaataacaggtggaactgaggtttgaagaacctcagtggcccatcctgatgacattggagactcaaagagacaagagagagtagggtttaaaacctgagctttaagactcccactagcttcgtgtcctttggcatgttaacgtgcctcagtttcctcatctgtataatggggatatatgaaaggcaccagtcctaaggtgaacattaagtgagatgattctagttacagacttagaacaatttccagcacatagttaaatatccaggaaattctggtactgttatgtgtgggtgagctgacctggatgtagatgttttcctctctcttgctgacccctccgccagttttgtcttgtgatgccattaacacatctctccctttctgacctggctcctgcccattggtgtcccaagaaatcgtgagaatagttagccccccgtctccccagcctgttgctttctcgtgtagttgttcacagtagttgagaagttgaagagcttttgcctattgaaggtgcactgagaataaactctttcctgccaccagaattgcagtggttcacggcctgcactcattcccatgaatgcagttaatagccacagaaatgtcacattaagcaaagcagccagggtctcatcgtgttgagactcgagtctctcagaccttggattcattccctggtgtctttgagcctcagtttcctcattggtaaaagagaagtgaagcagtgtctcacagggtcattacagagattaaatgaaataaatgaaataacatagaccaggagggcgtggtgtttaaaagtcacagatggggcaccctcgggccatccagcccagtgttttctttagcccctatgatgttcattttttgttatatcccattaggtgcccatatttaaaaattgggagatttcacataaaattaaaaggtctgcattttcttttttcttttcttttttttttttttgagacacagtctcactctgtcaccaggctagagtgcagtggcacgatctcagctcactgcaacctctgcctcccaggttcaagtaattctcctgcctcagcctcccaagtagctgggactacaggcacgtgccaccacgcccagctaatttttgtatttttagcagagatggggtttcaccacattggccaggatggtctcgatctcaacctcgtgatccacccacctcggtctcccaaagcgctgggattacaggcgtgagccaccgcgccaagccaaggtctgcatttttctttagaactcagaacacccaatagtcctaggcccccatcctcgcatggcagcaagctaaataagcatcttcccactgcgagttggggcatgacccagcctatggtttgccatactccctctttttctccgttttttcattaattgtgaacctgacctgcatcaccctttcatgtcagtgctctccaaacctgcttgcttgcacccctctagtcgaaatattttgtgcttaccccaatatatgtgtgtgactattgaactctattcgtagactgcttgtactaatgtcatttgcatcataaaatattcatatccaataaacatattaaaaggatgagataagaaaccgaga

SEQ ID NO: 301421 - DNA, 2214 bp, Homo sapiens
gtgcggcctcgggtggtaaatcaggcgaccggggcaagagatttagatgaatccagtgtggtactctcgcacacccatagtgctgtccaatatggtagccactagctagctgtggctacttcaatttaaattcagttttaattttaattaaaaatgcagctcttcagtcgccctggccacatttcaagtgcttaacagcctcatgtggctagtgactgctgtattggacggtacagatatggaacattttcatcatcgaagaaagtcctattggacaacacttctataaaaagtttgagagcaggaattctcatttccattcgtctgtagcttctatccccaaaggcaaagaaactaaaagagaaatgactcattgaagattggcctctttcctttctctaagacaaacctaagtaaaagcctgagctttgagtcctatgctcagcacacgggaaggagatgttaataattaaaataaagttgatatcctgtctttagggagttcccttgatctcttgaaagagacacagccccatttacattatttcgtggatttcaccagcatagtatagtttttttctgtaagtccctcattcttatgtaataacaggtggaactgaggtttgaagaacctcagtggcccatcctgatgacattggagactcaaagagacaagagagagtagggtttaaaacctgagctttaagactcccactagcttcgtgtcctttggcatgttaacgtgcctcagtttcctcatctgtataatggggatatatgaaaggcaccagtcctaaggtgaacattaagtgagatgattctagttacagacttagaacaatttccagcacatagttaaatatccaggaaattctggtactgttatgtgtgggtgagctgacctggatgtagatgttttcctctctcttgctgacccctccgccagttttgtcttgtgatgccattaacacatctctccctttctgacctggctcctgcccattggtgtcccaagaaatcgtgagaatagttagccccccgtctccccagcctgttgctttctcgtgtagttgttcacagtagttgagaagttgaagagcttttgcctattgaaggtgcactgagaataaactctttcctgccaccagaattgcagtggttcacggcctgcactcattcccatgaatgcagttaatagccacagaaatgtcacattaagcaaagcagccagggtctcatcgtgttgagactcgagtctctcagaccttggattcattccctggtgtctttgagcctcagtttcctcattggtaaaagagaagtgaagcagtgtctcacagggtcattacagagattaaatgaaataaatgaaataacatagaccaggagggcgtggtgtttaaaagtcacagatggggcaccctcgggccatccagcccagtgttttctttagcccctatgatgttcattttttgttatatcccattaggtgcccatatttaaaaattgggagatttcacataaaattaaaaggtctgcattttcttttttcttttcttttttttttttttgagacacagtctcactctgtcaccaggctagagtgcagtggcacgatctcagctcactgcaacctctgcctcccaggttcaagtaattctcctgcctcagcctcccaagtagctgggactacaggcacgtgccaccacgcccagctaatttttgtatttttagcagagatggggtttcaccacattggccaggatggtctcgatctcaacctcgtgatccacccacctcggtctcccaaagcgctgggattacaggcgtgagccaccgcgccaagccaaggtctgcatttttctttagaactcagaacacccaatagtcctaggcccccatcctcgcatggcagcaagctaaataagcatcttcccactgcgagttggggcatgacccagcctatggtttgccatactccctctttttctccgttttttcattaattgtgaacctgacctgcatcaccctttcatgtcagtgctctccaaacctgcttgcttgcacccctctagtcgaaatattttgtgcttaccccaatatatgtgtgtgactattgaactctattcgtagactgcttgtactaatgtcatttgcatcataaaatattcatatccaataaacatattaaaaggatgagataagaaaccgaga

SEQ ID NO: 301422 - DNA, 1698 bp, Homo sapiens
ggtagtaactcctccagggccacatgcaacccctaagtctgaggcacaactattacttctgtcggtggatgctatacaagcatatttaaggctatattcactgaggtttgaagaacctcagtggcccatcctgatgacattggagactcaaagagacaagagagagtagggtttaaaacctgagctttaagactcccactagcttcgtgtcctttggcatgttaacgtgcctcagtttcctcatctgtataatggggatatatgaaaggcaccagtcctaaggtgaacattaagtgagatgattctagttacagacttagaacaatttccagcacatagttaaatatccaggaaattctggtactgttatgtgtgggtgagctgacctggatgtagatgttttcctctctcttgctgacccctccgccagttttgtcttgtgatgccattaacacatctctccctttctgacctggctcctgcccattggtgtcccaagaaatcgtgagaatagttagccccccgtctccccagcctgttgctttctcgtgtagttgttcacagtagttgagaagttgaagagcttttgcctattgaaggtgcactgagaataaactctttcctgccaccagaattgcagtggttcacggcctgcactcattcccatgaatgcagttaatagccacagaaatgtcacattaagcaaagcagccagggtctcatcgtgttgagactcgagtctctcagaccttggattcattccctggtgtctttgagcctcagtttcctcattggtaaaagagaagtgaagcagtgtctcacagggtcattacagagattaaatgaaataaatgaaataacatagaccaggagggcgtggtgtttaaaagtcacagatggggcaccctcgggccatccagcccagtgttttctttagcccctatgatgttcattttttgttatatcccattaggtgcccatatttaaaaattgggagatttcacataaaattaaaaggtctgcattttcttttttcttttcttttttttttttttgagacacagtctcactctgtcaccaggctagagtgcagtggcacgatctcagctcactgcaacctctgcctcccaggttcaagtaattctcctgcctcagcctcccaagtagctgggactacaggcacgtgccaccacgcccagctaatttttgtatttttagcagagatggggtttcaccacattggccaggatggtctcgatctcaacctcgtgatccacccacctcggtctcccaaagcgctgggattacaggcgtgagccaccgcgccaagccaaggtctgcatttttctttagaactcagaacacccaatagtcctaggcccccatcctcgcatggcagcaagctaaataagcatcttcccactgcgagttggggcatgacccagcctatggtttgccatactccctctttttctccgttttttcattaattgtgaacctgacctgcatcaccctttcatgtcagtgctctccaaacctgcttgcttgcacccctctagtcgaaatattttgtgcttaccccaatatatgtgtgtgactattgaactctattcgtagactgcttgtactaatgtcatttgcatcataaaatattcatatccaataaacatattaaaaggatgagataagaaaccgaga

SEQ ID NO: 301423 - DNA, 1695 bp, Homo sapiens
gcagcttgcggtggcgaaggcggctttagtggcagcatgaagcgcaccccgactgccgaggaacgagagcgcgaagctaagaaactgaggcttcttgaagagcttgaagacacttggctcccttatctgacccccaaagatgatgaattctatcagcagtggcagctgaaatatcctaaactaattctccgagaagccagcagtgtatctgaggagctccataaagaggttcaagaagcctttctcacactgcacaagcatggctgcttatttcgggacctggttaggatccaaggcaaagatctgctcactccggtatctcgcatcctcattggtaatccaggctgcacctacaagtacctgaacaccaggctctttacggtcccctggccagtgaaagggtctaatataaaacacaccgaggctgaaatagccgctgcttgtgagaccttcctcaagctcaatgactacctgcagatagaaaccatccaggctttggaagaacttgctgccaaagagaaggctaatgaggatgctgtgccattgtgtatgtctgcagatttccccagggttgggatgggttcatcctacaacggacaagatgaagtggacattaagagcagagcagcatacaacgtaactttgctgaatttcatggatcctcagaaaatgccatacctgaaagaggaaccttattttggcatggggaaaatggcagtgagctggcatcatgatgaaaatctggtggacaggtcagcggtggcagtgtacagttatagctgtgaaggccctgaagaggaaagtgaggatgactctcatctcgaaggcagggatcctgatatttggcatgttggttttaagatctcatgggacatagagacacctggtttggcgataccccttcaccaaggagactgctatttcatgcttggtaatctttggaaaatcaaaattatattgaaactctagtgtctaaatttagattataggatttatattttgagtatgtcttatgaaataaacttttggagtattttatattaagagcgaaacttctttataagaacatgtaactaggtttttcttttttgagatattgctgattttttgagatggagcttcacttccggcttgagcaacagagcaagactcagtctcaaaaaaaaaaaaaaaaaaaaagtaaataagtactctaaaaattcagctatattccatatatttaataacatcttgtgtgttcttttctgattaaaaaagcaatatgtgcttatttgagagaaaagaaactctggaaaaaagagtctgaaatgaagaaagaatataaaaatcaggttaatgcctgatttaatatatttcttttcagtctttttctgtatatgtatgtctggaattatagtagtaatatgaataaaaccagatttactgggaattaatgacaaacattcttttaatcttctcagcaatcctgagaaacaaatattagctatactgcaaaagaggaaattgaggttaaatttatgtagttacttaaccgtggctgcacagctagtaagaagcatggattgtatcttgtcatcttatcccactcggggtctgacatcccatgtcaggccagccctccttctcccgtagggatgccctcctcaccctactcagcgctgaacgctgctcagggttcctgtgccttcttcttcc

SEQ ID NO: 301424 - DNA, 603 bp, Homo sapiens
tttaggtgagggaaactcattttaaaatgaaaacctcaaaggtaaaataaattcgtctaatatgttcactaaatatttttacttattttgacaagaaatgcatttttgtttcttacctgtattataggatattcaccttgcgaaacgtttttatgacatggcagctgaagccagcccagatgcacaagttccagtcttcctagccctctgcaaattgggcgtcgtctatttcttgcagtacatacgggaaacaaacgtaagtggtccgtacctcttttcattaaaatataaatgatggaaggtctgtcctggaggtttgtttttcaaaagttgagaagcacagggaagagtggtcctgcaggtatcgggtgtgttcccttctcctcagctcaggtacccgaggaccttatcaggggagggataaatgcaggcataaagcagctactgcagtttttaggtagcgtttgacacttcctgacgctaaagcatttttcatggaggcagatgttttctggtttagggaaaactgagactaactcatggcagtttgaaacagtatttaattcagtaaacattaaatcagatgactcaaaccagtccctt

SEQ ID NO: 301425 - DNA, 7901 bp, Homo sapiens
  misc_feature (7013)..(7013): n is a, c, g, or t
aagagcagcggcgaggcggcggtggtggctgagtccgtggtggcagaggcgaaggcgacagctctaggggttggcaccggccccgagaggaggatgcgggtccggatagggctgacgctgctgctgtgtgcggtgctgctgagcttggcctcggcgtcctcggatgaagaaggcagccaggatgaatccttagattccaagactactttgacatcagatgagtcagtaaaggaccatactactgcaggcagagtagttgctggtcaaatatttcttgattcagaagaatctgaattagaatcctctattcaagaagaggaagacagcctcaagagccaagagggggaaagtgtcacagaagatatcagctttctagagtctccaaatccagaaaacaaggactatgaagagccaaagaaagtacggaaaccagctttgaccgccattgaaggcacagcacatggggagccctgccacttcccttttcttttcctagataaggagtatgatgaatgtacatcagatgggagggaagatggcagactgtggtgtgctacaacctatgactacaaagcagatgaaaagtggggcttttgtgaaactgaagaagaggctgctaagagacggcagatgcaggaagcagaaatgatgtatcaaactggaatgaaaatccttaatggaagcaataagaaaagccaaaaaagagaagcatatcggtatctccaaaaggcagcaagcatgaaccataccaaagccctggagagagtgtcatatgctcttttatttggtgattacttgccacagaatatccaggcagcgagagagatgtttgagaagctgactgaggaaggctctcccaagggacagactgctcttggctttctgtatgcctctggacttggtgttaattcaagtcaggcaaaggctcttgtatattatacatttggagctcttgggggcaatctaatagcccacatggttttgggttacagatactgggctggcatcggcgtcctccagagttgtgaatctgccctgactcactatcgtcttgttgccaatcatgttgctagtgatatctcgctaacaggaggctcagtagtacagagaatacggctgcctgatgaagtggaaaatccaggaatgaacagtggaatgctagaagaagatttgattcaatattaccagttcctagctgaaaaaggtgatgtacaagcacaggttggtcttggacaactgcacctgcacggagggcgtggagtagaacagaatcatcagagagcatttgactacttcaatttagcagcaaatgctggcaattcacatgccatggcctttttgggaaagatgtattcggaaggaagtgacattgtacctcagagtaatgagacagctctccactactttaagaaagctgctgacatgggcaacccagttggacagagtgggcttggaatggcctacctctatgggagaggagttcaagttaattatgatctagcccttaagtatttccagaaagctgctgaacaaggctgggtggatgggcagctacagcttggttccatgtactataatggcattggagtcaagagagattataaacaggccttgaagtattttaatttagcttctcagggaggccatatcttggctttctataacctagctcagatgcatgccagtggcaccggcgtgatgcgatcatgtcacactgcagtggagttgtttaagaatgtatgtgaacgaggccgttggtctgaaaggcttatgactgcctataacagctataaagatggcgattacaatgctgcagtgatccagtacctcctcctggctgaacagggctatgaagtggcacaaagcaatgcagcctttattcttgatcagagagaagcaagcattgtaggtgagaatgaaacttatcccagagctttgctacattggaacagggccgcctctcaaggctatactgtggctagaattaagctcggagactaccatttctatgggtttggcaccgatgtagattatgaaactgcatttattcattaccgtctggcttctgagcagcaacacagtgcacaagctatgtttaatctgggatatatgcatgagaaaggactgggcattaaacaggatattcaccttgcgaaacgtttttatgacatggcagctgaagccagcccagatgcacaagttccagtcttcctagccctctgcaaattgggcgtcgtctatttcttgcagtacatacgggaaacaaacattcgagatatgttcacccaacttgatatggaccagcttttgggacctgagtgggacctttacctcatgaccatcattgcgctgctgttgggaacagtcatagcttacaggcaaaggcagcaccaagacatgcctgcacccaggcctccagggccacggccagctccaccccagcaggaggggccaccagagcagcagccaccacagtaataggcactgggtccagccttgatcagtgacagcgaaggaagttatctgctgggaacacttgcatttgatttaggaccttggatcagtggtcacctcccagaagaggcacggcacaaggaagcattgaattcctaaagctgcttagaatctgatgcctttattttcagggataagtaactcttacctaaactgagctgaatgtttgtttcagtgccatatggaataacaactttcagtggcttttttttttcttttctggaaacatatgtgagacactcagagtaatgtctactgtatccagctatctttcttggatccttttggtcattatttcagtgtgcataagttcttaatgtcaaccatctttaaggtattgtgcatcgacactaaaaactgatcagtgtaaaaaggaaaacccagttgcaagtttaaacgtgttcgaaagtctgaaaatagaacttgccttttaagttaaaaaaaaaaaaagctatcttgaaaatgttttggaactgcgataactgagaaactcttaccagtccacatgcaattagacatattcagcatatttgttattttaaaagggagggttgggaggtttcttattggtgattgtcacacggtataccatactcctctccttcaaagaatgaaaggccttgttaaggagttttttgtgagctttacttctttggaatggaatatacttatgcaaaaccttgtgaactgactccttgcactaacgcgagtttgccccacctactctgtaatttgcttgtttgttttgaatatacagagccttgatccagaagccagaggatggactaagtgggagaaattagaaaacaaaacgaactctggttggggtactacgatcacagacacagacatacttttcctaaagttgaagcatttgttcccaggatttattttactttgcatttctttttgcacaaagaacacatcaccttcctgaattctttaaatatgaaatatcattgccagggtatggcttacagtgactactattataatactaaaactcagagaatcaaagatggattaaactcagtggttgatgaaagccaaaacctgtttgtactgttctatactattcaggtatctttttatttctgatagttttatattataatagaaagccagccactgcttagctatcatagtcaccattttctcactgttaacattaggaaaatcaaggctactatgcttcaggattgtctggttaaatagtatgggaaaaaaactgaagagtttcacataattacacacgtgaaataattaaagcttaaactgaatttgtatttcattttattgtcagatggtggtgttcaccagcctgtatcttgtctgagactgcattcgtatctgagcaggttttctatgcctactgatgtcagtatgtttatactaaccttcatgcttttttcccagaatccctcatctgccagaaaacttgaaaagtttattgcttgtagagttgtactgctttgatttttgaagttggggtagtagttagaactagatttaactagtctataatgaacatgaaggcttttatatatgaagttgtatacctttttgtgtttagagaattatgggaaacctggtaagcaaaactttcctcccagataattgcttccaaattcgaagagttagtcaccaagagagccatatgtatgaaagcgtatctgtgaaaggtaggaaacttaccccccctaagtgtaatgttgctttaggcaactcttgtaaatagtgagacttgtttggtctcttacatgtagagatttgagtgcagttggtacagtactttggtgtctccaccactgtcccttctccccgcttcaaaataagtgtaatccacggtagcagccacacttccttcagaaggaactgttataatttatttaaaagttgaaaaaccacccaagatgactaccaactttcacttttttcttctgccatccaccctcatttttcctttagcaagatttttatatctaactttccttccctccattgagtacgtgctttgagaaaacatttcttaaaacagtgtgtgccacctaaggctggatgggaaagtgcagtcttgttgttcatataaaaacacacttcttattagtttaccacttgcctttttctattgttaatgttctgaatttccttttcttggcttgtttctacttcattttaccctgggtcacttgctgccagcagtttgtgaatggtgtctttcaaataacttagttcttatggcttcacttaaagactgtctcaaaaatactttgctctcttcttcttttttgttcatgggacatggtacctaagcaaataggagttgggtttggtttttctcctaaaataatgctcaatacttacctaatcaaatggcatccatttgaataaaatgacaataactaaagctagttaatgtcagtgacattaaactaactccaggattcaggagttttaatgttagaatttagatttaacagatagagtgtggcttcatttgtccatggtagcccatctctcctaagaccttttctagtctgtcttcctgccttcgaacttgatgacagtaaaaccctgtttagtattctcttgtgcatttggtttgttggttagccgactgtcttgaaactattcattttgcttctagttttattttacagaggtagcattggtgggtttttttttttttttctgtctctgtgtttgaagtttcagtttctgttttctaggtaaggcttatttttgattagcagtcaatggcaaagaaaaagtaaatcaaagatgacttcttttcaaaatgtattgtttagcacttaactcagatgaatttataaattattaatcttgatactaaggatttgttacttttttgcatattaggttaatttttaccttacatgtgagagtcttaccactaagccattctgtctctgtactgttgggaagttttggaaacccctgccagtgatctggtgatgatctgatgatttatttaaagagccgttgatgcctccaggaaacttaagtattttattaatatatatataggaatttttttttattttgctttgtctttctctcccttcttttatcctcatgttcattcttcaaaccagtgttttggaagtatgcatgcaggcctataaatgaaaaacacaattctttatgtgtatagcatgtgtattaatgtctaactacatacgcaaaaacttcctttacagaggttcggactaacatttcacatgcacatttcaaaacaagatgtgtcatgaaaacagcccctttacctgccaagacaagcagggctatatttcagtgacagctgatatttgttttgaaagtgaatctcataatatatatatgtattacacattattatgactagaagtatgtaagaaatgatcagaacaaaagaaaatttctattttcatgcaaatatttttcatcagtcatcactctcaaatataaattaaaatataacactcctgaatgcctgaggcacgatctggattttaaatgtgtggtattcattgaaaagaagctctccacccacttggtatttcaagaaaatttaaaacgatcccaaggaaagatgatttgtatgttaaagtgactgcacaagtaaaagtccaatgttgtgtgcatgaaaaggattccttggttatgtgcagggaatcatctcacatgctgtttttcctatttggtttgagaaacaggctgacactattctctttgattagaaaataaactcataaaactcataatgttgatataatcaagatgtaaccactataaatatgtagaagaggaagttttaaaagaccttaagctggcattgtgaaggaacaccatggtagactctttttgtaaatgtattttgtatttaatgaaatgcagtataaaggttggtgaagtgtaatataattgtgtaaacaaatcctgttaatagagagatgtacagaatcgttttgtactgtatcttgaaacttgtgaaataaagattccacctctggttatcctgtatgctgtaatataccacaaccaagcacctttccagacagactttttttaagctgaatgattcaattttttaatgttttttggaaattcagaagcttctgaaaacattcacttgtggcaatttgaatttatctttcattttaaactcctgaaattcagatttttacaagtccaatattgccctagggagaacatgaatttgctaagaaatgttatcttttaaatctctgatatctttgtcttgaagcagccttgatatgtagtaagcgtgattcactttagcctgattataatattatttatctaaagtttgtttatgcattgccttgtcccaggaattttttaagaggacttgcagagacacgtaccacacagtaacatttagactaaatatgctctgagtaaaggagaaatgaaaaaatattaaatcaagagtgaacatgtacacaaagtgcaattggaagtgggctacaaatttngcccccagcttcccagcaggcaactcaaagaggtaactgaggtaaaatgttccagctcagaagcattggatcttggataaaaagcctacatgatgcaaactgtggcaactgagatgtcagatctcaagatctcaaattgtacttgtgggagcacagtcagtgaccccagatgaccttgactgacctaaaagttgtgggggaagtcggatgtcagagccttaacaccagcaggtgaccatccaacctggggcaatgcctgcctgttcaccacttagcctctttctggcaagtcattagaatgtcctccatcttcattggctgcaacttgatgagctacagcctctttcctaacttcctttatgatgctagtttaggttggttataccagcttggaagtatgcttagattaagttacagcagatacacaaattagatgcaagtaaaaaaaatcagaatttctgtagtagaaactacgaaaaataaaaaggaaagtttttactttttgggtatttttttacgaataagaaaaagtgagcgttaatcagttcaaaaggaggtactgctgtgtaatgggctttgtacgttccttctcatgtcacttacgtcactacttcgccatcaaattgaacaagcttttaattagatcctgaaaattcactatgctagtagtttattggtagtattatattttgagtagaactctgattttccctagaggccaaattctttttatctgggttaatttcttttaaacataacaatgttaatgctgaattgtatattaaatcccatttctaaaaaccacacaattttttctcatgtaagttgagtggaatgtggttagttaactgaatttggaatgttcatataaataatttgttgctgctc

SEQ ID NO: 301426 - DNA, 726 bp, Homo sapiens
ttacaaagtttgtgtactatgaattaaaattctttgttttatgtaagcatgtcaatgggaggagaaaaaagtttgatctgttttaaacatactttatttattggcagttctgcatttaacttttgtttaaggctatactgtggctagaattaagctcggagactaccatttctatgggtttggcaccgatgtagattatgaaactgcatttattcattaccgtctggcttctgagcagcaacacagtgcacaagctatgtttaatctgggatatatgcatgagaaaggactgggcattaaacaggatattcaccttgcgaaacgtttttatgacatggcagctgaagccagcccagatgcacaagttccagtcttcctagccctctgcaaattgggcgtcgtctatttcttgcagtacatacgggaaacaaacgtaagtggtccgtacctcttttcattaaaatataaatgatggaaggtctgtcctggaggtttgtttttctctcctcagctcaggtacccgaggaccttatcaggggagggataaatgcaggcataaagcagctactgcagtttttaggtagcgtttgacacttcctgacgctaaagcatttttcatggaggcagatgttttctggtttagggaaaactgagactaactcatggcagtttgaaacagtatttaattcagtaaacattaaatcagatgactcaaaccagtccctt

SEQ ID NO: 301427 - DNA, 6537 bp, Homo sapiens
aagagcagcggcgaggcggcggtggtggctgagtccgtggtggcagaggcgaaggcgacagctctaggggttggcaccggccccgagaggaggatgcgggtccggatagggctgacgctgctgctgtgtgcggtgctgctgagcttggcctcggcgtcctcggatgaagaaggcagccaggatgaatccttagattccaagactactttgacatcagatgagtcagtaaaggaccatactactgcaggcagagtagttgctggtcaaatatttcttgattcagaagaatctgaattagaatcctctattcaagaagaggaagacagcctcaagagccaagagggggaaagtgtcacagaagatatcagctttctagagtctccaaatccagaaaacaaggactatgaagagccaaagaaagtacggaaaccagctttgaccgccattgaaggcacagcacatggggagccctgccacttcccttttcttttcctagataaggagtatgatgaatgtacatcagatgggagggaagatggcagactgtggtgtgctacaacctatgactacaaagcagatgaaaagtggggcttttgtgaaactgaagaagaggctgctaagagacggcagatgcaggaagcagaaatgatgtatcaaactggaatgaaaatccttaatggaagcaataagaaaagccaaaaaagagaagcatatcggtatctccaaaaggcagcaagcatgaaccataccaaagccctggagagagtgtcatatgctcttttatttggtgattacttgccacagaatatccaggcagcgagagagatgtttgagaagctgactgaggaaggctctcccaagggacagactgctcttggctttctgtatgcctctggacttggtgttaattcaagtcaggcaaaggctcttgtatattatacatttggagctcttgggggcaatctaatagcccacatggttttgggttacagatactgggctggcatcggcgtcctccagagttgtgaatctgccctgactcactatcgtcttgttgccaatcatgttgctagtgatatctcgctaacaggaggctcagtagtacagagaatacggctgcctgatgaagtggaaaatccaggaatgaacagtggaatgctagaagaagatttgattcaatattaccagttcctagctgaaaaaggtgatgtacaagcacaggttggtcttggacaactgcacctgcacggagggcgtggagtagaacagaatcatcagagagcatttgactacttcaatttagcagcaaatgctggcaattcacatgccatggcctttttgggaaagatgtattcggaaggaagtgacattgtacctcagagtaatgagacagctctccactactttaagaaagctgctgacatgggcaacccagttggacagagtgggcttggaatggcctacctctatgggagaggagttcaagttaattatgatctagcccttaagtatttccagaaagctgctgaacaaggctgggtggatgggcagctacagcttggttccatgtactataatggcattggagtcaagagagattataaacaggccttgaagtattttaatttagcttctcagggaggccatatcttggctttctataacctagctcagatgcatgccagtggcaccggcgtgatgcgatcatgtcacactgcagtggagttgtttaagaatgtatgtgaacgaggccgttggtctgaaaggcttatgactgcctataacagctataaagatggcgattacaatgctgcagtgatccagtacctcctcctggctgaacagggctatgaagtggcacaaagcaatgcagcctttattcttgatcagagagaagcaagcattgtaggtgagaatgaaacttatcccagagctttgctacattggaacagggccgcctctcaaggctatactgtggctagaattaagctcggagactaccatttctatgggtttggcaccgatgtagattatgaaactgcatttattcattaccgtctggcttctgagcagcaacacagtgcacaagctatgtttaatctgggatatatgcatgagaaaggactgggcattaaacaggatattcaccttgcgaaacgtttttatgacatggcagctgaagccagcccagatgcacaagttccagtcttcctagccctctgcaaattgggcgtcgtctatttcttgcagtacatacgggaaacaaacattcgagatatgttcacccaacttgatatggaccagcttttgggacctgagtgggacctttacctcatgaccatcattgcgctgctgttgggaacagtcatagcttacaggcaaaggcagcaccaagacatgcctgcacccaggcctccagggccacggccagctccaccccagcaggaggggccaccagagcagcagccaccacagtaataggcactgggtccagccttgatcagtgacagcgaaggaagttatctgctgggaacacttgcatttgatttaggaccttggatcagtggtcacctcccagaagaggcacggcacaaggaagcattgaattcctaaagctgcttagaatctgatgcctttattttcagggataagtaactcttacctaaactgagctgaatgtttgtttcagtgccatatggaataacaactttcagtggcttttttttttcttttctggaaacatatgtgagacactcagagtaatgtctactgtatccagctatctttcttggatccttttggtcattatttcagtgtgcataagttcttaatgtcaaccatctttaaggtattgtgcatcgacactaaaaactgatcagtgtaaaaaggaaaacccagttgcaagtttaaacgtgttcgaaagtctgaaaatagaacttgccttttaagttaaaaaaaaaaaaagctatcttgaaaatgttttggaactgcgataactgagaaactcttaccagtccacatgcaattagacatattcagcatatttgttattttaaaagggagggttgggaggtttcttattggtgattgtcacacggtataccatactcctctccttcaaagaatgaaaggccttgttaaggagttttttgtgagctttacttctttggaatggaatatacttatgcaaaaccttgtgaactgactccttgcactaacgcgagtttgccccacctactctgtaatttgcttgtttgttttgaatatacagagccttgatccagaagccagaggatggactaagtgggagaaattagaaaacaaaacgaactctggttggggtactacgatcacagacacagacatacttttcctaaagttgaagcatttgttcccaggatttattttactttgcatttctttttgcacaaagaacacatcaccttcctgaattctttaaatatgaaatatcattgccagggtatggcttacagtgactactattataatactaaaactcagagaatcaaagatggattaaactcagtggttgatgaaagccaaaacctgtttgtactgttctatactattcaggtatctttttatttctgatagttttatattataatagaaagccagccactgcttagctatcatagtcaccattttctcactgttaacattaggaaaatcaaggctactatgcttcaggattgtctggttaaatagtatgggaaaaaaactgaagagtttcacataattacacacgtgaaataattaaagcttaaactgaatttgtatttcattttattgtcagatggtggtgttcaccagcctgtatcttgtctgagactgcattcgtatctgagcaggttttctatgcctactgatgtcagtatgtttatactaaccttcatgcttttttcccagaatccctcatctgccagaaaacttgaaaagtttattgcttgtagagttgtactgctttgatttttgaagttggggtagtagttagaactagatttaactagtctataatgaacatgaaggcttttatatatgaagttgtatacctttttgtgtttagagaattatgggaaacctggtaagcaaaactttcctcccagataattgcttccaaattcgaagagttagtcaccaagagagccatatgtatgaaagcgtatctgtgaaaggtaggaaacttaccccccctaagtgtaatgttgctttaggcaactcttgtaaatagtgagacttgtttggtctcttacatgtagagatttgagtgcagttggtacagtactttggtgtctccaccactgtcccttctccccgcttcaaaataagtgtaatccacggtagcagccacacttccttcagaaggaactgttataatttatttaaaagttgaaaaaccacccaagatgactaccaactttcacttttttcttctgccatccaccctcatttttcctttagcaagatttttatatctaactttccttccctccattgagtacgtgctttgagaaaacatttcttaaaacagtgtgtgccacctaaggctggatgggaaagtgcagtcttgttgttcatataaaaacacacttcttattagtttaccacttgcctttttctattgttaatgttctgaatttccttttcttggcttgtttctacttcattttaccctgggtcacttgctgccagcagtttgtgaatggtgtctttcaaataacttagttcttatggcttcacttaaagactgtctcaaaaatactttgctctcttcttcttttttgttcatgggacatggtacctaagcaaataggagttgggtttggtttttctcctaaaataatgctcaatacttacctaatcaaatggcatccatttgaataaaatgacaataactaaagctagttaatgtcagtgacattaaactaactccaggattcaggagttttaatgttagaatttagatttaacagatagagtgtggcttcatttgtccatggtagcccatctctcctaagaccttttctagtctgtcttcctgccttcgaacttgatgacagtaaaaccctgtttagtattctcttgtgcatttggtttgttggttagccgactgtcttgaaactattcattttgcttctagttttattttacagaggtagcattggtgggtttttttttttttttctgtctctgtgtttgaagtttcagtttctgttttctaggtaaggcttatttttgattagcagtcaatggcaaagaaaaagtaaatcaaagatgacttcttttcaaaatgtattgtttagcacttaactcagatgaatttataaattattaatcttgatactaaggatttgttacttttttgcatattaggttaatttttaccttacatgtgagagtcttaccactaagccattctgtctctgtactgttgggaagttttggaaacccctgccagtgatctggtgatgatctgatgatttatttaaagagccgttgatgcctccaggaaacttaagtattttattaatatatatataggaatttttttttattttgctttgtctttctctcccttcttttatcctcatgttcattcttcaaaccagtgttttggaagtatgcatgcaggcctataaatgaaaaacacaattctttatgtgtatagcatgtgtattaatgtctaactacatacgcaaaaacttcctttacagaggttcggactaacatttcacatgcacatttcaaaacaagatgtgtcatgaaaacagcccctttacctgccaagacaagcagggctatatttcagtgacagctgatatttgttttgaaagtgaatctcataatatatatatgtattacacattattatgactagaagtatgtaagaaatgatcagaacaaaagaaaatttctattttcatgcaaatatttttcatcagtcatcactctcaaatataaattaaaatataacactcctgaatgcctgaggcacgatctggattttaaatgtgtggtattcattgaaaagaagctctccacccacttggtatttcaagaaaatttaaaacgatcccaaggaaagatgatttgtatgttaaagtgactgcacaagtaaaagtccaatgttgtgtgcatgaaaaggattccttggttatgtgcagggaatcatctcacatgctgtttttcctatttggtttgagaaacaggctgacactattctctttgattagaaaataaactcataaaactcataatgttgatataatcaagatgtaaccactataaatatgtagaagaggaagttttaaaagaccttaagctggcattgtgaaggaacaccatggtagactctttttgtaaatgtattttgtatttaatgaaatgcagtataaaggttggtgaagtgtaatataattgtgtaaacaaatcctgttaatagagagatgtacagaatcgttttgtactgtatcttgaaacttgtgaaataaagattccacctctggttatcctgta

SEQ ID NO: 301428 - DNA, 6430 bp, Homo sapiens
aagagcagcggcgaggcggcggtggtggctgagtccgtggtggcagaggcgaaggcgacagctctaggggttggcaccggccccgagaggaggatgcgggtccggatagggctgacgctgctgctgtgtgcggtgctgctgagcttggcctcggcgtcctcggatgaagaaggcagccaggatgaatccttagattccaagactactttgacatcagatgagtcagtaaaggaccatactactgcaggcagagtagttgctggtcaaatatttcttgattcagaagaatctgaattagaatcctctattcaagaagaggaagacagcctcaagagccaagagggggaaagtgtcacagaagatatcagctttctagagtctccaaatccagaaaacaaggactatgaagagccaaagaaagtacggaaaccagctttgaccgccattgaaggcacagcacatggggagccctgccacttcccttttcttttcctagataaggagtatgatgaatgtacatcagatgggagggaagatggcagactgtggtgtgctacaacctatgactacaaagcagatgaaaagtggggcttttgtgaaactgaagaagaggctgctaagagacggcagatgcaggaagcagaaatgatgtatcaaactggaatgaaaatccttaatggaagcaataagaaaagccaaaaaagagaagcatatcggtatctccaaaaggcagcaagcatgaaccataccaaagccctggagagagtgtcatatgctcttttatttggtgattacttgccacagaatatccaggcagcgagagagatgtttgagaagctgactgaggaaggctctcccaagggacagactgctcttggctttctgtatgcctctggacttggtgttaattcaagtcaggcaaaggctcttgtatattatacatttggagctcttgggggcaatctaatagcccacatggttttgggttacagatactgggctggcatcggcgtcctccagagttgtgaatctgccctgactcactatcgtcttgttgccaatcatgttgctagtgatatctcgctaacaggaggctcagtagtacagagaatacggctgcctgatgaagtggaaaatccaggaatgaacagtggaatgctagaagaagatttgattcaatattaccagttcctagctgaaaaaggtgatgtacaagcacaggttggtcttggacaactgcacctgcacggagggcgtggagtagaacagaatcatcagagagcatttgactacttcaatttagcagcaaatgctggcaattcacatgccatggcctttttgggaaagatgtattcggaaggaagtgacattgtacctcagagtaatgagacagctctccactactttaagaaagctgctgacatgggcaacccagttggacagagtgggcttggaatggcctacctctatgggagaggagttcaagttaattatgatctagcccttaagtatttccagaaagctgctgaacaaggctgggtggatgggcagctacagcttggttccatgtactataatggcattggagtcaagagagattataaacaggccttgaagtattttaatttagcttctcagggaggccatatcttggctttctataacctagctcagatgcatgccagtggcaccggcgtgatgcgatcatgtcacactgcagtggagttgtttaagaatgtatgtgaacgaggccgttggtctgaaaggcttatgactgcctataacagctataaagatggcgattacaatgctgcagtgatccagtacctcctcctggctgaacagggctatgaagtggcacaaagcaatgcagcctttattcttgatcagagagaagcaagcattgtaggtgagaatgaaacttatcccagagctttgctacattggaacagggccgcctctcaagcaacacagtgcacaagctatgtttaatctgggatatatgcatgagaaaggactgggcattaaacaggatattcaccttgcgaaacgtttttatgacatggcagctgaagccagcccagatgcacaagttccagtcttcctagccctctgcaaattgggcgtcgtctatttcttgcagtacatacgggaaacaaacattcgagatatgttcacccaacttgatatggaccagcttttgggacctgagtgggacctttacctcatgaccatcattgcgctgctgttgggaacagtcatagcttacaggcaaaggcagcaccaagacatgcctgcacccaggcctccagggccacggccagctccaccccagcaggaggggccaccagagcagcagccaccacagtaataggcactgggtccagccttgatcagtgacagcgaaggaagttatctgctgggaacacttgcatttgatttaggaccttggatcagtggtcacctcccagaagaggcacggcacaaggaagcattgaattcctaaagctgcttagaatctgatgcctttattttcagggataagtaactcttacctaaactgagctgaatgtttgtttcagtgccatatggaataacaactttcagtggcttttttttttcttttctggaaacatatgtgagacactcagagtaatgtctactgtatccagctatctttcttggatccttttggtcattatttcagtgtgcataagttcttaatgtcaaccatctttaaggtattgtgcatcgacactaaaaactgatcagtgtaaaaaggaaaacccagttgcaagtttaaacgtgttcgaaagtctgaaaatagaacttgccttttaagttaaaaaaaaaaaaagctatcttgaaaatgttttggaactgcgataactgagaaactcttaccagtccacatgcaattagacatattcagcatatttgttattttaaaagggagggttgggaggtttcttattggtgattgtcacacggtataccatactcctctccttcaaagaatgaaaggccttgttaaggagttttttgtgagctttacttctttggaatggaatatacttatgcaaaaccttgtgaactgactccttgcactaacgcgagtttgccccacctactctgtaatttgcttgtttgttttgaatatacagagccttgatccagaagccagaggatggactaagtgggagaaattagaaaacaaaacgaactctggttggggtactacgatcacagacacagacatacttttcctaaagttgaagcatttgttcccaggatttattttactttgcatttctttttgcacaaagaacacatcaccttcctgaattctttaaatatgaaatatcattgccagggtatggcttacagtgactactattataatactaaaactcagagaatcaaagatggattaaactcagtggttgatgaaagccaaaacctgtttgtactgttctatactattcaggtatctttttatttctgatagttttatattataatagaaagccagccactgcttagctatcatagtcaccattttctcactgttaacattaggaaaatcaaggctactatgcttcaggattgtctggttaaatagtatgggaaaaaaactgaagagtttcacataattacacacgtgaaataattaaagcttaaactgaatttgtatttcattttattgtcagatggtggtgttcaccagcctgtatcttgtctgagactgcattcgtatctgagcaggttttctatgcctactgatgtcagtatgtttatactaaccttcatgcttttttcccagaatccctcatctgccagaaaacttgaaaagtttattgcttgtagagttgtactgctttgatttttgaagttggggtagtagttagaactagatttaactagtctataatgaacatgaaggcttttatatatgaagttgtatacctttttgtgtttagagaattatgggaaacctggtaagcaaaactttcctcccagataattgcttccaaattcgaagagttagtcaccaagagagccatatgtatgaaagcgtatctgtgaaaggtaggaaacttaccccccctaagtgtaatgttgctttaggcaactcttgtaaatagtgagacttgtttggtctcttacatgtagagatttgagtgcagttggtacagtactttggtgtctccaccactgtcccttctccccgcttcaaaataagtgtaatccacggtagcagccacacttccttcagaaggaactgttataatttatttaaaagttgaaaaaccacccaagatgactaccaactttcacttttttcttctgccatccaccctcatttttcctttagcaagatttttatatctaactttccttccctccattgagtacgtgctttgagaaaacatttcttaaaacagtgtgtgccacctaaggctggatgggaaagtgcagtcttgttgttcatataaaaacacacttcttattagtttaccacttgcctttttctattgttaatgttctgaatttccttttcttggcttgtttctacttcattttaccctgggtcacttgctgccagcagtttgtgaatggtgtctttcaaataacttagttcttatggcttcacttaaagactgtctcaaaaatactttgctctcttcttcttttttgttcatgggacatggtacctaagcaaataggagttgggtttggtttttctcctaaaataatgctcaatacttacctaatcaaatggcatccatttgaataaaatgacaataactaaagctagttaatgtcagtgacattaaactaactccaggattcaggagttttaatgttagaatttagatttaacagatagagtgtggcttcatttgtccatggtagcccatctctcctaagaccttttctagtctgtcttcctgccttcgaacttgatgacagtaaaaccctgtttagtattctcttgtgcatttggtttgttggttagccgactgtcttgaaactattcattttgcttctagttttattttacagaggtagcattggtgggtttttttttttttttctgtctctgtgtttgaagtttcagtttctgttttctaggtaaggcttatttttgattagcagtcaatggcaaagaaaaagtaaatcaaagatgacttcttttcaaaatgtattgtttagcacttaactcagatgaatttataaattattaatcttgatactaaggatttgttacttttttgcatattaggttaatttttaccttacatgtgagagtcttaccactaagccattctgtctctgtactgttgggaagttttggaaacccctgccagtgatctggtgatgatctgatgatttatttaaagagccgttgatgcctccaggaaacttaagtattttattaatatatatataggaatttttttttattttgctttgtctttctctcccttcttttatcctcatgttcattcttcaaaccagtgttttggaagtatgcatgcaggcctataaatgaaaaacacaattctttatgtgtatagcatgtgtattaatgtctaactacatacgcaaaaacttcctttacagaggttcggactaacatttcacatgcacatttcaaaacaagatgtgtcatgaaaacagcccctttacctgccaagacaagcagggctatatttcagtgacagctgatatttgttttgaaagtgaatctcataatatatatatgtattacacattattatgactagaagtatgtaagaaatgatcagaacaaaagaaaatttctattttcatgcaaatatttttcatcagtcatcactctcaaatataaattaaaatataacactcctgaatgcctgaggcacgatctggattttaaatgtgtggtattcattgaaaagaagctctccacccacttggtatttcaagaaaatttaaaacgatcccaaggaaagatgatttgtatgttaaagtgactgcacaagtaaaagtccaatgttgtgtgcatgaaaaggattccttggttatgtgcagggaatcatctcacatgctgtttttcctatttggtttgagaaacaggctgacactattctctttgattagaaaataaactcataaaactcataatgttgatataatcaagatgtaaccactataaatatgtagaagaggaagttttaaaagaccttaagctggcattgtgaaggaacaccatggtagactctttttgtaaatgtattttgtatttaatgaaatgcagtataaaggttggtgaagtgtaatataattgtgtaaacaaatcctgttaatagagagatgtacagaatcgttttgtactgtatcttgaaacttgtgaaataaagattccacctctggttatcctgta

SEQ ID NO: 301429 - DNA, 1369 bp, Homo sapiens
agatgaatttataaattattaatctgagttaagtgctaaacaatacattttgaaaagaagtcatctttgatttactttttctttgccattgactgctaatcaaaaataagccttacctagaaaacagaaactgaaacttcaaaatgtattgtttagcacttaactcagatgaatttataaattattaatcttgatactaaggatttgttacttttttgcatattaggttaatttttaccttacatgtgagagtcttaccactaagccattctgtctctgtactgttgggaagttttggaaacccctgccagtgatctggtgatgatctgatgatttatttaaagagccgttgatgcctccaggaaacttaagtattttattaatatatatataggaatttttttttattttgctttgtctttctctcccttcttttatcctcatgttcattcttcaaaccagtgttttggaagtatgcatgcaggcctataaatgaaaaacacaattctttatgtgtatagcatgtgtattaatgtctaactacatacgcaaaaacttcctttacagaggttcggactaacatttcacatgcacatttcaaaacaagatgtgtcatgaaaacagcccctttacctgccaagacaagcagggctatatttcagtgacagctgatatttgttttgaaagtgaatctcataatatatatatgtattacacattattatgactagaagtatgtaagaaatgatcagaacaaaagaaaatttctattttcatgcaaatatttttcatcagtcatcactctcaaatataaattaaaatataacactcctgaatgcctgaggcacgatctggattttaaatgtgtggtattcattgaaaagaagctctccacccacttggtatttcaagaaaatttaaaacgatcccaaggaaagatgatttgtatgttaaagtgactgcacaagtaaaagtccaatgttgtgtgcatgaaaaggattccttggttatgtgcagggaatcatctcacatgctgtttttcctatttggtttgagaaacaggctgacactattctctttgattagaaaataaactcataaaactcataatgttgatataatcaagatgtaaccactataaatatgtagaagaggaagttttaaaagaccttaagctggcattgtgaaggaacaccatggtagactctttttgtaaatgtattttgtatttaatgaaatgcagtataaaggttggtgaagtgtaatataattgtgtaaacaaatcctgttaatagagagatgtacagaatcgttttgtactgtatcttgaaacttgtgaaataaagattccacctctggttatcctgta

SEQ ID NO: 301430 - DNA, 2615 bp, Homo sapiens
aagagcagcggcgaggcggcggtggtggctgagtccgtggtggcagaggcgaaggcgacagctctaggggttggcaccggccccgagaggaggatgcgggtccggatagggctgacgctgctgctgtgtgcggtgctgctgagcttggcctcggcgtcctcggatgaagaaggcagccaggatgaatccttagattccaagactactttgacatcagatgagtcagtaaaggaccatactactgcaggcagagtagttgctggtcaaatatttcttgattcagaagaatctgaattagaatcctctattcaagaagaggaagacagcctcaagagccaagagggggaaagtgtcacagaagatatcagctttctagagtctccaaatccagaaaacaaggactatgaagagccaaagaaagtacggaaaccagctttgaccgccattgaaggcacagcacatggggagccctgccacttcccttttcttttcctagataaggagtatgatgaatgtacatcagatgggagggaagatggcagactgtggtgtgctacaacctatgactacaaagcagatgaaaagtggggcttttgtgaaactgaagaagaggctgctaagagacggcagatgcaggaagcagaaatgatgtatcaaactggaatgaaaatccttaatggaagcaataagaaaagccaaaaaagagaagcatatcggtatctccaaaaggcagcaagcatgaaccataccaaagccctggagagagtgtcatatgctcttttatttggtgattacttgccacagaatatccaggcagcgagagagatgtttgagaagctgactgaggaaggctctcccaagggacagactgctcttggctttctgtatgcctctggacttggtgttaattcaagtcaggcaaaggctcttgtatattatacatttggagctcttgggggcaatctaatagcccacatggttttgggttacagatactgggctggcatcggcgtcctccagagttgtgaatctgccctgactcactatcgtcttgttgccaatcatgttgctagtgatatctcgctaacaggaggctcagtagtacagagaatacggctgcctgatgaagtggaaaatccaggaatgaacagtggaatgctagaagaagatttgattcaatattaccagttcctagctgaaaaaggtgatgtacaagcacaggttggtcttggacaactgcacctgcacggagggcgtggagtagaacagaatcatcagagagcatttgactacttcaatttagcagcaaatgctggcaattcacatgccatggcctttttgggaaagatgtattcggaaggaagtgacattgtacctcagagtaatgagacagctctccactactttaagaaagctgctgacatgggcaacccagttggacagagtgggcttggaatggcctacctctatgggagaggagttcaagttaattatgatctagcccttaagtatttccagaaagctgctgaacaaggctgggtggatgggcagctacagcttggttccatgtactataatggcattggagtcaagagagattataaacaggccttgaagtattttaatttagcttctcagggaggccatatcttggctttctataacctagctcagatgcatgccagtggcaccggcgtgatgcgatcatgtcacactgcagtggagttgtttaagaatgtatgtgaacgaggccgttggtctgaaaggcttatgactgcctataacagctataaagatggcgattacaatgctgcagtgatccagtacctcctcctggctgaacagggctatgaagtggcacaaagcaatgcagcctttattcttgatcagagagaagcaagcattgtaggtgagaatgaaacttatcccagagctttgctacattggaacagggccgcctctcaaggctatactgtggctagaattaagctcggagactaccatttctatgggtttggcaccgatgtagattatgaaactgcatttattcattaccgtctggcttctgagcagcaacacagtgcacaagctatgtttaatctgggatatatgcatgagaaaggactgggcattaaacaggatattcaccttgcgaaacgtttttatgacatggcagctgaagccagcccagatgcacaagttccagtcttcctagccctctgcaaattgggcgtcgtctatttcttgcagtacatacgggaaacaaacgtaagtggtccgtacctcttttcattaaaatataaatgatggaaggtctgtcctggaggtttgtttttcaaaagttgagaagcacagggaagagtggtcctgcaggtatcgggtgtgttcccttctcctcagctcaggtacccgaggaccttatcaggggagggataaatgcaggcataaagcagctactgcagtttttaggtagcgtttgacacttcctgacgctaaagcatttttcatggaggcagatgttttctggtttagggaaaactgagactaactcatggcagtttgaaacagtatttaattcagtaaacattaaatcagatgactcaaaccagtccctt

SEQ ID NO: 301431 - DNA, 391 bp, Homo sapiens
aaatgcacacacttcaaaaataaagtttatgacatctattttgattgctctaggaactatattatttatttccttgctcttagctatggccttcttgttgaagttgctgaatccattacctcaaaacctaacacttagcataaataaggtgttagtgtacttggatcaaatgacagcaaaattctgggtatgcttagctttatttgttccacgaagaatgacactgaagtacatgaaactgctgcctcctcacgtgaagttgttttacagggttacagatactgggctggcatcggcgtcctccagagttgtgaatctgccctgactcactatcgtcttgttgccaatcatggtatctatgtttccccttttaccttttaggaaaaaaaaa

SEQ ID NO: 301432 - DNA, 431 bp, Homo sapiens
cgtgatgcgatcatgtcacactgcagtggaggtaaggtctttcctaccagcttgtgtgtagggagttgatttgcccagcaggaaagtctgcgctttcaattctggtttttttgtatgttttcttctgtagttcctagactcagcctacctagctttgatatactgagggaagaccgaggggtctgtgtgtaattaccatacttatttattcagtgtctccctattacaatcaactgtataaggggagatactggtgtctgcagtatctctagcacctaagacagtatctgataataatcagcatcaaaaaaatatataagctgagcacaatggcacgtgcctatagtcccagctacttaggaggttgaggtggatgaaggcttgagcccaggagtttgagaccaacctggacaacatagaaagaacctatc

SEQ ID NO: 301433 - DNA, 512 bp, Homo sapiens
caagaaatgcatttttgtttcttacctgtattataggatattcaccttgcgaaacgtttttatgacatggcagctgaagccagcccagatgcacaagttccagtcttcctagccctctgcaaattgggcgtcgtctatttcttgcagtacatacgggaaacaaacgtaagtggtccgtacctcttttcattaaaatataaatgatggaaggtctgtcctggaggtttgtttttcaaaagttgagaagcacagggaagagtggtcctgcaggtatcgggtgtgttcccttctcctcagctcaggtacccgaggaccttatcaggggagggataaatgcaggcataaagcagctactgcagtttttaggtagcgtttgacacttcctgacgctaaagcatttttcatggaggcagatgttttctggtttagggaaaactgagactaactcatggcagtttgaaacagtatttaattcagtaaacattaaatcagatgactcaaaccagtccctt

SEQ ID NO: 301434 - DNA, 414 bp, Homo sapiens
agcttgtattagattcacatatttactcagtaagaattctttcattagagttttattcttcatatataagccttctctgatacttagctaaatcttaagtctattatctcgtgtgatttttttttttcttacagatggcattggagtcaagagagattataaacaggccttgaagtattttaatttagcttctcagggaggccatatcttggctttctataacctagctcagatgcatgccagtggcaccggcgtgatgcgatcatgtcacactgcagtggaggtaaggtctttcctaccagcttgtgtgtagggagttgatttgcccagcaggaaagtctgcgctttcaattctggtttttttgtatgttttcttctgtagttcctagactcagcctacctagctttgatata

SEQ ID NO: 301435 - DNA, 628 bp, Homo sapiens
ctttctgagagcagcatacaaattgtttcacaaaaactctatttacttttcttcaccaccttaaatattaatccccctatgacttaatgtatattattatctattataagaattagaaagtggtctttttaatggctctttgggaatatttttttatatgctttgttcatttttttaaataaatctcttaacttttgagtatgtctgccttttgagctttctcatcatatgacatctttttctacagaattatgatctagcccttaagtatttccagaaagctgctgaacaaggctgggtggatgggcagctacagcttggttccatgtactatagtaagtaacactggaattaatgatggatacaccaagatctaaattaagctgttttctactagatggcattatgatgtggaaatgggtgctatcaaattctggctggttaaatgttctcccagttcaatgatttgtacatcttgtttttcattgtaaattatattaatctgtatcagtgtgttagcttgtattagattcacatatttactcagtaagaattctttcattagagttttattcttcatatataagccttctctgatacttagctaaatcttaagtctattatctcg

SEQ ID NO: 301436 - DNA, 1316 bp, Homo sapiens
cgcgcggccggttactcgcttaccggaggcttcagtccccggcggcgcggcgacagctagggttcacggccactggggcagaggagccgcgagaagatgtgggtttttggttacgggtccctgatctggaaggtggatttcccctatcaggacaagctggtcggatacatcaccaactacagcaggcgcttctggcagggcagcacggaccaccgcggggtccccggcaagcctggaagagttgtgactcttgttgaagatcctgcgggatgtgtatggggtgttgcttacagattgccagtaggaaaggaagaagaagtaaaagcataccttgacttcagagaaaaaggaggctacagaaccacaacagtcattttttatccaaaagatcccacaacaaaaccattcagtgtattgctatatattggaacatgtgataatcctgattatcttggtcctgcacctctggaagacattgctgaacaaatttttaatgcagctggtccaagtggaagaaatacagaatatctttttgaacttgcaaattctattaggaaccttgtgccagaagaagcagatgagcatcttttcgctttggaaaaattagtaaaggaacgtttagaagggaaacagaacctcaattgcatataatttagtcttcagagaattaacttcagtgcacaatgacaatatgatttggaaatacgtttacttaaagatcttatttttaatgtagtgaggatattatttaaacttttattttaactggaaatgtcctgaaacacatatttaaaatattgggatacagtgaaagaaaaattcaaattttaataacataaagatttcctaactttatgttattgaacacttactcactagaagtgagttctttagaaaaatacagtgaaggactcagttcagtcttgtttttatcagagtgataatcatcctgtttcacatcccaatactattttgaaattctaaacaattaaaccaaaattccaataaatataaggttatgccttcaatatattcctatacaattctgtaaccatggtttaaaatacacaagcttaaaataacatgcttagaaatacacaataatatgaacagtatttcagccttaattgtgaatttccttgttattcaagtattaaatgaaatcttttgagtttttagccaaaaattggcatttttaaaatacgaaaatttccttggaattataatgtactgtacctcttcttttttaaataaaggcattttactatatggaaaataactcactaaagcataaattacattatacaaatcatgat

SEQ ID NO: 301437 - DNA, 1269 bp, Homo sapiens
cgcgcggccggttactcgcttaccggaggcttcagtccccggcggcgcggcgacagctagggttcacggccactggggcagaggagccgcgagaagatgtgggtttttggttacgggtccctgatctggaaggtggatttcccctatcaggacaagctggtcggatacatcaccaactacagcaggcgcttctggcagggcagcacggaccaccgcggggtccccggcaagcctggaagagttgtgactcttgttgaagatcctgcgggatgtgtatggggtgttgcttacagattgccagtaggaaaggaagaagaagtaaaagcataccttgacttcagagaaaaaggaggctacagaaccacaacagtcattttttatccaaaagatcccacaacaaaaccattcagtgtattgctatatattggaacatgtgataatcctgattatcttggtcctgcacctctggaagacattgctgaacaaatttttaatgcagctggtccaagtggaagaaatacagaatatctttttgaacttgcaaattctattaggaaccttgtgccagaagaagcagatgagcatcttttcgctttggaaaaattagtaaaggaacgtttagaagggaaacagaacctcaattgcatataatttagtcttcagagaattaacttcagtgcacaatgacaatatgatttggaaatacgtttacttaaagatcttatttttaatgtagtgaggatattatttaaacttttattttaactggaaatgtcctgaaacacatatttaaaatattgggatacagtgaaagaaaaattcaaattttaataacataaagatttcctaactttatgttattgaacacttactcactagaagtgagttctttagaaaaatacagtgaaggactcagttcagtcttgtttttatcagagtgataatcatcctgtttcacatcccaatactattttgaaattctaaacaattaaaccaaaattccaataaatataaggttatgccttcaatatattcctatacaattctgtaaccatggtttaaaatacacaagcttaaaataacatgcttagaaatacacaataatatgaacagtatttcagccttaattgtgaatttccttgttattcaagtattaaatgaaatcttttgagtttttagccaaaaattggcatttttaaaatacgaaaatttccttggaattataatgtactgtacctcttcttttttaaataaaggcattttactata

SEQ ID NO: 301438 - DNA, 1343 bp, Homo sapiens
cgcgcggccggttactcgcttaccggaggcttcagtccccggcggcgcggcgacagctagggttcacggccactggggcagaggagccgcgagaagatgtgggtttttggttacgggtccctgatctggaaggtggatttcccctatcaggacaagctggtcggatacatcaccaactacagcaggcgcttctggcagggcagcacggaccaccgcggggtccccggcaagcctggaagagttgtgactcttgttgaagatcctgcgggatgtgtatggggtgttgcttacagattgccagtaggaaaggaagaagaagtaaaagcataccttgacttcagagaaaaaggaggctacagaaccacaacagtcattttttatccaaaagatcccacaacaaaaccattcagtgtattgctatatattggaacatgtgataatcctgattatcttggtcctgcacctctggaagacattgctgaacaaatttttaatgcagctggtccaagtggaagaaatacagaatatctttttgaacttgcaaattctattaggaaccttgtgccagaagaagcagatgagcatcttttcgctttggaaaaattagtaaaggaacgtttagaagggaaacagaacctcaattgcatataatttagtcttcagagaattaacaagaaggctttgttggccgaaaggtttttcagtgcacaatgacaatatgatttggaaatacgtttacttaaagatcttatttttaatgtagtgaggatattatttaaacttttattttaactggaaatgtcctgaaacacatatttaaaatattgggatacagtgaaagaaaaattcaaattttaataacataaagatttcctaactttatgttattgaacacttactcactagaagtgagttctttagaaaaatacagtgaaggactcagttcagtcttgtttttatcagagtgataatcatcctgtttcacatcccaatactattttgaaattctaaacaattaaaccaaaattccaataaatataaggttatgccttcaatatattcctatacaattctgtaaccatggtttaaaatacacaagcttaaaataacatgcttagaaatacacaataatatgaacagtatttcagccttaattgtgaatttccttgttattcaagtattaaatgaaatcttttgagtttttagccaaaaattggcatttttaaaatacgaaaatttccttggaattataatgtactgtacctcttcttttttaaataaaggcattttactatatggaaaataactcactaaagcataaattacattatacaaatcatgat

SEQ ID NO: 301439 - DNA, 2492 bp, Homo sapiens
acccctgtcatgcgcattgagagtcctctagacaggcgctcctcgcagcaccgtagtgcgcttgcgctgagcagcccgcgagggcggaagtgggagctgcgaccgcgctccctgtgaggtgggcaagcggcgaaatggcgccctccgggagtcttgcagttcccctggcagtcctggtgctgttgctttggggtgctccctggacgcacgggcggcggagcaacgttcgcgtcatcacggacgagaactggagagaactgctggaaggagactggatgatagaattttatgccccgtggtgccctgcttgtcaaaatcttcaaccggaatgggaaagttttgctgaatggggagaagatcttgaggttaatattgcgaaagtagatgtcacagagcagccaggactgagtggacggtttatcataactgctcttcctactatttatcattgtaaagatggtgaatttaggcgctatcagggtccaaggactaagaaggacttcataaactttataagtgataaagagtggaagagtattgagcccgtttcatcatggtttggtccaggttctgttctgatgagtagtatgtcagcactctttcagctatctatgtggatcaggacgtgccataactactttattgaagaccttggattgccagtgtggggatcatatactgtttttgctttagcaactctgttttccggactgttattaggactctgtatgatatttgtggcagattgcctttgtccttcaaaaaggcgcagaccacagccatacccatacccttcaaaaaaattattatcagaatctgcacaacctttgaaaaaagtggaggaggaacaagaggcggatgaagaagatgtttcagaagaagaagctgaaagtaaagaaggaacaaacaaagactttccacagaatgccataagacaacgctctctgggtccatcattggccacagataaatcctagttaaattttatagttatcttaatattatgattttgataaaaacagaagattgatcattttgtttggtttgaagtgaactgtgacttttttgaatattgcagggttcagtctagattgtcattaaattgaagagtctacattcagaacataaaagcactaggtatacaagtttgaaatatgatttaagcacagtatgatggtttaaatagttctctaatttttgaaaaatcgtgccaagcaataagatttatgtatatttgtttaataataacctatttcaagtctgagttttgaaaatttacatttcccaagtattgcattattgaggtatttaagaagattattttagagaaaaatatttctcatttgatataatttttctctgtttcactgtgtgaaaaaaagaagatatttcccataaatgggaagtttgcccattgtctcaagaaatgtgtatttcagtgacaatttcgtggtctttttagaggtatattccaaaatttccttgtatttttaggttatgcaactaataaaaactaccttacattaattaattacagttttctacacatggtaatacaggatatgctactgatttaggaagtttttaagttcatggtattctcttgattccaacaaagtttgattttctcttgtatttttcttacttactatgggttacattttttatttttcaaattggatgataatttcttggaaacattttttatgttttagtaaacagtatttttttgttgtttcaaactgaagtttactgagagatccatcaaattgaacaatctgttgtaatttaaaattttggccacttttttcagattttacatcattcttgctgaacttcaacttgaaattgttttttttttctttttggatgtgaaggtgaacattcctgatttttgtctgatgtgaaaaagccttggtattttacattttgaaaattcaaagaagcttaatataaaagtttgcattctactcaggaaaaagcatcttcttgtatatgtcttaaatgtatttttgtcctcatatacagaaagttcttaattgattttacagtctgtaatgcttgatgttttaaaataataacatttttatattttttaaaagacaaacttcatattatcctgtgttctttcctgactggtaatattgtgtgggatttcacaggtaaaagtcagtaggatggaacattttagtgtatttttactccttaaagagctagaatacatagttttcaccttaaaagaagggggaaaatcataaatacaatgaatcaactgaccattacgtagtagacaatttctgtaatgtccccttctttctaggctctgttgctgtgtgaatccattagatttacagtatcgtaatatacaagttttctttaaagccctctcctttagaatttaaaatattgtaccattgaagagtttggatgtgtaacttgtgatgccttagaaaaatatcctaagcacaaaataaacctttctaaccacttca

SEQ ID NO: 301440 - DNA, 834 bp, Homo sapiens
acccctgtcatgcgcattgagagtcctctagacaggcgctcctcgcagcaccgtagtgcgcttgcgctgagcagcccgcgagggcggaagtgggagctgcgaccgcgctccctgtgaggtgggcaagcggcgaaatggcgccctccgggagtcttgcagttcccctggcagtcctggtgctgttgctttggggtgctccctggacgcacgggcggcggagcaacgttcgcgtcatcacggacgagaactggagagaactgctggaaggagactggatgatagaattttatgccccgtggtgccctgcttgtcaaaatcttcaaccggaatgggaaagttttgctgaatggggagaagatcttgaggttaatattgcgaaagtagatgtcacagagcagccaggactgagtggacggtttatcataactgctcttcctactatttatcagtaagtatttgaagactctaaattatggagaaggatgcattatagtgtaatcagaagtagtaggcctctggcttggatcatgctggaagagctgaggtaatctcattatattcagcaggtattttagagggcttgttttgcttagtgttatcctaggtgcctttaggtagttgagtgatgtgtgaaacagtctctgttctcaaagatttacagttgttttggaaagtgatgttcttgtgaaatggtgtgatcctgttcagcgtgttaagtcattatgcatccaaagtagtggtgagtcctgtaggtaattggataaaggagaaatcacagttacctggattggttcccagagaatatggggtttaaatgaaaccttggaagtagaa

SEQ ID NO: 301441 - DNA, 2883 bp, Homo sapiens
acccctgtcatgcgcattgagagtcctctagacaggcgctcctcgcagcaccgtagtgcgcttgcgctgagcagcccgcgagggcggaagtgggagctgcgaccgcgctccctgtgaggtgggcaagcggcgaaatggcgccctccgggagtcttgcagttcccctggcagtcctggtgctgttgctttggggtgctccctggacgcacgggcggcggagcaacgttcgcgtcatcacggacgagaactggagagaactgctggaaggagactggatgatagaattttatgccccgtggtgccctgcttgtcaaaatcttcaaccggaatgggaaagttttgctgaatggggagaagatcttgaggttaatattgcgaaagtagatgtcacagagcagccaggactgagtggacggtttatcataactgctcttcctactatttatcattgtaaagatggtgaatttaggcgctatcagggtccaaggactaagaaggacttcataaactttataagtgataaagagtggaagagtattgagcccgtttcatcatggtttggtccaggttctgttctgatgagtagtatgtcagcactctttcagctatctatgtggatcaggacgtgccataactactttattgaagaccttggattgccagtgtggggatcatatactgtttttgctttagcaactctgttttccggactgttattaggactctgtatgatatttgtggcagattgcctttgtccttcaaaaaggcgcagaccacagccatacccatacccttcaaaaaaattattatcagaatctgcacaacctttgaaaaaagtggaggaggaacaagaggcggatgaagaagatgtttcagaagaagaagctgaaagtaaagaaggaacaaacaaagactttccacagaatgccataagacaacgctctctgggtccatcattggccacagataaatcctagttaaattttatagttatcttaatattatgattttgataaaaacagaagattgatcattttgtttggtttgaagtgaactgtgacttttttgaatattgcagggttcagtctagattgtcattaaattgaagagtctacattcagaacataaaagcactaggtatacaagtttgaaatatgatttaagcacagtatgatggtttaaatagttctctaatttttgaaaaatcgtgccaagcaataagatttatgtatatttgtttaataataacctatttcaagtctgagttttgaaaatttacatttcccaagtattgcattattgaggtatttaagaagattattttagagaaaaatatttctcatttgatataatttttctctgtttcactgtgtgaaaaaaagaagatatttcccataaatgggaagtttgcccattgtctcaagaaatgtgtatttcagtgacaatttcgtggtctttttagaggtatattccaaaatttccttgtatttttaggttatgcaactaataaaaactaccttacattaattaattacagttttctacacatggtaatacaggatatgctactgatttaggaagtttttaagttcatggtattctcttgattccaacaaagtttgattttctcttgtatttttcttacttactatgggttacattttttatttttcaaattggatgataatttcttggaaacattttttatgttttagtaaacagtatttttttgttgtttcaaactgaagtttactgagagatccatcaaattgaacaatctgttgtaatttaaaattttggccacttttttcagattttacatcattcttgctgaacttcaacttgaaattgttttttttttctttttggatgtgaaggtgaacattcctgatttttgtctgatgtgaaaaagccttggtattttacattttgaaaattcaaagaagcttaatataaaagtttgcattctactcaggaaaaagcatcttcttgtatatgtcttaaatgtatttttgtcctcatatacagaaagttcttaattgattttacagtctgtaatgcttgatgttttaaaataataacatttttatattttttaaaagacaaacttcatattatcctgtgttctttcctgactggtaatattgtgtgggatttcacaggtaaaagtcagtaggatggaacattttagtgtatttttactccttaaagagctagaatacatagttttcaccttaaaagaagggggaaaatcataaatacaatgaatcaactgaccattacgtagtagacaatttctgtaatgtccccttctttctaggctctgttgctgtgtgaatccattagatttacagtatcgtaatatacaagttttctttaaagccctctcctttagaatttaaaatattgtaccattgaagagtttggatgtgtaacttgtgatgccttagaaaaatatcctaagcacaaaataaacctttctaaccacttcattaaagctgaagaccagtatgatttctggttgctttttgaaggtatgctttattactttgtatttaacgatgttcagatgagtagttgtgtgttcctatatatgtacttgatatgtgtaatcaaaagactgccttctttttctattgagatgtttaaggacagtaatgctcattaatcaagcattttttttttttagtgttctagtatatgtgacatggccaatttttttattagaaaatatgtgaccagaaagattctatagagtaaaaaatcaaagcaaaacaaaaaccacaaaaagacccctgtactatagaaaatgtaaagttggctgaacagatagggtcttgaaatttcaggaaacatataatctcacggttcttaaagattgtc

SEQ ID NO: 301442 - DNA, 2510 bp, Homo sapiens
acccctgtcatgcgcattgagagtcctctagacaggcgctcctcgcagcaccgtagtgcgcttgcgctgagcagcccgcgagggcggaagtgggagctgcgaccgcgctccctgtgaggtgggcaagcggcgaaatggcgccctccgggagtcttgcagttcccctggcagtcctggtgctgttgctttggggtgctccctggacgcacgggcggcggagcaacgttcgcgtcatcacggacgagaactggagagaactgctggaaggagactggatgatagaattttatgccccgtggtgccctgcttgtcaaaatcttcaaccggaatgggaaagttttgctgaatggggagaagatcttgaggttaatattgcgaaagtagatgtcacagagcagccaggactgagtggacggtttatcataactgctcttcctactatttatcattgtaaagatggtgaatttaggcgctatcagggtccaaggactaagaaggacttcataaactttataagtgataaagagtggaagagtattgagcccgtttcatcatggtttggtccaggttctgttctgatgagtagtatgtcagcactctttcagctatctatgtggatcaggacgtgccataactactttattgaagaccttggattgccagtgtggggatcatatactgtttttgctttagcaactctgttttccggactgttattaggactctgtatgatatttgtggcagattgcctttgtccttcaaaaaggcgcagaccacagccatacccatacccttcaaaaaaattattatcagaatctgcacaacctttgaaaaaagtggaggaggaacaagaggcggatgaagaagatgtttcagaagaagaagctgaaagtaaagaaggaacaaacaaagactttccacagaatgccataagacaacgctctctgggtccatcattggccacagataaatcctagttaaattttatagttatcttaatattatgattttgataaaaacagaagattgatcattttgtttggtttgaagtgaactgtgacttttttgaatattgcagggttcagtctagattgtcattaaattgaagagtctacattcagaacataaaagcactaggtatacaagtttgaaatatgatttaagcacagtatgatggtttaaatagttctctaatttttgaaaaatcgtgccaagcaataagatttatgtatatttgtttaataataacctatttcaagtctgagttttgaaaatttacatttcccaagtattgcattattgaggtatttaagaagattattttagagaaaaatatttctcatttgatataatttttctctgtttcactgtgtgaaaaaaagaagatatttcccataaatgggaagtttgcccattgtctcaagaaatgtgtatttcagtgacaatttcgtggtctttttagaggtatattccaaaatttccttgtatttttaggttatgcaactaataaaaactaccttacattaattaattacagttttctacacatggtaatacaggatatgctactgatttaggaagtttttaagttcatggtattctcttgattccaacaaagtttgattttctcttgtatttttcttacttactatgggttacattttttatttttcaaattggatgataatttcttggaaacattttttatgttttagtaaacagtatttttttgttgtttcaaactgaagtttactgagagatccatcaaattgaacaatctgttgtaatttaaaattttggccacttttttcagattttacatcattcttgctgaacttcaacttgaaattgttttttttttctttttggatgtgaaggtgaacattcctgatttttgtctgatgtgaaaaagccttggtattttacattttgaaaattcaaagaagcttaatataaaagtttgcattctactcaggaaaaagcatcttcttgtatatgtcttaaatgtatttttgtcctcatatacagaaagttcttaattgattttacagtctgtaatgcttgatgttttaaaataataacatttttatattttttaaaagacaaacttcatattatcctgtgttctttcctgactggtaatattgtgtgggatttcacaggtaaaagtcagtaggatggaacattttagtgtatttttactcccctaccctctcccccccaatcctctcctgtaacttaagagcagtgggtatataggcaagggatccaaatctcattaatgtagtagtctacccccgttacccccctgtatgaatggccatacaggctgagttgaatcatgacaaagttgaaagggccaatacagccccttttataaggattctgaatgttttgcaaatgtattggtccctgtgttgtattttgtagccttttcctgggcttcagctcccctacttcttgtatgtgtatgcatcctgtagctaccctttatagtcatggcacacaaa

SEQ ID NO: 301443 - DNA, 2795 bp, Homo sapiens
tcatcgctgtctggaacagcgatgactcgagagcggaagcggcgaaatggcgccctccgggagtcttgcagttcccctggcagtcctggtgctgttgctttggggtgctccctggacgcacgggcggcggagcaacgttcgcgtcatcacggacgagaactggagagaactgctggaaggagactggatgatagaattttatgccccgtggtgccctgcttgtcaaaatcttcaaccggaatgggaaagttttgctgaatggggagaagatcttgaggttaatattgcgaaagtagatgtcacagagcagccaggactgagtggacggtttatcataactgctcttcctactatttatcattgtaaagatggtgaatttaggcgctatcagggtccaaggactaagaaggacttcataaactttataagtgataaagagtggaagagtattgagcccgtttcatcatggtttggtccaggttctgttctgatgagtagtatgtcagcactctttcagctatctatgtggatcaggacgtgccataactactttattgaagaccttggattgccagtgtggggatcatatactgtttttgctttagcaactctgttttccggactgttattaggactctgtatgatatttgtggcagattgcctttgtccttcaaaaaggcgcagaccacagccatacccatacccttcaaaaaaattattatcagaatctgcacaacctttgaaaaaagtggaggaggaacaagaggcggatgaagaagatgtttcagaagaagaagctgaaagtaaagaaggaacaaacaaagactttccacagaatgccataagacaacgctctctgggtccatcattggccacagataaatcctagttaaattttatagttatcttaatattatgattttgataaaaacagaagattgatcattttgtttggtttgaagtgaactgtgacttttttgaatattgcagggttcagtctagattgtcattaaattgaagagtctacattcagaacataaaagcactaggtatacaagtttgaaatatgatttaagcacagtatgatggtttaaatagttctctaatttttgaaaaatcgtgccaagcaataagatttatgtatatttgtttaataataacctatttcaagtctgagttttgaaaatttacatttcccaagtattgcattattgaggtatttaagaagattattttagagaaaaatatttctcatttgatataatttttctctgtttcactgtgtgaaaaaaagaagatatttcccataaatgggaagtttgcccattgtctcaagaaatgtgtatttcagtgacaatttcgtggtctttttagaggtatattccaaaatttccttgtatttttaggttatgcaactaataaaaactaccttacattaattaattacagttttctacacatggtaatacaggatatgctactgatttaggaagtttttaagttcatggtattctcttgattccaacaaagtttgattttctcttgtatttttcttacttactatgggttacattttttatttttcaaattggatgataatttcttggaaacattttttatgttttagtaaacagtatttttttgttgtttcaaactgaagtttactgagagatccatcaaattgaacaatctgttgtaatttaaaattttggccacttttttcagattttacatcattcttgctgaacttcaacttgaaattgttttttttttctttttggatgtgaaggtgaacattcctgatttttgtctgatgtgaaaaagccttggtattttacattttgaaaattcaaagaagcttaatataaaagtttgcattctactcaggaaaaagcatcttcttgtatatgtcttaaatgtatttttgtcctcatatacagaaagttcttaattgattttacagtctgtaatgcttgatgttttaaaataataacatttttatattttttaaaagacaaacttcatattatcctgtgttctttcctgactggtaatattgtgtgggatttcacaggtaaaagtcagtaggatggaacattttagtgtatttttactccttaaagagctagaatacatagttttcaccttaaaagaagggggaaaatcataaatacaatgaatcaactgaccattacgtagtagacaatttctgtaatgtccccttctttctaggctctgttgctgtgtgaatccattagatttacagtatcgtaatatacaagttttctttaaagccctctcctttagaatttaaaatattgtaccattgaagagtttggatgtgtaacttgtgatgccttagaaaaatatcctaagcacaaaataaacctttctaaccacttcattaaagctgaagaccagtatgatttctggttgctttttgaaggtatgctttattactttgtatttaacgatgttcagatgagtagttgtgtgttcctatatatgtacttgatatgtgtaatcaaaagactgccttctttttctattgagatgtttaaggacagtaatgctcattaatcaagcattttttttttttagtgttctagtatatgtgacatggccaatttttttattagaaaatatgtgaccagaaagattctatagagtaaaaaatcaaagcaaaacaaaaaccacaaaaagacccctgtactatagaaaatgtaaagttggctgaacagatagggtcttgaaatttcaggaaacatataatctcacggttcttaaagattgtc

SEQ ID NO: 301444 - DNA, 2829 bp, Homo sapiens
acccctgtcatgcgcattgagagtcctctagacaggcgctcctcgcagcaccgtagtgcgcttgcgctgagcagcccgcgagggcggaagtgggagctgcgaccgcgctccctgtgaggtgggcaagcggcgaaatggcgccctccgggagtcttgcagttcccctggcagtcctggtgctgttgctttggggtgctccctggacgcacgggcggcggagcaacgttcgcgtcatcacggacgagaactggagagaactgctggaaggagactggatgatagaattttatgccccgtggtgccctgcttgtcaaaatcttcaaccggaatgggaaagttttgctgaatggggagaagatcttgaggttaatattgcgaaagtagatgtcacagagcagccaggactgagtggacggtttatcataactgctcttcctactatttatcattgtaaagatggtgaatttaggcgctatcagggtccaaggactaagaaggacttcataaactttataagtgataaagagtggaagagtattgagcccgtttcatcatggtttggtccaggttctgttctgatgagtagtatgtcagcactctttcagctatctatgtggatcaggacgtgccataactactttattgaagaccttggattgccagtgtggggatcatatactgtttttgctttagcaactctgttttccggactgttattaggactctgtatgatatttgtggcagattgcctttgtccttcaaaaaggcgcagaccacagccatacccatacccttcaaaaaaattattatcagaatctgcacaacctttgaaaaaagtggaggaggaacaagaggcggatgaagaagatgtttcagaagaagaagctgaaagtaaagaaggaacaaacaaagactttccacagaatgccataagacaacgctctctgggtccatcattggccacagataaatcctagttaaattttatagttatcttaatattatgattttgataatattgcagggttcagtctagattgtcattaaattgaagagtctacattcagaacataaaagcactaggtatacaagtttgaaatatgatttaagcacagtatgatggtttaaatagttctctaatttttgaaaaatcgtgccaagcaataagatttatgtatatttgtttaataataacctatttcaagtctgagttttgaaaatttacatttcccaagtattgcattattgaggtatttaagaagattattttagagaaaaatatttctcatttgatataatttttctctgtttcactgtgtgaaaaaaagaagatatttcccataaatgggaagtttgcccattgtctcaagaaatgtgtatttcagtgacaatttcgtggtctttttagaggtatattccaaaatttccttgtatttttaggttatgcaactaataaaaactaccttacattaattaattacagttttctacacatggtaatacaggatatgctactgatttaggaagtttttaagttcatggtattctcttgattccaacaaagtttgattttctcttgtatttttcttacttactatgggttacattttttatttttcaaattggatgataatttcttggaaacattttttatgttttagtaaacagtatttttttgttgtttcaaactgaagtttactgagagatccatcaaattgaacaatctgttgtaatttaaaattttggccacttttttcagattttacatcattcttgctgaacttcaacttgaaattgttttttttttctttttggatgtgaaggtgaacattcctgatttttgtctgatgtgaaaaagccttggtattttacattttgaaaattcaaagaagcttaatataaaagtttgcattctactcaggaaaaagcatcttcttgtatatgtcttaaatgtatttttgtcctcatatacagaaagttcttaattgattttacagtctgtaatgcttgatgttttaaaataataacatttttatattttttaaaagacaaacttcatattatcctgtgttctttcctgactggtaatattgtgtgggatttcacaggtaaaagtcagtaggatggaacattttagtgtatttttactccttaaagagctagaatacatagttttcaccttaaaagaagggggaaaatcataaatacaatgaatcaactgaccattacgtagtagacaatttctgtaatgtccccttctttctaggctctgttgctgtgtgaatccattagatttacagtatcgtaatatacaagttttctttaaagccctctcctttagaatttaaaatattgtaccattgaagagtttggatgtgtaacttgtgatgccttagaaaaatatcctaagcacaaaataaacctttctaaccacttcattaaagctgaagaccagtatgatttctggttgctttttgaaggtatgctttattactttgtatttaacgatgttcagatgagtagttgtgtgttcctatatatgtacttgatatgtgtaatcaaaagactgccttctttttctattgagatgtttaaggacagtaatgctcattaatcaagcattttttttttttagtgttctagtatatgtgacatggccaatttttttattagaaaatatgtgaccagaaagattctatagagtaaaaaatcaaagcaaaacaaaaaccacaaaaagacccctgtactatagaaaatgtaaagttggctgaacagatagggtcttgaaatttcaggaaacatataatctcacggttcttaaagattgtc

SEQ ID NO: 301445 - DNA, 775 bp, Homo sapiens
acccctgtcatgcgcattgagagtcctctagacaggcgctcctcgcagcaccgtagtgcgcttgcgctgagcagcccgcgagggcggaagtgggagctgcgaccgcgctccctgtgaggtgggcaagcggcgaaatggcgccctccgggagtcttgcagttcccctggcagtcctggtgctgttgctttggggtgctccctggacgcacgggcggcggagcaacgttcgcgtcatcacggacgagaactggagagaactgctggaaggagactggatgatagaattttatgccccgtggtgccctgcttgtcaaaatcttcaaccggaatgggaaagttttgctgaatggggagaagatcttgaggttaatattgcgaaagtagatgtcacagagcagccaggactgagtggacggtttatcataactgctcttcctactatttatcattgtaaagatggtgaatttaggcgctatcagggtccaaggactaagaaggacttcataaactttataagtgataaagagtggaagagtattgagcccgtttcatcatggtttggtccaggttctgttctgatgagtagtatgtcagcactctttcagctatctatgtggatcaggacgtgccataactactttattgaagaccttggattgccagtgtggggatcatatactgtttttaattaatgtaaggtagtttttattagttgcataacctaaaaatacaaggaaatttcgatataccctctaaaaagaccacgaaagtgtca

SEQ ID NO: 301446 - DNA, 3190 bp, Homo sapiens
catcccagttctgtccgctgaaaaggcctagaagcaataacacaccaagccctgtcgaatggtggggtccgccaggacctccaggcttgctccccgccctacccgccagcttctccgccacattccactgccgcagcagaaccggtgtccttcacctgcctgcgtcttctgcagttcgttaagcagcgcccttagctcctgtgacactttagggagaaagccgcagcaccggcgatgttggccgccattaacgcccggcaaagcgcccggaactagaagcagcgaagaacccgggtgggcagcgaccgtgacagccgagccggaagcggagctgcgggaggggcctcgacgctcctccatcttttattggagctcaccgctgccagtcgcgctgcctgcccgtcccacccttttcgtgcaggcattcagctaaatgacgggcggagcccggcggcggcttccggtcgggggaaaaaagttgggccgaaggaggggccgggaagacgcaagaggaagaagagaaaacggccgggcggcggtggctgtaggttgtgcggctgcagcggctcttccctgggcggacgatggacagccagggcaggaaggtggtggtgtgcgacaacggcaccgggtttgtgaagtgtggatatgcaggctctaactttccagaacacatcttcccagctttggttggaagacctattatcagatcaaccaccaaagtgggaaacattgaaatcaaggatcttatggttggtgatgaggcaagtgaattacgatcaatgttagaagttaactaccctatggaaaatggcatagtacgaaattgggatgacatgaaacacctgtgggactacacatttggaccagagaaacttaatatagataccagaaattgtaaaatcttactcacagaacctcctatgaacccaaccaaaaacagagagaagattgtagaggtaatgtttgaaacttaccagttttccggtgtatatgtagccatccaggcagttctgactttgtacgctcaaggtttattgactggtgtagtggtagactctggagatggtgtgactcacatttgcccagtatatgaaggcttttctctccctcatcttaccaggagactggatattgctgggagggatataactagatatcttatcaagctacttctgttgcgaggatacgccttcaaccactctgctgattttgaaacggttcgcatgattaaagaaaaactgtgttacgtgggatataatattgagcaagagcagaaactggccttagaaaccacagtattagttgaatcttatacactcccagatggacgtatcatcaaagttgggggagagagatttgaagcaccagaagctttatttcagcctcacttgatcaatgttgaaggagttggtgttgctgaattgctttttaacacaattcaggcagctgacattgataccagatctgaattctacaaacacattgtgctttctggagggtctactatgtatcctggcctgccatcacggttggaacgagaacttaaacagctttacttagaacgagttttgaagggtgatgtggaaaaactttctaaatttaagatccgcattgaagacccaccccgcagaaagcacatggtattcctgggtggtgcagttctagcggatatcatgaaagacaaagacaacttttggatgacccgacaagagtaccaagaaaagggtgtccgtgtgctagagaaacttggtgtgactgttcgataaactccaaagcttgttcccatcatacccgtaatgctttcttttttcctttattgccaatctttgaactcattcaactccaggacatggaagaggcctctctctgccctttgactggaaaggtcaagttttattctggtgtcttggggaagctttgttaaatttttgttaatgtgggtaaatctgagtttaattcaactgcttccctacatagactagagggctaaggattctgtctgctgctttgtttcttctaagtaggcatttagatcattcctgtaggcttcctattttcactttactgctctaatgctgctagtcgtagtctttagcacactaggtggtatgcctttattagcataaaacaaaaaaaactttaacaggagcttttacatattactgggatggggggtggttcgggatgggtgggcagctgctgaaccctttagggcatttcctctgtaatgtggcgctttcaactgtactgctgcagctttaagtaccttaaagcttctcctgtgaacttcttagggaaatgttaggttcagaactaaagtgttttgggtgggttttgttgcgggggggagggtaacaatgggtggtcttctgatttttatttttgaggttttgtcaactggagtacgtagaggaactttatttacagtactttgatttggcaggttttcttctacttgtgctctgcctggagctgtttccatatgatataaaaagcaagtgtagtattccattactatgtggcttagggatttatttgttttttaaaatcaaccatgttagctgggattagactccctacagtccttcaatggaaaagtaacatttaaaaatcctttgggtaattcaaattacagatttaaaagagcttaagatctggtgttttgttaatgcttctgtttattccagaagcattaaggtaacccattgccaagtatcattcttgcaaattattcttttatataactgaccagtgcttaataaaacaagcaggtacttacaaataattactggcagtaggttataattggtggtttaaaaataacattggaatacaggacttgttgccaattgggtaattttcattagttgttttgttgttttgatttgaaacctggaaatacagtaaaatttgactgtttaaaatgttggccaaaaaaatcaagatttaatttttttatttgtactgaaaaactaatcataactgttaattctcagccatctttgaagcttgaaagaagagtctttggtattttgtaaacgttagcagactttcctgccagtgtcagaaaatcctatttatgaatcctgtcggtattccttggtatctgaaaaaaataccaaatagtaccatacatgagttatttctaagtttgaaaaataaaaagaaattgcatcacactaattac

SEQ ID NO: 301447 - DNA, 1069 bp, Homo sapiens
catcccagttctgtccgctgaaaaggcctagaagcaataacacaccaagccctgtcgaatggtggggtccgccaggacctccaggcttgctccccgccctacccgccagcttctccgccacattccactgccgcagcagaaccggtgtccttcacctgcctgcgtcttctgcagttcgttaagcagcgcccttagctcctgtgacactttagggagaaagccgcagcaccggcgatgttggccgccattaacgcccggcaaagcgcccggaactagaagcagcgaagaacccgggtgggcagcgaccgtgacagccgagccggaagcggagctgcgggaggggcctcgacgctcctccatcttttattggagctcaccgctgccagtcgcgctgcctgcccgtcccacccttttcgtgcaggcattcagctaaatgacgggcggagcccggcggcggcttccggtcgggggaaaaaagttgggccgaaggaggggccgggaagacgcaagaggaagaagagaaaacggccgggcggcggtggctgtaggttgtgcggctgcagcggctcttccctgggcggacgatggacagccagggcaggaaggtggtggtgtgcgacaacggcaccgggtttgtgaagtgtggatatgcaggctctaactttccagaacacatcttcccagctttggttggaagacctattatcagatcaaccaccaaagtgggaaacattgaaatcaagcaatctgattcttagctcttgaaactattgctacttaaatttccaataattaaaaatttaaaatttttaaattagaattgccaatacttctacatttgagaagggtttttttagaaatacatttagtaaagtccccaagacattagtcttacatttaaacttttttctttaaaacatggttttggtggttaacttttacacagttctgagtactgttaatatctggaaagtatcttgagatatcagtggaaagctaaacagtctaaattaacatgaaatacttcattttgattgagaaaataaaatcagattttttcaaaagtcaa

SEQ ID NO: 301448 - DNA, 717 bp, Homo sapiens
catcccagttctgtccgctgaaaaggcctagaagcaataacacaccaagccctgtcgaatggtggggtccgccaggacctccaggcttgctccccgccctacccgccagcttctccgccacattccactgccgcagcagaaccggtgtccttcacctgcctgcgtcttctgcagttcgttaagcagcgcccttagctcctgtgacactttagggagaaagccgcagcaccggcgatgttggccgccattaacgcccggcaaagcgcccggaactagaagcagcgaagaacccgggtgggcagcgaccgtgacagccgagccggaagcggagctgcgggaggggcctcgacgctcctccatcttttattggagctcaccgctgccagtcgcgctgcctgcccgtcccacccttttcgtgcaggcattcagctaaatgacgggcggagcccggcggcggcttccggtcgggggaaaaaagttgggccgaaggaggggccgggaagacgcaagaggaagaagagaaaacggccgggcggcggtggctgtaggttgtgcggctgcagcggctcttccctgggcggacgatggacagccagggcaggaaggtggtggtgtgcgacaacggcaccggggtaagggccgcgcgaggaggccttggcggccacagacgccggcggggacgagcagctggcgcacgggccctcggcccccagggct

SEQ ID NO: 301449 - DNA, 819 bp, Homo sapiens
catcccagttctgtccgctgaaaaggcctagaagcaataacacaccaagccctgtcgaatggtggggtccgccaggacctccaggcttgctccccgccctacccgccagcttctccgccacattccactgccgcagcagaaccggtgtccttcacctgcctgcgtcttctgcagttcgttaagcagcgcccttagctcctgtgacactttagggagaaagccgcagcaccggcgatgttggccgccattaacgcccggcaaagcgcccggaactagaagcagcgaagaacccgggtgggcagcgaccgtgacagccgagccggaagcggagctgcgggaggggcctcgacgctcctccatcttttattggagctcaccgctgccagtcgcgctgcctgcccgtcccacccttttcgtgcaggcattcagctaaatgacgggcggagcccggcggcggcttccggtcgggggaaaaaagttgggccgaaggaggggccgggaagacgcaagaggaagaagagaaaacggccgggcggcggtggctgtaggttgtgcggctgcagcggctcttccctgggcggacgatggacagccagggcaggaaggtggtggtgtgcgacaacggcaccgggtttgtgaagtgtggatatgcaggctctaactttccagaacacatcttcccagctttggttggaagacctattatcagatcaaccaccaaagtgggaaacattgaaatcaaggagacagaggttgcagtgagccgagatcgtgccattgcactccagcctgggcgacaagagaaactctgtctcaatc

SEQ ID NO: 301450 - DNA, 655 bp, Homo sapiens
taaaagactgactgttcataaactgctacccagtagacaaaattaattgacaccaagtaatactttccagatttcacttaaatcagctataccagaaattgtaaaatcttactcacagaacctcctatgaacccaaccaaaaacagagagaagattgtagaggtgagtttttatgcaggatatgcatatgtgtatttctgtgatattatgttaaatcaaaaattttcttactgttgctatggataaagagaataaaaataattgttttccttcagatcttattaagtatctactatatgctagtcattattctaagtaggaaagtaggatagatcagtaaacaaaaaatcctactgccatggagtgtatatattctaacagggaaaaacagaccaaaaaaattaagtttttaatttagtgagttaattaagttaattaagtttttatggaggagccagcagaaggagactgaaaaggctaatacaataagcagttacagagttaattaaatggtttgttagaaggtgagtgatccagttgacccatgagcaatgcaggggttaggggcaccaaccctccctactcacgtgcaaacttaactaccacccaaaatacttaacttctaatagcctactgttgaccagaagccttactg

SEQ ID NO: 301451 - DNA, 4288 bp, Homo sapiens
catcccagttctgtccgctgaaaaggcctagaagcaataacacaccaagccctgtcgaatggtggggtccgccaggacctccaggcttgctccccgccctacccgccagcttctccgccacattccactgccgcagcagaaccggtgtccttcacctgcctgcgtcttctgcagttcgttaagcagcgcccttagctcctgtgacactttagggagaaagccgcagcaccggcgatgttggccgccattaacgcccggcaaagcgcccggaactagaagcagcgaagaacccgggtgggcagcgaccgtgacagccgagccggaagcggagctgcgggaggggcctcgacgctcctccatcttttattggagctcaccgctgccagtcgcgctgcctgcccgtcccacccttttcgtgcaggcattcagctaaatgacgggcggagcccggcggcggcttccggtcgggggaaaaaagttgggccgaaggaggggccgggaagacgcaagaggaagaagagaaaacggccgggcggcggtggctgtaggttgtgcggctgcagcggctcttccctgggcggacgatggacagccagggcaggaaggtggtggtgtgcgacaacggcaccgggtttgtgaagtgtggatatgcaggctctaactttccagaacacatcttcccagctttggttggaagacctattatcagatcaaccaccaaagtgggaaacattgaaatcaaggatcttatggttggtgatgaggcaagtgaattacgatcaatgttagaagttaactaccctatggaaaatggcatagtacgaaattgggatgacatgaaacacctgtgggactacacatttggaccagagaaacttaatatagataccagaaattgtaaaatcttactcacagaacctcctatgaacccaaccaaaaacagagagaagattgtagaggtaatgtttgaaacttaccagttttccggtgtatatgtagccatccaggcagttctgactttgtacgctcaaggtttattgactggtgtagtggtagactctggagatggtgtgactcacatttgcccagtatatgaaggcttttctctccctcatcttaccaggagactggatattgctgggagggatataactagatatcttatcaagctacttctgttgcgaggatacgccttcaaccactctgctgattttgaaacggttcgcatgattaaagaaaaactgtgttacgtgggatataatattgagcaagagcagaaactggccttagaaaccacagtattagttgaatcttatacactcccagatggacgtatcatcaaagttgggggagagagatttgaagcaccagaagctttatttcagcctcacttgatcaatgttgaaggagttggtgttgctgaattgctttttaacacaattcaggcagctgacattgataccagatctgaattctacaaacacattgtgctttctggagggtctactatgtatcctggcctgccatcacggttggaacgagaacttaaacagctttacttagaacgagttttgaagggtgatgtggaaaaactttctaaatttaagatccgcattgaagacccaccccgcagaaagcacatggtattcctgggtggtgcagttctagcggatatcatgaaagacaaagacaacttttggatgacccgacaagagtaccaagaaaagggtgtccgtgtgctagagaaacttggtgtgactgttcgataaactccaaagcttgttcccatcatacccgtaatgctttcttttttcctttattgccaatctttgaactcattcaactccaggacatggaagaggcctctctctgccctttgactggaaaggtcaagttttattctggtgtcttggggaagctttgttaaatttttgttaatgtgggtaaatctgagtttaattcaactgcttccctacatagactagagggctaaggattctgtctgctgctttgtttcttctaagtaggcatttagatcattcctgtaggcttcctattttcactttactgctctaatgctgctagtcgtagtctttagcacactaggtggtatgcctttattagcataaaacaaaaaaaactttaacaggagcttttacatattactgggatggggggtggttcgggatgggtgggcagctgctgaaccctttagggcatttcctctgtaatgtggcgctttcaactgtactgctgcagctttaagtaccttaaagcttctcctgtgaacttcttagggaaatgttaggttcagaactaaagtgttttgggtgggttttgttgcgggggggagggtaacaatgggtggtcttctgatttttatttttgaggttttgtcaactggagtacgtagaggaactttatttacagtactttgatttggcaggttttcttctacttgtgctctgcctggagctgtttccatatgatataaaaagcaagtgtagtattccattactatgtggcttagggatttatttgttttttaaaatcaaccatgttagctgggattagactccctacagtccttcaatggaaaagtaacatttaaaaatcctttgggtaattcaaattacagatttaaaagagcttaagatctggtgttttgttaatgcttctgtttattccagaagcattaaggtaacccattgccaagtatcattcttgcaaattattcttttatataactgaccagtgcttaataaaacaagcaggtacttacaaataattactggcagtaggttataattggtggtttaaaaataacattggaatacaggacttgttgccaattgggtaattttcattagttgttttgttgttttgatttgaaacctggaaatacagtaaaatttgactgtttaaaatgttggccaaaaaaatcaagatttaatttttttatttgtactgaaaaactaatcataactgttaattctcagccatctttgaagcttgaaagaagagtctttggtattttgtaaacgttagcagactttcctgccagtgtcagaaaatcctatttatgaatcctgtcggtattccttggtatctgaaaaaaataccaaatagtaccatacatgagttatttctaagtttgaaaaataaaaagaaattgcatcacactaattacaaaatacaagttctggaaaaaatatttttcttcattttaaaacttttttttaactaataatggctttgaaagaagaggcttaatttgggggtggtaactaaaatcaaaagaaatgattgacttgagggtctctgtttggtaagaatacatcattagcttaaataagcagcagaaggttagttttaattatgtagcttctgttaatattaagtgttttttgtctgttttacctcaatttgaacagataagtttgcctgcatgctggacatgcctcagaaccatgaatagcccgtactagatcttgggaacatggatcttagagtcactttggaataagttcttatataaatacccccagccttttgagaacggggcttgttaaaggacgcgtatgtagggcccgtacctactggcagttgggttcagggaaatgggattgacttggccttcaggctcctttggtcataattttaaaatatgggagtagaaaacaacaaagaatggaatggactcttaaaacaatgaaagagcatttatcgtttgtcccttgaatgtagaatttgtttttgatttcataattctgctggtaaatgtgacagttaaaatggtgcattatgtatatatattataatttagaaataccattttataattttactattccagggtgacataatgcatttaaatttgggatttgggtggagtattatgtttaactggagttgtcaagtatgagtccctcaggaaaaaaaaaaaattctgttttaaaaagcaatctgattcttagctcttgaaactattgctacttaaatttccaataattaaaaatttaaaatttttaaattagaattgccaatacttctacatttgagaagggtttttttagaaatacatttagtaaagtccccaagacattagtcttacatttaaacttttttctttaaaacatggttttggtggttaacttttacacagttctgagtactgttaatatctggaaagtatcttgagatatcagtggaaagctaaacagtctaaattaacatgaaatacttcattttgattgagaaaataaaatcagattttttcaaaagtcaa

SEQ ID NO: 301452 - DNA, 3932 bp, Homo sapiens
ttccgggtgggggcggcgggcgagaccggcactggacatggagcctactgaccgcccggcagggacctgctccgcgctaatgcgggggcaattgggctaaagcggacggaagcgtaaaaggctcggtttgtgtgttccgagaagggctcttttccccagggccaccggtttgtaaaaaggagaaagacctagaggccttcctcttcctgtatagttgaagatacaccaaacgagaagcaggaagcgggtttacttaaaaaaaaaaaaaaaaaaaggtttgtgaagtgtggatatgcaggctctaactttccagaacacatcttcccagctttggttggaagacctattatcagatcaaccaccaaagtgggaaacattgaaatcaaggatcttatggttggtgatgaggcaagtgaattacgatcaatgttagaagttaactaccctatggaaaatggcatagtacgaaattgggatgacatgaaacacctgtgggactacacatttggaccagagaaacttaatatagataccagaaattgtaaaatcttactcacagaacctcctatgaacccaaccaaaaacagagagaagattgtagaggtaatgtttgaaacttaccagttttccggtgtatatgtagccatccaggcagttctgactttgtacgctcaaggtttattgactggtgtagtggtagactctggagatggtgtgactcacatttgcccagtatatgaaggcttttctctccctcatcttaccaggagactggatattgctgggagggatataactagatatcttatcaagctacttctgttgcgaggatacgccttcaaccactctgctgattttgaaacggttcgcatgattaaagaaaaactgtgttacgtgggatataatattgagcaagagcagaaactggccttagaaaccacagtattagttgaatcttatacactcccagatggacgtatcatcaaagttgggggagagagatttgaagcaccagaagctttatttcagcctcacttgatcaatgttgaaggagttggtgttgctgaattgctttttaacacaattcaggcagctgacattgataccagatctgaattctacaaacacattgtgctttctggagggtctactatgtatcctggcctgccatcacggttggaacgagaacttaaacagctttacttagaacgagttttgaagggtgatgtggaaaaactttctaaatttaagatccgcattgaagacccaccccgcagaaagcacatggtattcctgggtggtgcagttctagcggatatcatgaaagacaaagacaacttttggatgacccgacaagagtaccaagaaaagggtgtccgtgtgctagagaaacttggtgtgactgttcgataaactccaaagcttgttcccatcatacccgtaatgctttcttttttcctttattgccaatctttgaactcattcaactccaggacatggaagaggcctctctctgccctttgactggaaaggtcaagttttattctggtgtcttggggaagctttgttaaatttttgttaatgtgggtaaatctgagtttaattcaactgcttccctacatagactagagggctaaggattctgtctgctgctttgtttcttctaagtaggcatttagatcattcctgtaggcttcctattttcactttactgctctaatgctgctagtcgtagtctttagcacactaggtggtatgcctttattagcataaaacaaaaaaaactttaacaggagcttttacatattactgggatggggggtggttcgggatgggtgggcagctgctgaaccctttagggcatttcctctgtaatgtggcgctttcaactgtactgctgcagctttaagtaccttaaagcttctcctgtgaacttcttagggaaatgttaggttcagaactaaagtgttttgggtgggttttgttgcgggggggagggtaacaatgggtggtcttctgatttttatttttgaggttttgtcaactggagtacgtagaggaactttatttacagtactttgatttggcaggttttcttctacttgtgctctgcctggagctgtttccatatgatataaaaagcaagtgtagtattccattactatgtggcttagggatttatttgttttttaaaatcaaccatgttagctgggattagactccctacagtccttcaatggaaaagtaacatttaaaaatcctttgggtaattcaaattacagatttaaaagagcttaagatctggtgttttgttaatgcttctgtttattccagaagcattaaggtaacccattgccaagtatcattcttgcaaattattcttttatataactgaccagtgcttaataaaacaagcaggtacttacaaataattactggcagtaggttataattggtggtttaaaaataacattggaatacaggacttgttgccaattgggtaattttcattagttgttttgttgttttgatttgaaacctggaaatacagtaaaatttgactgtttaaaatgttggccaaaaaaatcaagatttaatttttttatttgtactgaaaaactaatcataactgttaattctcagccatctttgaagcttgaaagaagagtctttggtattttgtaaacgttagcagactttcctgccagtgtcagaaaatcctatttatgaatcctgtcggtattccttggtatctgaaaaaaataccaaatagtaccatacatgagttatttctaagtttgaaaaataaaaagaaattgcatcacactaattacaaaatacaagttctggaaaaaatatttttcttcattttaaaacttttttttaactaataatggctttgaaagaagaggcttaatttgggggtggtaactaaaatcaaaagaaatgattgacttgagggtctctgtttggtaagaatacatcattagcttaaataagcagcagaaggttagttttaattatgtagcttctgttaatattaagtgttttttgtctgttttacctcaatttgaacagataagtttgcctgcatgctggacatgcctcagaaccatgaatagcccgtactagatcttgggaacatggatcttagagtcactttggaataagttcttatataaatacccccagccttttgagaacggggcttgttaaaggacgcgtatgtagggcccgtacctactggcagttgggttcagggaaatgggattgacttggccttcaggctcctttggtcataattttaaaatatgggagtagaaaacaacaaagaatggaatggactcttaaaacaatgaaagagcatttatcgtttgtcccttgaatgtagaatttgtttttgatttcataattctgctggtaaatgtgacagttaaaatggtgcattatgtatatatattataatttagaaataccattttataattttactattccagggtgacataatgcatttaaatttgggatttgggtggagtattatgtttaactggagttgtcaagtatgagtccctcaggaaaaaaaaaaaattctgttttaaaaagcaatctgattcttagctcttgaaactattgctacttaaatttccaataattaaaaatttaaaatttttaaattagaattgccaatacttctacatttgagaagggtttttttagaaatacatttagtaaagtccccaagacattagtcttacatttaaacttttttctttaaaacatggttttggtggttaacttttacacagttctgagtactgttaatatctggaaagtatcttgagatatcagtggaaagctaaacagtctaaattaacatgaaatacttcattttgattgagaaaataaaatcagattttttcaaaagtcaa

SEQ ID NO: 301453 - DNA, 4192 bp, Homo sapiens
atttgcctatatcttaattttttataactctacaaattctcattcaccttggtgaggcatatgtagaaacagtttaaattcttattcaggcatatgtagatagaagtttgtgctatttataagttagttggtgtatgtatgcattattatagagtaataaagaatcattttattttttgcttctttcattatgctttatagtacttacatttatcattttgatatttagtgcaaagaaatgtgctgcatgcattgagcatttttctacaagtttttttccccctgatgtgctatttcacatatcacaggccttattttttgaacaattgagcaaaagaaacagatgaaacctcatacaaaaccctccaaaatatgaaaatgtggggtttatttgtgctaatgctcttcttttggaaacatttgtgttaaaggtaaggtcaatttattgatttaaaccacattgtatgtaaaaatgtattatccatgattaaactttctaagacattgttcttgatagaaaagattttctaacttgtggaataaaaagatttattttgcaagtgtcagaaatattaaaattaattattcccaagttttcttaaatattatgcaaaactttgatctacagctttgacataattttctaggatcttatggttggtgatgaggcaagtgaattacgatcaatgttagaagttaactaccctatggaaaatggcatagtacgaaattgggatgacatgaaacacctgtgggactacacatttggaccagagaaacttaatatagataccagaaattgtaaaatcttactcacagaacctcctatgaacccaaccaaaaacagagagaagattgtagaggtaatgtttgaaacttaccagttttccggtgtatatgtagccatccaggcagttctgactttgtacgctcaaggtttattgactggtgtagtggtagactctggagatggtgtgactcacatttgcccagtatatgaaggcttttctctccctcatcttaccaggagactggatattgctgggagggatataactagatatcttatcaagctacttctgttgcgaggatacgccttcaaccactctgctgattttgaaacggttcgcatgattaaagaaaaactgtgttacgtgggatataatattgagcaagagcagaaactggccttagaaaccacagtattagttgaatcttatacactcccagatggacgtatcatcaaagttgggggagagagatttgaagcaccagaagctttatttcagcctcacttgatcaatgttgaaggagttggtgttgctgaattgctttttaacacaattcaggcagctgacattgataccagatctgaattctacaaacacattgtgctttctggagggtctactatgtatcctggcctgccatcacggttggaacgagaacttaaacagctttacttagaacgagttttgaagggtgatgtggaaaaactttctaaatttaagatccgcattgaagacccaccccgcagaaagcacatggtattcctgggtggtgcagttctagcggatatcatgaaagacaaagacaacttttggatgacccgacaagagtaccaagaaaagggtgtccgtgtgctagagaaacttggtgtgactgttcgataaactccaaagcttgttcccatcatacccgtaatgctttcttttttcctttattgccaatctttgaactcattcaactccaggacatggaagaggcctctctctgccctttgactggaaaggtcaagttttattctggtgtcttggggaagctttgttaaatttttgttaatgtgggtaaatctgagtttaattcaactgcttccctacatagactagagggctaaggattctgtctgctgctttgtttcttctaagtaggcatttagatcattcctgtaggcttcctattttcactttactgctctaatgctgctagtcgtagtctttagcacactaggtggtatgcctttattagcataaaacaaaaaaaactttaacaggagcttttacatattactgggatggggggtggttcgggatgggtgggcagctgctgaaccctttagggcatttcctctgtaatgtggcgctttcaactgtactgctgcagctttaagtaccttaaagcttctcctgtgaacttcttagggaaatgttaggttcagaactaaagtgttttgggtgggttttgttgcgggggggagggtaacaatgggtggtcttctgatttttatttttgaggttttgtcaactggagtacgtagaggaactttatttacagtactttgatttggcaggttttcttctacttgtgctctgcctggagctgtttccatatgatataaaaagcaagtgtagtattccattactatgtggcttagggatttatttgttttttaaaatcaaccatgttagctgggattagactccctacagtccttcaatggaaaagtaacatttaaaaatcctttgggtaattcaaattacagatttaaaagagcttaagatctggtgttttgttaatgcttctgtttattccagaagcattaaggtaacccattgccaagtatcattcttgcaaattattcttttatataactgaccagtgcttaataaaacaagcaggtacttacaaataattactggcagtaggttataattggtggtttaaaaataacattggaatacaggacttgttgccaattgggtaattttcattagttgttttgttgttttgatttgaaacctggaaatacagtaaaatttgactgtttaaaatgttggccaaaaaaatcaagatttaatttttttatttgtactgaaaaactaatcataactgttaattctcagccatctttgaagcttgaaagaagagtctttggtattttgtaaacgttagcagactttcctgccagtgtcagaaaatcctatttatgaatcctgtcggtattccttggtatctgaaaaaaataccaaatagtaccatacatgagttatttctaagtttgaaaaataaaaagaaattgcatcacactaattacaaaatacaagttctggaaaaaatatttttcttcattttaaaacttttttttaactaataatggctttgaaagaagaggcttaatttgggggtggtaactaaaatcaaaagaaatgattgacttgagggtctctgtttggtaagaatacatcattagcttaaataagcagcagaaggttagttttaattatgtagcttctgttaatattaagtgttttttgtctgttttacctcaatttgaacagataagtttgcctgcatgctggacatgcctcagaaccatgaatagcccgtactagatcttgggaacatggatcttagagtcactttggaataagttcttatataaatacccccagccttttgagaacggggcttgttaaaggacgcgtatgtagggcccgtacctactggcagttgggttcagggaaatgggattgacttggccttcaggctcctttggtcataattttaaaatatgggagtagaaaacaacaaagaatggaatggactcttaaaacaatgaaagagcatttatcgtttgtcccttgaatgtagaatttgtttttgatttcataattctgctggtaaatgtgacagttaaaatggtgcattatgtatatatattataatttagaaataccattttataattttactattccagggtgacataatgcatttaaatttgggatttgggtggagtattatgtttaactggagttgtcaagtatgagtccctcaggaaaaaaaaaaaattctgttttaaaaagcaatctgattcttagctcttgaaactattgctacttaaatttccaataattaaaaatttaaaatttttaaattagaattgccaatacttctacatttgagaagggtttttttagaaatacatttagtaaagtccccaagacattagtcttacatttaaacttttttctttaaaacatggttttggtggttaacttttacacagttctgagtactgttaatatctggaaagtatcttgagatatcagtggaaagctaaacagtctaaattaacatgaaatacttcattttgattgagaaaataaaatcagattttttcaaaagtcaa

SEQ ID NO: 301454 - DNA, 4565 bp, Homo sapiens
  misc_feature (4306)..(4306): n is a, c, g, or t
  misc_feature (4308)..(4308): n is a, c, g, or t
catcccagttctgtccgctgaaaaggcctagaagcaataacacaccaagccctgtcgaatggtggggtccgccaggacctccaggcttgctccccgccctacccgccagcttctccgccacattccactgccgcagcagaaccggtgtccttcacctgcctgcgtcttctgcagttcgttaagcagcgcccttagctcctgtgacactttagggagaaagccgcagcaccggcgatgttggccgccattaacgcccggcaaagcgcccggaactagaagcagcgaagaacccgggtgggcagcgaccgtgacagccgagccggaagcggagctgcgggaggggcctcgacgctcctccatcttttattggagctcaccgctgccagtcgcgctgcctgcccgtcccacccttttcgtgcaggcattcagctaaatgacgggcggagcccggcggcggcttccggtcgggggaaaaaagttgggccgaaggaggggccgggaagacgcaagaggaagaagagaaaacggccgggcggcggtggctgtaggttgtgcggctgcagcggctcttccctgggcggacgatggacagccagggcaggaaggtggtggtgtgcgacaacggcaccgggtttgtgaagtgtggatatgcaggctctaactttccagaacacatcttcccagctttggttggaagacctattatcagatcaaccaccaaagtgggaaacattgaaatcaaggatcttatggttggtgatgaggcaagtgaattacgatcaatgttagaagttaactaccctatggaaaatggcatagtacgaaattgggatgacatgaaacacctgtgggactacacatttggaccagagaaacttaatatagataccagaaattgtaaaatcttactcacagaacctcctatgaacccaaccaaaaacagagagaagattgtagaggtaatgtttgaaacttaccagttttccggtgtatatgtagccatccaggcagttctgactttgtacgctcaaggtttattgactggtgtagtggtagactctggagatggtgtgactcacatttgcccagtatatgaaggcttttctctccctcatcttaccaggagactggatattgctgggagggatataactagatatcttatcaagctacttctgttgcgaggatacgccttcaaccactctgctgattttgaaacggttcgcatgattaaagaaaaactgtgttacgtgggatataatattgagcaagagcagaaactggccttagaaaccacagtattagttgaatcttatacactcccagatggacgtatcatcaaagttgggggagagagatttgaagcaccagaagctttatttcagcctcacttgatcaatgttgaaggagttggtgttgctgaattgctttttaacacaattcaggcagctgacattgataccagatctgaattctacaaacacattgtgctttctggagggtctactatgtatcctggcctgccatcacggttggaacgagaacttaaacagctttacttagaacgagttttgaagggtgatgtggaaaaactttctaaatttaagatccgcattgaagacccaccccgcagaaagcacatggtattcctgggtggtgcagttctagcggatatcatgaaagacaaagacaacttttggatgacccgacaagagtaccaagaaaagggtgtccgtgtgctagagaaacttggtgtgactgttcgataaactccaaagcttgttcccatcatacccgtaatgctttcttttttcctttattgccaatctttgaactcattcaactccaggacatggaagaggcctctctctgccctttgactggaaaggtcaagttttattctggtgtcttggggaagctttgttaaatttttgttaatgtgggtaaatctgagtttaattcaactgcttccctacatagactagagggctaaggattctgtctgctgctttgtttcttctaagtaggcatttagatcattcctgtaggcttcctattttcactttactgctctaatgctgctagtcgtagtctttagcacactaggtggtatgcctttattagcataaaacaaaaaaaactttaacaggagcttttacatattactgggatggggggtggttcgggatgggtgggcagctgctgaaccctttagggcatttcctctgtaatgtggcgctttcaactgtactgctgcagctttaagtaccttaaagcttctcctgtgaacttcttagggaaatgttaggttcagaactaaagtgttttgggtgggttttgttgcgggggggagggtaacaatgggtggtcttctgatttttatttttgaggttttgtcaactggagtacgtagaggaactttatttacagtactttgatttggcaggttttcttctacttgtgctctgcctggagctgtttccatatgatataaaaagcaagtgtagtattccattactatgtggcttagggatttatttgttttttaaaatcaaccatgttagctgggattagactccctacagtccttcaatggaaaagtaacatttaaaaatcctttgggtaattcaaattacagatttaaaagagcttaagatctggtgttttgttaatgcttctgtttattccagaagcattaaggtaacccattgccaagtatcattcttgcaaattattcttttatataactgaccagtgcttaataaaacaagcaggtacttacaaataattactggcagtaggttataattggtggtttaaaaataacattggaatacaggacttgttgccaattgggtaattttcattagttgttttgttgttttgatttgaaacctggaaatacagtaaaatttgactgtttaaaatgttggccaaaaaaatcaagatttaatttttttatttgtactgaaaaactaatcataactgttaattctcagccatctttgaagcttgaaagaagagtctttggtattttgtaaacgttagcagactttcctgccagtgtcagaaaatcctatttatgaatcctgtcggtattccttggtatctgaaaaaaataccaaatagtaccatacatgagttatttctaagtttgaaaaataaaaagaaattgcatcacactaattacaaaatacaagttctggaaaaaatatttttcttcattttaaaacttttttttaactaataatggctttgaaagaagaggcttaatttgggggtggtaactaaaatcaaaagaaatgattgacttgagggtctctgtttggtaagaatacatcattagcttaaataagcagcagaaggttagttttaattatgtagcttctgttaatattaagtgttttttgtctgttttacctcaatttgaacagataagtttgcctgcatgctggacatgcctcagaaccatgaatagcccgtactagatcttgggaacatggatcttagagtcactttggaataagttcttatataaatacccccagccttttgagaacggggcttgttaaaggacgcgtatgtagggcccgtacctactggcagttgggttcagggaaatgggattgacttggccttcaggctcctttggtcataattttaaaatatgggagtagaaaacaacaaagaatggaatggactcttaaaacaatgaaagagcatttatcgtttgtcccttgaatgtagaatttgtttttgatttcataattctgctggtaaatgtgacagttaaaatggtgcattatgtatatatattataatttagaaataccattttataattttactattccagggtgacataatgcatttaaatttgggatttgggtggagtattatgtttaactggagttgtcaagtatgagtccctcaggaaaaaaaaaaaattctgttttaaaaagcaatctgattcttagctcttgaaactattgctacttaaatttccaataattaaaaatttaaaatttttaaattagaattgccaatacttctacatttgagaagggtttttttagaaatacatttagtaaagtccccaagacattagtcttacatttaaacttttttctttaaaacatggttttggtggttaacttttacacagttctgagtactgttaatatctggaaagtatcttgagatatcagtggaaagctaaacagtctaaattaacatgaaatacttcattttgattgagaaaataaaatcagattttttcaaaagtcaaacaaccaaaccacaacananacaaaaaacattgttggcgggcgcctccgggccgtaaagagaggtctcaaaaaccatcccggtgggccgccggcgccccagatatgtgacgtgacgcacctcggcgcaaaacgcgtggtcccaagagagaaccctgcggcatcaccacaggctgcgtggttcccccacaaataaaaaaaacccgcggggggacacccgcgcgtctggacaacactcccgatggggtccagggcgcacagcggatctacaacaccggg

SEQ ID NO: 301455 - DNA, 4234 bp, Homo sapiens
catcccagttctgtccgctgaaaaggcctagaagcaataacacaccaagccctgtcgaatggtggggtccgccaggacctccaggcttgctccccgccctacccgccagcttctccgccacattccactgccgcagcagaaccggtgtccttcacctgcctgcgtcttctgcagttcgttaagcagcgcccttagctcctgtgacactttagggagaaagccgcagcaccggcgatgttggccgccattaacgcccggcaaagcgcccggaactagaagcagcgaagaacccgggtgggcagcgaccgtgacagccgagccggaagcggagctgcgggaggggcctcgacgctcctccatcttttattggagctcaccgctgccagtcgcgctgcctgcccgtcccacccttttcgtgcaggcattcagctaaatgacgggcggagcccggcggcggcttccggtcgggggaaaaaagttgggccgaaggaggggccgggaagacgcaagaggaagaagagaaaacggccgggcggcggtggctgtaggttgtgcggctgcagcggctcttccctgggcggacgatggacagccagggcaggaaggtggtggtgtgcgacaacggcaccgggtttgtgaagtgtggatatgcaggctctaactttccagaacacatcttcccagctttggttggaagacctattatcagatcaaccaccaaagtgggaaacattgaaatcaaggatcttatggttggtgatgaggcaagtgaattacgatcaatgttagaagttaactaccctatggaaaatggcatagtacgaaattgggatgacatgaaacacctgtgggactacacatttggaccagagaaacttaatatagataccagaaattgtaaaatcttactcacagaacctcctatgaacccaaccaaaaacagagagaagattgtagaggtaatgtttgaaacttaccagttttccggtgtatatgtagccatccaggcagttctgactttgtacgctcaaggtttattgactggtgtagtggtagactctggagatggtgtgactcacatttgcccagtatatgaaggcttttctctccctcatcttaccaggagactggatattgctgggagggatataactagatatcttatcaagctacttctgttgcgaggatacgccttcaaccactctgctgattttgaaacggttcgcatgattaaagaaaaactgtgttacgtgggatataatattgagcaagagcagaaactggccttagaaaccacagtattagttgaatcttatacactcccagatggacgtatcatcaaagttgggggagagagatttgaagcaccagaagctttatttcagcctcacttgatcaatgttgaaggagttggtgttgctgaattgctttttaacacaattcaggcagctgacattgataccagatctgaattctacaaacacattgtgctttctggagggtctactatgtatcctggcctgccatcacggttggaacgagaacttaaacagctttacttagaacgagttttgaagggtgatgtggaaaaactttctaaatttaagatccgcattgaagacccaccccgcagaaagcacatggtattcctgggtggtgcagttctagcggatatcatgaaagacaaagacaacttttggatgacccgacaagagtaccaagaaaagggtgtccgtgtgctagagaaacttggtgtgactgttcgataaactccaaagcttgttcccatcatacccgtaatgctttcttttttcctttattgccaatctttgaactcattcaactccaggacatggaagaggcctctctctgccctttgactggaaaggtcaagttttattctggtgtcttggggaagctttgttaaatttttgttaatgtgggtaaatctgagtttaattcaactgcttccctacatagactagagggctaaggattctgtctgctgctttgtttcttctaagtaggcatttagatcattcctgtaggcttcctattttcactttactgctctaatgctgctagtcgtagtctttagcacactaggtggtatgcctttattagcataaaacaaaaaaaactttaacaggagcttttacatattactgggatggggggtggttcgggatgggtgggcagctgctgaaccctttagggcatttcctctgtaatgtggcgctttcaactgtactgctgcagctttaagtaccttaaagcttctcctgtgaacttcttagggaaatgttaggttcagaactaaagtgttttgggtgggttttgttgcgggggggagggtaacaatgggtggtcttctgatttttatttttgaggttttgtcaactggagtacgtagaggaactttatttacagtactttgatttggcaggttttcttctacttgtgctctgcctggagctgtttccatatgatataaaaagcaagtgtagtattccattactatgtggcttagggatttatttgttttttaaaatcaaccatgttagctgggattagactccctacagtccttcaatggaaaagtaacatttaaaaatcctttgggtaattcaaattacagatttaaaagagcttaagatctggtgttttgttaatgcttctgtttattccagaagcattaaggtaacccattgccaagtatcattcttgcaaattattcttttatataactgaccagtgcttaataaaacaagcaggtacttacaaataattactggcagtaggttataattggtggtttaaaaataacattggaatacaggacttgttgccaattgggtaattttcattagttgttttgttgttttgatttgaaacctggaaatacagtaaaatttgactgtttaaaatgttggccaaaaaaatcaagatttaatttttttatttgtactgaaaaactaatcataactgttaattctcagccatctttgaagcttgaaagaagagtctttggtattttgtaaacgttagcagactttcctgccagtgtcagaaaatcctatttatgaatcctgtcggtattccttggtatctgaaaaaaataccaaatagtaccatacatgagttatttctaagtttgaaaaataaaaagaaattgcatcacactaattacaaaatacaagttctggaaaaaatatttttcttcattttaaaacttttttttaactaataatggctttgaaagaagaggcttaatttgggggtggtaactaaaatcaaataagcagcagaaggttagttttaattatgtagcttctgttaatattaagtgttttttgtctgttttacctcaatttgaacagataagtttgcctgcatgctggacatgcctcagaaccatgaatagcccgtactagatcttgggaacatggatcttagagtcactttggaataagttcttatataaatacccccagccttttgagaacggggcttgttaaaggacgcgtatgtagggcccgtacctactggcagttgggttcagggaaatgggattgacttggccttcaggctcctttggtcataattttaaaatatgggagtagaaaacaacaaagaatggaatggactcttaaaacaatgaaagagcatttatcgtttgtcccttgaatgtagaatttgtttttgatttcataattctgctggtaaatgtgacagttaaaatggtgcattatgtatatatattataatttagaaataccattttataattttactattccagggtgacataatgcatttaaatttgggatttgggtggagtattatgtttaactggagttgtcaagtatgagtccctcaggaaaaaaaaaaaattctgttttaaaaagcaatctgattcttagctcttgaaactattgctacttaaatttccaataattaaaaatttaaaatttttaaattagaattgccaatacttctacatttgagaagggtttttttagaaatacatttagtaaagtccccaagacattagtcttacatttaaacttttttctttaaaacatggttttggtggttaacttttacacagttctgagtactgttaatatctggaaagtatcttgagatatcagtggaaagctaaacagtctaaattaacatgaaatacttcattttgattgagaaaataaaatcagattttttcaaaagtcaa

SEQ ID NO: 301456 - DNA, 4308 bp, Homo sapiens
catcccagttctgtccgctgaaaaggcctagaagcaataacacaccaagccctgtcgaatggtggggtccgccaggacctccaggcttgctccccgccctacccgccagcttctccgccacattccactgccgcagcagaaccggtgtccttcacctgcctgcgtcttctgcagttcgttaagcagcgcccttagctcctgtgacactttagggagaaagccgcagcaccggcgatgttggccgccattaacgcccggcaaagcgcccggaactagaagcagcgaagaacccgggtgggcagcgaccgtgacagccgagccggaagcggagctgcgggaggggcctcgacgctcctccatcttttattggagctcaccgctgccagtcgcgctgcctgcccgtcccacccttttcgtgcaggcattcagctaaatgacgggcggagcccggcggcggcttccggtcgggggaaaaaagttgggccgaaggaggggccgggaagacgcaagaggaagaagagaaaacggccgggcggcggtggctgtaggttgtgcggctgcagcggctcttccctgggcggacgatggacagccagggcaggaaggtggtggtgtgcgacaacggcaccgggtttgtgaagtgtggatatgcaggctctaactttccagaacacatcttcccagctttggttggaagacctattatcagatcaaccaccaaagtgggaaacattgaaatcaaggatcttatggttggtgatgaggcaagtgaattacgatcaatgttagaagttaactaccctatggaaaatggcatagtacgaaattgggatgacatgaaacacctgtgggactacacatttggaccagagaaacttaatatagataccagaaattgtaaaatcttactcacagaacctcctatgaacccaaccaaaaacagagagaagattgtagaggtaatgtttgaaacttaccagttttccggtgtatatgtagccatccaggcagttctgactttgtacgctcaaggtttattgactggtgtagtggtagactctggagatggtgtgactcacatttgcccagtatatgaaggcttttctctccctcatcttaccaggagactggatattgctgggagggatataactagatatcttatcaagctacttctgttgcgaggatacgccttcaaccactctgctgattttgaaacggttcgcatgattaaagaaaaactgtgttacgtgggatataatattgagcaagagcagaaactggccttagaaaccacagtattagttgaatcttatacactcccagatggacgtatcatcaaagttgggggagagagatttgaagcaccagaagctttatttcagcctcacttgatcaatgttgaaggagttggtgttgctgaattgctttttaacacaattcaggcagctgacattgataccagatctgaattctacaaacacattgtgctttctggagggtctactatgtatcctggcctgccatcacggttggaacgagaacttaaacagctttacttagaacgagttttgaagggtgatgtggaaaaactttctaaatttaagatccgcattgaagacccaccccgcagaaagcacatggtattcctgggtggtgcagttctagcggatatcatgaaagacaaagacaacttttggatgacccgacaagagtaccaagaaaagggtgtccgtgtgctagagaaacttggtgtgactgttcgataaactccaaagcttgttcccatcatacccgtaatgctttcttttttcctttattgccaatctttgaactcattcaactccaggacatggaagaggcctctctctgccctttgactggaaaggtcaagttttattctggtgtcttggggaagctttgttaaatttttgttaatgtgggtaaatctgagtttaattcaactgcttccctacatagactagagggctaaggattctgtctgctgctttgtttcttctaagtaggcatttagatcattcctgtaggcttcctattttcactttactgctctaatgctgctagtcgtagtctttagcacactaggtggtatgcctttattagcataaaacaaaaaaaactttaacaggagcttttacatattactgggatggggggtggttcgggatgggtgggcagctgctgaaccctttagggcatttcctctgtaatgtggcgctttcaactgtactgctgcagctttaagtaccttaaagcttctcctgtgaacttcttagggaaatgttaggttcagaactaaagtgttttgggtgggttttgttgcgggggggagggtaacaatgggtggtcttctgatttttatttttgaggttttgtcaactggagtacgtagaggaactttatttacagtactttgatttggcaggttttcttctacttgtgctctgcctggagctgtttccatatgatataaaaagcaagtgtagtattccattactatgtggcttagggatttatttgttttttaaaatcaaccatgttagctgggattagactccctacagtccttcaatggaaaagtaacatttaaaaatcctttgggtaattcaaattacagatttaaaagagcttaagatctggtgttttgttaatgcttctgtttattccagaagcattaaggtaacccattgccaagtatcattcttgcaaattattcttttatataactgaccagtgcttaataaaacaagcaggtacttacaaataattactggcagtaggttataattggtggtttaaaaataacattggaatacaggacttgttgccaattgggtaattttcattagttgttttgttgttttgatttgaaacctggaaatacagtaaaatttgactgtttaaaatgttggccaaaaaaatcaagatttaatttttttatttgtactgaaaaactaatcataactgttaattctcagccatctttgaagcttgaaagaagagtctttggtattttgtaaacgttagcagactttcctgccagtgtcagaaaatcctatttatgaatcctgtcggtattccttggtatctgaaaaaaataccaaatagtaccatacatgagttatttctaagtttgaaaaataaaaagaaattgcatcacactaattacaaaatacaagttctggaaaaaatatttttcttcattttaaaacttttttttaactaataatggctttgaaagaagaggcttaatttgggggtggtaactaaaatcaaaagaaatgattgacttgagggtctctgtttggtaagaatacatcattagcttaaataagcagcagaaggttagttttaattatgtagcttctgttaatattaagtgttttttgtctgttttacctcaatttgaacagataagtttgcctgcatgctggacatgcctcagaaccatgaatagcccgtactagatcttgggaacatggatcttagagtcactttggaataagttcttatataaatacccccagccttttgagaacggggcttgttaaaggacgcgtatgtagggcccgtacctactggcagttgggttcagggaaatgggattgacttggccttcaggctcctttggtcataattttaaaatatgggagtagaaaacaacaaagaatggaatggactcttaaaacaatgaaagagcatttatcgtttgtcccttgaatgtagaatttgtttttgatttcataattctgctggtaaatgtgacagttaaaatggtgcattatgtatatatattataatttagaaataccattttataattttactattccagggtgacataatgcatttaaatttgggatttgggtggagtattatgtttaactggagttgtcaagtatgagtccctcaggaaaaaaaaaaaattctgttttaaaaagcaatctgattcttagctcttgaaactattgctacttaaatttccaataattaaaaatttaaaatttttaaattagaattgccaatacttctacatttgagaagggtttttttagaaatacatttagtaaagtccccaagacattagtcttacatttaaacttttttctttaaaacatggttttggtggttaacttttacacagttctgagtactgttaatatctggaaagtatcttgagatatcagtggaaagctaaacagtctaaattaacatgaaatacttcattttgattgagaaaataaaatcagattttttcaaaagtcaaaaaaacacaccacaacaaga

SEQ ID NO: 301457 - DNA, 4551 bp, Homo sapiens
catcccagttctgtccgctgaaaaggcctagaagcaataacacaccaagccctgtcgaatggtggggtccgccaggacctccaggcttgctccccgccctacccgccagcttctccgccacattccactgccgcagcagaaccggtgtccttcacctgcctgcgtcttctgcagttcgttaagcagcgcccttagctcctgtgacactttagggagaaagccgcagcaccggcgatgttggccgccattaacgcccggcaaagcgcccggaactagaagcagcgaagaacccgggtgggcagcgaccgtgacagccgagccggaagcggagctgcgggaggggcctcgacgctcctccatcttttattggagctcaccgctgccagtcgcgctgcctgcccgtcccacccttttcgtgcaggcattcagctaaatgacgggcggagcccggcggcggcttccggtcgggggaaaaaagttgggccgaaggaggggccgggaagacgcaagaggaagaagagaaaacggccgggcggcggtggctgtaggttgtgcggctgcagcggctcttccctgggcggacgatggacagccagggcaggaaggtggtggtgtgcgacaacggcaccgggtttgtgaagtgtggatatgcaggctctaactttccagaacacatcttcccagctttggttggaagacctattatcagatcaaccaccaaagtgggaaacattgaaatcaaggatcttatggttggtgatgaggcaagtgaattacgatcaatgttagaagttaactaccctatggaaaatggcatagtacgaaattgggatgacatgaaacacctgtgggactacacatttggaccagagaaacttaatatagataccagaaattgtaaaatcttactcacagaacctcctatgaacccaaccaaaaacagagagaagattgtagaggtaatgtttgaaacttaccagttttccggtgtatatgtagccatccaggcagttctgactttgtacgctcaaggtttattgactggtgtagtggtagactctggagatggtgtgactcacatttgcccagtatatgaaggcttttctctccctcatcttaccaggagactggatattgctgggagggatataactagatatcttatcaagctacttctgttgcgaggatacgccttcaaccactctgctgattttgaaacggttcgcatgattaaagaaaaactgtgttacgtgggatataatattgagcaagagcagaaactggccttagaaaccacagtattagttgaatcttatacactcccagatggacgtatcatcaaagttgggggagagagatttgaagcaccagaagctttatttcagcctcacttgatcaatgttgaaggagttggtgttgctgaattgctttttaacacaattcaggcagctgacattgataccagatctgaattctacaaacacattgtgctttctggagggtctactatgtatcctggcctgccatcacggttggaacgagaacttaaacagctttacttagaacgagttttgaagggtgatgtggaaaaactttctaaatttaagatccgcattgaagacccaccccgcagaaagcacatggtattcctgggtggtgcagttctagcggatatcatgaaagacaaagacaacttttggatgacccgacaagagtaccaagaaaagggtgtccgtgtgctagagaaacttggtgtgactgttcgataaactccaaagcttgttcccatcatacccgtaatgctttcttttttcctttattgccaatctttgaactcattcaactccaggacatggaagaggcctctctctgccctttgactggaaaggtcaagttttattctggtgtcttggggaagctttgttaaatttttgttaatgtgggtaaatctgagtttaattcaactgcttccctacatagactagagggctaaggattctgtctgctgctttgtttcttctaagtaggcatttagatcattcctgtaggcttcctattttcactttactgctctaatgctgctagtcgtagtctttagcacactaggtggtatgcctttattagcataaaacaaaaaaaactttaacaggagcttttacatattactgggatggggggtggttcgggatgggtgggcagctgctgaaccctttagggcatttcctctgtaatgtggcgctttcaactgtactgctgcagctttaagtaccttaaagcttctcctgtgaacttcttagggaaatgttaggttcagaactaaagtgttttgggtgggttttgttgcgggggggagggtaacaatgggtggtcttctgatttttatttttgaggttttgtcaactggagtacgtagaggaactttatttacagtactttgatttggcaggttttcttctacttgtgctctgcctggagctgtttccatatgatataaaaagcaagtgtagtattccattactatgtggcttagggatttatttgttttttaaaatcaaccatgttagctgggattagactccctacagtccttcaatggaaaagtaacatttaaaaatcctttgggtaattcaaattacagatttaaaagagcttaagatctggtgttttgttaatgcttctgtttattccagaagcattaaggtaacccattgccaagtatcattcttgcaaattattcttttatataactgaccagtgcttaataaaacaagcaggtacttacaaataattactggcagtaggttataattggtggtttaaaaataacattggaatacaggacttgttgccaattgggtaattttcattagttgttttgttgttttgatttgaaacctggaaatacagtaaaatttgactgtttaaaatgttggccaaaaaaatcaagatttaatttttttatttgtactgaaaaactaatcataactgttaattctcagccatctttgaagcttgaaagaagagtctttggtattttgtaaacgttagcagactttcctgccagtgtcagaaaatcctatttatgaatcctgtcggtattccttggtatctgaaaaaaataccaaatagtaccatacatgagttatttctaagtttgaaaaataaaaagaaattgcatcacactaattacaaaatacaagttctggaaaaaatatttttcttcattttaaaacttttttttaactaataatggctttgaaagaagaggcttaatttgggggtggtaactaaaatcaaaagaaatgattgacttgagggtctctgtttggtaagaatacatcattagcttaaataagcagcagaaggttagttttaattatgtagcttctgttaatattaagtgttttttgtctgttttacctcaatttgaacagataagtttgcctgcatgctggacatgcctcagaaccatgaatagcccgtactagatcttgggaacatggatcttagagtcactttggaataagttcttatataaatacccccagccttttgagaacggggcttgttaaaggacgcgtatgtagggcccgtacctactggcagttgggttcagggaaatgggattgacttggccttcaggctcctttggtcataattttaaaatatgggagtagaaaacaacaaagaatggaatggactcttaaaacaatgaaagagcatttatcgtttgtcccttgaatgtagaatttgtttttgatttcataattctgctggtaaatgtgacagttaaaatggtgcattatgtatatatattataatttagaaataccattttataattttactattccagggtgacataatgcatttaaatttgggatttgggtggagtattatgtttaactggagttgtcaagtatgagtccctcaggaaaaaaaaaaaattctgttttaaaaagcaatctgattcttagctcttgaaactattgctacttaaatttccaataattaaaaatttaaaatttttaaattagaattgccaatacttctacatttgagaagggtttttttagaaatacatttagtaaagtccccaagacattagtcttacatttaaacttttttctttaaaacatggttttggtggttaacttttacacagttctgagtactgttaatatctggaaagtatcttgagatatcagtggaaagctaaacagtctaaattaacatgaaatacttcattttgattgagaaaataaaatcagattttttcaaaagtcaacataacaagagcaacaacacaaaaaaaaaaaaaaattggttgcgcggctcgcgcgccccgaaaaaaagtttcaaaccatgtctgggggccgcgggcgccagaggggaggaacattggcccaaagcgttccaaggaaaccctggccagagaacgggggggttttcccccaaataaaaaccgcgggggaccgcgtttgcgacacatccaggggtccgcggctcacggctcacacagggccaggacgtagcccccgcgggggggag

SEQ ID NO: 301458 - DNA, 4231 bp, Homo sapiens
catcccagttctgtccgctgaaaaggcctagaagcaataacacaccaagccctgtcgaatggtggggtccgccaggacctccaggcttgctccccgccctacccgccagcttctccgccacattccactgccgcagcagaaccggtgtccttcacctgcctgcgtcttctgcagttcgttaagcagcgcccttagctcctgtgacactttagggagaaagccgcagcaccggcgatgttggccgccattaacgcccggcaaagcgcccggaactagaagcagcgaagaacccgggtgggcagcgaccgtgacagccgagccggaagcggagctgcgggaggggcctcgacgctcctccatcttttattggagctcaccgctgccagtcgcgctgcctgcccgtcccacccttttcgtgcaggcattcagctaaatgacgggcggagcccggcggcggcttccggtcgggggaaaaaagttgggccgaaggaggggccgggaagacgcaagaggaagaagagaaaacggccgggcggcggtggctgtaggttgtgcggctgcagcggctcttccctgggcggacgatggacagccagggcaggaaggtggtggtgtgcgacaacggcaccgggtttgtgaagtgtggatatgcaggctctaactttccagaacacatcttcccagctttggttggaagacctattatcagatcaaccaccaaagtgggaaacattgaaatcaaggatcttatggttggtgatgaggcaagtgaattacgatcaatgttagaagttaactaccctatggaaaatggcatagtacgaaattgggatgacatgaaacacctgtgggactacacatttggaccagagaaacttaatatagataccagaaattgtaaaatcttactcacagaacctcctatgaacccaaccaaaaacagagagaagattgtagaggtaatgtttgaaacttaccagttttccggtgtatatgtagccatccaggcagttctgactttgtacgctcaaggtttattgactggtgtagtggtagactctggagatggtgtgactcacatttgcccagtatatgaaggcttttctctccctcatcttaccaggagactggatattgctgggagggatataactagatatcttatcaagctacttctgttgcgaggatacgccttcaaccactctgctgattttgaaacggttcgcatgattaaagaaaaactgtgttacgtgggatataatattgagcaagagcagaaactggccttagaaaccacagtattagttgaatcttatacactcccagatggacgtatcatcaaagttgggggagagagatttgaagcaccagaagctttatttcagcctcacttgatcaatgttgaaggagttggtgttgctgaattgctttttaacacaattcaggcagctgacattgataccagatctgaattctacaaacacattgtgctttctggagggtctactatgtatcctggcctgccatcacggttggaacgagaacttaaacagctttacttagaacgagttttgaagggtgatgtggaaaaactttctaaatttaagatccgcattgaagacccaccccgcagaaagcacatggtattcctgggtggtgcagttctagcggatatcatgaaagacaaagacaacttttggatgacccgacaagagtaccaagaaaagggtgtccgtgtgctagagaaacttggtgtgactgttcgataaactccaaagcttgttcccatcatacccgtaatgctttcttttttcctttattgccaatctttgaactcattcaactccaggacatggaagaggcctctctctgccctttgactggaaaggtcaagttttattctggtgtcttggggaagctttgttaaatttttgttaatgtgggtaaatctgagtttaattcaactgcttccctacatagactagagggctaaggattctgtctgctgctttgtttcttctaagtaggcatttagatcattcctgtaggcttcctattttcactttactgctctaatgctgctagtcgtagtctttagcacactaggtggtatgcctttattagcataaaacaaaaaaaactttaacaggagcttttacatattactgggatggggggtggttcgggatgggtgggcagctgctgaaccctttagggcatttcctctgtaatgtggcgctttcaactgtactgctgcagctttaagtaccttaaagcttctcctgtgaacttcttagggaaatgttaggttcagaactaaagtgttttgggtgggttttgttgcgggggggagggtaacaatgggtggtcttctgatttttatttttgaggttttgtcaactggagtacgtagaggaactttatttacagtactttgatttggcaggttttcttctacttgtgctctgcctggagctgtttccatatgatataaaaagcaagtgtagtattccattactatgtggcttagggatttatttgttttttaaaatcaaccatgttagctgggattagactccctacagtccttcaatggaaaagtaacatttaaaaatcctttgggtaattcaaattacagatttaaaagagcttaagatctggtgttttgttaatgcttctgtttattccagaagcattaaggtaacccattgccaagtatcattcttgcaaattattcttttatataactgaccagtgcttaataaaacaagcaggtacttacaaataattactggcagtaggttataattggtggtttaaaaataacattggaatacaggacttgttgccaattgggtaattttcattagttgttttgttgttttgatttgaaacctggaaatacagtaaaatttgactgtttaaaatgttggccaaaaaaatcaagatttaatttttttatttgtactgaaaaactaatcataactgttaattctcagccatctttgaagcttgaaagaagagtctttggtattttgtaaacgttagcagactttcctgccagtgtcagaaaatcctatttatgaatcctgtcggtattccttggtatctgaaaaaaataccaaatagtaccatacatgagttatttctaagtttgaaaaataaaaagaaattgcatcacactaattacaaaatacaagttctggaaaaaatatttttcttcattttaaaacttttttttaactaataatggctttgaaagaagaggcttaatttgggggtggtaactaaaatcaaaagaaatgattgacttgagggtctctgtttggtaagaatacatcattagcttaaataagcagcagaaggttagttttaattatgtagcttctgttaatattaagtgttttttgtctgttttacctcaatttgaacagataagtttgcctgcatgctggacatgcctcagaaccatgaatagcccgtactagatcttgggaacatggatcttagagtcactttggaataagttcttatataaatacccccagccttttgagaacggggcttgttaaaggacgcgtatgtagggcccgtacctactggcagttgggttcagggaaatgggattgacttggccttcaggctcctttggtcataattttaaaatatgggagtagaaaacaacaaagaatggaatggactcttaaaacaatgaaagagcatttatcgtttgtcccttgaatgtagaatttgtttttgatttcataattctgctggtaaatgtgacagttaaaatggtgcattatgtatatatattataatttagaaataccattttataattttactattccagggtgacataatgcatttaaatttgggatttgggtggagtattatgtttaactggagttgtcaagtatgagtccctcaggaaaattaaatttccaataattaaaaatttaaaatttttaaattagaattgccaatacttctacatttgagaagggtttttttagaaatacatttagtaaagtccccaagacattagtcttacatttaaacttttttctttaaaacatggttttggtggttaacttttacacagttctgagtactgttaatatctggaaagtatcttgagatatcagtggaaagctaaacagtctaaattaacatgaaatacttcattttgattgagaaaataaaatcagattttttcaaaagtcaa

SEQ ID NO: 301459 - DNA, 2105 bp, Homo sapiens
tccccccggtggccgccgcttctagaataattggattccccggggttgcaggaattcggcacatgtactgctgcagctttaagtaccttaaagcttctcctgtgaacttcttagggaaatgttaggttcagaactaaagtgttttgggtgggttttgttgcgggggggagggtaacaatgggtggtcttctgatttttatttttgaggttttgtcaactggagtacgtagaggaactttatttacagtactttgatttggcaggttttcttctacttgtgctctgcctggagctgtttccatatgatataaaaagcaagtgtagtattccattactatgtggcttagggatttatttgttttttaaaatcaaccatgttagctgggattagactccctacagtccttcaatggaaaagtaacatttaaaaatcctttgggtaattcaaattacagatttaaaagagcttaagatctggtgttttgttaatgcttctgtttattccagaagcattaaggtaacccattgccaagtatcattcttgcaaattattcttttatataactgaccagtgcttaataaaacaagcaggtacttacaaataattactggcagtaggttataattggtggtttaaaaataacattggaatacaggacttgttgccaattgggtaattttcattagttgttttgttgttttgatttgaaacctggaaatacagtaaaatttgactgtttaaaatgttggccaaaaaaatcaagatttaatttttttatttgtactgaaaaactaatcataactgttaattctcagccatctttgaagcttgaaagaagagtctttggtattttgtaaacgttagcagactttcctgccagtgtcagaaaatcctatttatgaatcctgtcggtattccttggtatctgaaaaaaataccaaatagtaccatacatgagttatttctaagtttgaaaaataaaaagaaattgcatcacactaattacaaaatacaagttctggaaaaaatatttttcttcattttaaaacttttttttaactaataatggctttgaaagaagaggcttaatttgggggtggtaactaaaatcaaaagaaatgattgacttgagggtctctgtttggtaagaatacatcattagcttaaataagcagcagaaggttagttttaattatgtagcttctgttaatattaagtgttttttgtctgttttacctcaatttgaacagataagtttgcctgcatgctggacatgcctcagaaccatgaatagcccgtactagatcttgggaacatggatcttagagtcactttggaataagttcttatataaatacccccagccttttgagaacggggcttgttaaaggacgcgtatgtagggcccgtacctactggcagttgggttcagggaaatgggattgacttggccttcaggctcctttggtcataattttaaaatatgggagtagaaaacaacaaagaatggaatggactcttaaaacaatgaaagagcatttatcgtttgtcccttgaatgtagaatttgtttttgatttcataattctgctggtaaatgtgacagttaaaatggtgcattatgtatatatattataatttagaaataccattttataattttactattccagggtgacataatgcatttaaatttgggatttgggtggagtattatgtttaactggagttgtcaagtatgagtccctcaggaaaaaaaaaaaattctgttttaaaaagcaatctgattcttagctcttgaaactattgctacttaaatttccaataattaaaaatttaaaatttttaaattagaattgccaatacttctacatttgagaagggtttttttagaaatacatttagtaaagtccccaagacattagtcttacatttaaacttttttctttaaaacatggttttggtggttaacttttacacagttctgagtactgttaatatctggaaagtatcttgagatatcagtggaaagctaaacagtctaaattaacatgaaatacttcattttgattgagaaaataaaatcagattttttcaaaagtcaa

SEQ ID NO: 301460 - DNA, 2009 bp, Homo sapiens
ttaggctggtgttagggttcttgttttggggttggcagagatgtgtttaagtgctgtggccagaagggggggagggtaacaatgggtggtcttctgatttttatttttgaggttttgtcaactggagtacgtagaggaactttatttacagtactttgatttggcaggttttcttctacttgtgctctgcctggagctgtttccatatgatataaaaagcaagtgtagtattccattactatgtggcttagggatttatttgttttttaaaatcaaccatgttagctgggattagactccctacagtccttcaatggaaaagtaacatttaaaaatcctttgggtaattcaaattacagatttaaaagagcttaagatctggtgttttgttaatgcttctgtttattccagaagcattaaggtaacccattgccaagtatcattcttgcaaattattcttttatataactgaccagtgcttaataaaacaagcaggtacttacaaataattactggcagtaggttataattggtggtttaaaaataacattggaatacaggacttgttgccaattgggtaattttcattagttgttttgttgttttgatttgaaacctggaaatacagtaaaatttgactgtttaaaatgttggccaaaaaaatcaagatttaatttttttatttgtactgaaaaactaatcataactgttaattctcagccatctttgaagcttgaaagaagagtctttggtattttgtaaacgttagcagactttcctgccagtgtcagaaaatcctatttatgaatcctgtcggtattccttggtatctgaaaaaaataccaaatagtaccatacatgagttatttctaagtttgaaaaataaaaagaaattgcatcacactaattacaaaatacaagttctggaaaaaatatttttcttcattttaaaacttttttttaactaataatggctttgaaagaagaggcttaatttgggggtggtaactaaaatcaaaagaaatgattgacttgagggtctctgtttggtaagaatacatcattagcttaaataagcagcagaaggttagttttaattatgtagcttctgttaatattaagtgttttttgtctgttttacctcaatttgaacagataagtttgcctgcatgctggacatgcctcagaaccatgaatagcccgtactagatcttgggaacatggatcttagagtcactttggaataagttcttatataaatacccccagccttttgagaacggggcttgttaaaggacgcgtatgtagggcccgtacctactggcagttgggttcagggaaatgggattgacttggccttcaggctcctttggtcataattttaaaatatgggagtagaaaacaacaaagaatggaatggactcttaaaacaatgaaagagcatttatcgtttgtcccttgaatgtagaatttgtttttgatttcataattctgctggtaaatgtgacagttaaaatggtgcattatgtatatatattataatttagaaataccattttataattttactattccagggtgacataatgcatttaaatttgggatttgggtggagtattatgtttaactggagttgtcaagtatgagtccctcaggaaaaaaaaaaaattctgttttaaaaagcaatctgattcttagctcttgaaactattgctacttaaatttccaataattaaaaatttaaaatttttaaattagaattgccaatacttctacatttgagaagggtttttttagaaatacatttagtaaagtccccaagacattagtcttacatttaaacttttttctttaaaacatggttttggtggttaacttttacacagttctgagtactgttaatatctggaaagtatcttgagatatcagtggaaagctaaacagtctaaattaacatgaaatacttcattttgattgagaaaataaaatcagattttttcaaaagtcaa

SEQ ID NO: 301461 - DNA, 3986 bp, Homo sapiens
catcccagttctgtccgctgaaaaggcctagaagcaataacacaccaagccctgtcgaatggtggggtccgccaggacctccaggcttgctccccgccctacccgccagcttctccgccacattccactgccgcagcagaaccggtgtccttcacctgcctgcgtcttctgcagttcgttaagcagcgcccttagctcctgtgacactttagggagaaagccgcagcaccggcgatgttggccgccattaacgcccggcaaagcgcccggaactagaagcagcgaagaacccgggtgggcagcgaccgtgacagccgagccggaagcggagctgcgggaggggcctcgacgctcctccatcttttattggagctcaccgctgccagtcgcgctgcctgcccgtcccacccttttcgtgcaggcattcagctaaatgacgggcggagcccggcggcggcttccggtcgggggaaaaaagttgggccgaaggaggggccgggaagacgcaagaggaagaagagaaaacggccgggcggcggtggctgtaggttgtgcggctgcagcggctcttccctgggcggacgatggacagccagggcaggaaggtggtggtgtgcgacaacggcaccgggtttgtgaagtgtggatatgcaggctctaactttccagaacacatcttcccagctttggttggaagacctattatcagatcaaccaccaaagtgggaaacattgaaatcaaggatcttatggttggtgatgaggcaagtgaattacgatcaatgttagaagttaactaccctatggaaaatggcatagtacgaaattgggatgacatgaaacacctgtgggactacacatttggaccagagaaacttaatatagataccagaaattgtaaaatcttactcacagaacctcctatgaacccaaccaaaaacagagagaagattgtagaggtaatgtttgaaacttaccagttttccggtgtatatgtagccatccaggcagttctgactttgtacgctcaaggtttattgactggtgtagtggtagactctggagatggtgtgactcacatttgcccagtatatgaaggcttttctctccctcatcttaccaggagactggatattgctgggagggatataactagatatcttatcaagctacttctgttgcgaggatacgccttcaaccactctgctgattttgaaacggttcgcatgattaaagaaaaactgtgttacgtgggatataatattgagcaagagcagaaactggccttagaaaccacagtattagttgaatcttatacactcccagatggacgtatcatcaaagttgggggagagagatttgaagcaccagaagctttatttcagcctcacttgatcaatgttgaaggagttggtgttgctgaattgctttttaacacaattcaggcagctgacattgataccagatctgaattctacaaacacattgtgctttctggagggtctactatgtatcctggcctgccatcacggttggaacgagaacttaaacagctttacttagaacgagttttgaagggtgatgtggaaaaactttctaaatttaagatccgcattgaagacccaccccgcagaaagcacatggtattcctgggtggtgcagttctagcggatatcatgaaagacaaagacaacttttggatgacccgacaagagtaccaagaaaagggtgtccgtgtgctagagaaacttggtgtgactgttcgataaactccaaagcttgttcccatcatacccgtaatgctttcttttttcctttattgccaatctttgaactcattcaactccaggacatggaagaggcctctctctgccctttgactggaaaggtcaagttttattctggtgtcttggggaagctttgttaaatttttgttaatgtgggtaaatctgagtttaattcaactgcttccctacatagactagagggctaaggattctgtctgctgctttgtttcttctaagtaggcatttagatcattcctgtaggcttcctattttcactttactgctctaatgctgctagtcgtagtctttagcacactaggtggtatgcctttattagcataaaacaaaaaaaactttaacaggagcttttacatattactgggatggggggtggttcgggatgggtgggcagctgctgaaccctttagggcatttcctctgtaatgtggcgctttcaactgtactgctgcagctttaagtaccttaaagcttctcctgtgaacttcttagggaaatgttaggttcagaactaaagtgttttgggtgggttttgttgcgggggggagggtaacaatgggtggtcttctgatttttatttttgaggttttgtcaactggagtacgtagaggaactttatttacagtactttgatttggcaggttttcttctacttgtgctctgcctggagctgtttccatatgatataaaaagcaagtgtagtattccattactatgtggcttagggatttatttgttttttaaaatcaaccatgttagctgggattagactccctacagtccttcaatggaaaagtaacatttaaaaatcctttgggtaattcaaattacagatttaaaagagcttaagatctggtgttttgttaatgcttctgtttattccagaagcattaaggtaacccattgccaagtatcattcttgcaaattattcttttatataactgaccagtgcttaataaaacaagcaggtacttacaaataattactggcagtaggttataattggtggtttaaaaataacattggaatacaggacttgttgccaattgggtaattttcattagttgttttgttgttttgatttgaaacctggaaatacagtaaaatttgactgtttaaaatgttggccaaaaaaatcaagatttaatttttttatttgtactgaaaaactaatcataactgttaattctcagccatctttgaagcttgaaagaagagtctttggtattttgtaaacgttagcagactttcctgccagtgtcagaaaatcctatttatgaatcctgtcggtattccttggtatctgaaaaaaataccaaatagtaccatacatgagttatttctaagtttgaaaaataaaaagaaattgcatcacactaattacaaaatacaagttctggaaaaaatatttttcttcattttaaaacttttttttaactaataatggctttgaaagaagaggcttaatttgggggtggtaactaaaatcaaaagaaatgattgacttgagggtctctgtttggtaagaatacatcattagcttaaataagcagcagaaggttagttttaattatgtagcttctgttaatattaagtgttttttgtctgttttacctcaatttgaacagataagtttgcctgcatgctggacatgcctcagaaccatgaatagcccgtactagatcttgggaacatggatcttagagtcactttggaataagttcttatataaatacccccagccttttgagaacggggcttgttaaaggacgcgtatgtagggcccgtacctactggcagttgggttcagggaaatgggattgacttggccttcaggctcctttggtcataattttaaaatatgggagtagaaaacaacaaagaatggaatggactcttaaaacaatgaaagagcatttatcgtttgtcccttgaatgtagaatttgtttttgatttcataattctgctggtaaatgtgacagttaaaatggtgcattatgtatatatattataatttagaaataccattttataattttactattccagggtgacataatgcatttaaatttgggatttgggtggagtattacgcctaacctggcaccgccaagtttctagcacccctcgaacaaatcttaacgtccagagcgaacaatctacactcttcgacgtgact

SEQ ID NO: 301462 - DNA, 3876 bp, Homo sapiens
  misc_feature (3795)..(3795): n is a, c, g, or t
  misc_feature (3799)..(3799): n is a, c, g, or t
  misc_feature (3812)..(3813): n is a, c, g, or t
  misc_feature (3815)..(3816): n is a, c, g, or t
  misc_feature (3823)..(3823): n is a, c, g, or t
  misc_feature (3832)..(3832): n is a, c, g, or t
catcccagttctgtccgctgaaaaggcctagaagcaataacacaccaagccctgtcgaatggtggggtccgccaggacctccaggcttgctccccgccctacccgccagcttctccgccacattccactgccgcagcagaaccggtgtccttcacctgcctgcgtcttctgcagttcgttaagcagcgcccttagctcctgtgacactttagggagaaagccgcagcaccggcgatgttggccgccattaacgcccggcaaagcgcccggaactagaagcagcgaagaacccgggtgggcagcgaccgtgacagccgagccggaagcggagctgcgggaggggcctcgacgctcctccatcttttattggagctcaccgctgccagtcgcgctgcctgcccgtcccacccttttcgtgcaggcattcagctaaatgacgggcggagcccggcggcggcttccggtcgggggaaaaaagttgggccgaaggaggggccgggaagacgcaagaggaagaagagaaaacggccgggcggcggtggctgtaggttgtgcggctgcagcggctcttccctgggcggacgatggacagccagggcaggaaggtggtggtgtgcgacaacggcaccgggtttgtgaagtgtggatatgcaggctctaactttccagaacacatcttcccagctttggttggaagacctattatcagatcaaccaccaaagtgggaaacattgaaatcaaggatcttatggttggtgatgaggcaagtgaattacgatcaatgttagaagttaactaccctatggaaaatggcatagtacgaaattgggatgacatgaaacacctgtgggactacacatttggaccagagaaacttaatatagataccagaaattgtaaaatcttactcacagaacctcctatgaacccaaccaaaaacagagagaagattgtagaggtaatgtttgaaacttaccagttttccggtgtatatgtagccatccaggcagttctgactttgtacgctcaaggtttattgactggtgtagtggtagactctggagatggtgtgactcacatttgcccagtatatgaaggcttttctctccctcatcttaccaggagactggatattgctgggagggatataactagatatcttatcaagctacttctgttgcgaggatacgccttcaaccactctgctgattttgaaacggttcgcatgattaaagaaaaactgtgttacgtgggatataatattgagcaagagcagaaactggccttagaaaccacagtattagttgaatcttatacactcccagatggacgtatcatcaaagttgggggagagagatttgaagcaccagaagctttatttcagcctcacttgatcaatgttgaaggagttggtgttgctgaattgctttttaacacaattcaggcagctgacattgataccagatctgaattctacaaacacattgtgctttctggagggtctactatgtatcctggcctgccatcacggttggaacgagaacttaaacagctttacttagaacgagttttgaagggtgatgtggaaaaactttctaaatttaagatccgcattgaagacccaccccgcagaaagcacatggtattcctgggtggtgcagttctagcggatatcatgaaagacaaagacaacttttggatgacccgacaagagtaccaagaaaagggtgtccgtgtgctagagaaacttggtgtgactgttcgataaactccaaagcttgttcccatcatacccgtaatgctttcttttttcctttattgccaatctttgaactcattcaactccaggacatggaagaggcctctctctgccctttgactggaaaggtcaagttttattctggtgtcttggggaagctttgttaaatttttgttaatgtgggtaaatctgagtttaattcaactgcttccctacatagactagagggctaaggattctgtctgctgctttgtttcttctaagtaggcatttagatcattcctgtaggcttcctattttcactttactgctctaatgctgctagtcgtagtctttagcacactaggtggtatgcctttattagcataaaacaaaaaaaactttaacaggagcttttacatattactgggatggggggtggttcgggatgggtgggcagctgctgaaccctttagggcatttcctctgtaatgtggcgctttcaactgtactgctgcagctttaagtaccttaaagcttctcctgtgaacttcttagggaaatgttaggttcagaactaaagtgttttgggtgggttttgttgcgggggggagggtaacaatgggtggtcttctgatttttatttttgaggttttgtcaactggagtacgtagaggaactttatttacagtactttgatttggcaggttttcttctacttgtgctctgcctggagctgtttccatatgatataaaaagcaagtgtagtattccattactatgtggcttagggatttatttgttttttaaaatcaaccatgttagctgggattagactccctacagtccttcaatggaaaagtaacatttaaaaatcctttgggtaattcaaattacagatttaaaagagcttaagatctggtgttttgttaatgcttctgtttattccagaagcattaaggtaacccattgccaagtatcattcttgcaaattattcttttatataactgaccagtgcttaataaaacaagcaggtacttacaaataattactggcagtaggttataattggtggtttaaaaataacattggaatacaggacttgttgccaattgggtaattttcattagttgttttgttgttttgatttgaaacctggaaatacagtaaaatttgactgtttaaaatgttggccaaaaaaatcaagatttaatttttttatttgtactgaaaaactaatcataactgttaattctcagccatctttgaagcttgaaagaagagtctttggtattttgtaaacgttagcagactttcctgccagtgtcagaaaatcctatttatgaatcctgtcggtattccttggtatctgaaaaaaataccaaatagtaccatacatgagttatttctaagtttgaaaaataaaaagaaattgcatcacactaattacaaaatacaagttctggaaaaaatatttttcttcattttaaaacttttttttaactaataatggctttgaaagaagaggcttaatttgggggtggtaactaaaatcaaaagaaatgattgacttgagggtctctgtttggtaagaatacatcattagcttaaataagcagcagaaggttagttttaattatgtagcttctgttaatattaagtgttttttgtctgttttacctcaatttgaacagataagtttgcctgcatgctggacatgcctcagaaccatgaatagcccgtactagatcttgggaacatggatcttagagtcactttggaataagttcttatataaatacccccagccttttgagaacggggcttgttaaaggacgcgtatgtagggcccgtacctactggcagttgggttcagggaaatgggattgacttggccttcaggctcctttggtcataattttaaaatatgggagtagaaaacaacaaagaatggaatggactcttaaaacaatgaaagagcatttatcgtttgtcccttgaatgtagaatttgtttttgatttcataattctgctggtaaatgtgacagttaacngggnctttgtttttttnntnntcgaaanccctttaanttcaatcccgggagaaaagagccaaaaggggggcggggaaaaga

SEQ ID NO: 301463 - DNA, 3511 bp, Homo sapiens
  misc_feature (3489)..(3489): n is a, c, g, or t
catcccagttctgtccgctgaaaaggcctagaagcaataacacaccaagccctgtcgaatggtggggtccgccaggacctccaggcttgctccccgccctacccgccagcttctccgccacattccactgccgcagcagaaccggtgtccttcacctgcctgcgtcttctgcagttcgttaagcagcgcccttagctcctgtgacactttagggagaaagccgcagcaccggcgatgttggccgccattaacgcccggcaaagcgcccggaactagaagcagcgaagaacccgggtgggcagcgaccgtgacagccgagccggaagcggagctgcgggaggggcctcgacgctcctccatcttttattggagctcaccgctgccagtcgcgctgcctgcccgtcccacccttttcgtgcaggcattcagctaaatgacgggcggagcccggcggcggcttccggtcgggggaaaaaagttgggccgaaggaggggccgggaagacgcaagaggaagaagagaaaacggccgggcggcggtggctgtaggttgtgcggctgcagcggctcttccctgggcggacgatggacagccagggcaggaaggtggtggtgtgcgacaacggcaccgggtttgtgaagtgtggatatgcaggctctaactttccagaacacatcttcccagctttggttggaagacctattatcagatcaaccaccaaagtgggaaacattgaaatcaaggatcttatggttggtgatgaggcaagtgaattacgatcaatgttagaagttaactaccctatggaaaatggcatagtacgaaattgggatgacatgaaacacctgtgggactacacatttggaccagagaaacttaatatagataccagaaattgtaaaatcttactcacagaacctcctatgaacccaaccaaaaacagagagaagattgtagaggtaatgtttgaaacttaccagttttccggtgtatatgtagccatccaggcagttctgactttgtacgctcaaggtttattgactggtgtagtggtagactctggagatggtgtgactcacatttgcccagtatatgaaggcttttctctccctcatcttaccaggagactggatattgctgggagggatataactagatatcttatcaagctacttctgttgcgaggatacgccttcaaccactctgctgattttgaaacggttcgcatgattaaagaaaaactgtgttacgtgggatataatattgagcaagagcagaaactggccttagaaaccacagtattagttgaatcttatacactcccagatggacgtatcatcaaagttgggggagagagatttgaagcaccagaagctttatttcagcctcacttgatcaatgttgaaggagttggtgttgctgaattgctttttaacacaattcaggcagctgacattgataccagatctgaattctacaaacacattgtgctttctggagggtctactatgtatcctggcctgccatcacggttggaacgagaacttaaacagctttacttagaacgagttttgaagggtgatgtggaaaaactttctaaatttaagatccgcattgaagacccaccccgcagaaagcacatggtattcctgggtggtgcagttctagcggatatcatgaaagacaaagacaacttttggatgacccgacaagagtaccaagaaaagggtgtccgtgtgctagagaaacttggtgtgactgttcgataaactccaaagcttgttcccatcatacccgtaatgctttcttttttcctttattgccaatctttgaactcattcaactccaggacatggaagaggcctctctctgccctttgactggaaaggtcaagttttattctggtgtcttggggaagctttgttaaatttttgttaatgtgggtaaatctgagtttaattcaactgcttccctacatagactagagggctaaggattctgtctgctgctttgtttcttctaagtaggcatttagatcattcctgtaggcttcctattttcactttactgctctaatgctgctagtcgtagtctttagcacactaggtggtatgcctttattagcataaaacaaaaaaaactttaacaggagcttttacatattactgggatggggggtggttcgggatgggtgggcagctgctgaaccctttagggcatttcctctgtaatgtggcgctttcaactgtactgctgcagctttaagtaccttaaagcttctcctgtgaacttcttagggaaatgttaggttcagaactaaagtgttttgggtgggttttgttgcgggggggagggtaacaatgggtggtcttctgatttttatttttgaggttttgtcaactggagtacgtagaggaactttatttacagtactttgatttggcaggttttcttctacttgtgctctgcctggagctgtttccatatgatataaaaagcaagtgtagtattccattactatgtggcttagggatttatttgttttttaaaatcaaccatgttagctgggattagactccctacagtccttcaatggaaaagtaacatttaaaaatcctttgggtaattcaaattacagatttaaaagagcttaagatctggtgttttgttaatgcttctgtttattccagaagcattaaggtaacccattgccaagtatcattcttgcaaattattcttttatataactgaccagtgcttaataaaacaagcaggtacttacaaataattactggcagtaggttataattggtggtttaaaaataacattggaatacaggacttgttgccaattgggtaattttcattagttgttttgttgttttgatttgaaacctggaaatacagtaaaatttgactgtttaaaatgttggccaaaaaaatcaagatttaatttttttatttgtactgaaaaactaatcataactgttaattctcagccatctttgaagcttgaaagaagagtctttggtattttgtaaacgttagcagactttcctgccagtgtcagaaaatcctatttatgaatcctgtcggtattccttggtatctgaaaaaaataccaaatagtaccatacatgagttatttctaagtttgaaaaataaaaagaaattgcatcacactaattacaaaatacaagttctggaaaaaatatttttcttcattttaaaacttttttttaactaataatggctttgaaagaagaggcttaatttgggggtggtaactaaaatcaaaagaaatgattgacttgagggtctctgtttggtaagaatacatcattagcttaaataagcagcagaaggttagttttaattatgtagcttctgttaatattaagtgttttttgtctgttttacctcaatttgaacagataagtttgcctgcatgctggacatgcctcagaaccatgaatagcatgcaggcanacttatctgttcaaattgaggt

SEQ ID NO: 301464 - DNA, 3149 bp, Homo sapiens
catcccagttctgtccgctgaaaaggcctagaagcaataacacaccaagccctgtcgaatggtggggtccgccaggacctccaggcttgctccccgccctacccgccagcttctccgccacattccactgccgcagcagaaccggtgtccttcacctgcctgcgtcttctgcagttcgttaagcagcgcccttagctcctgtgacactttagggagaaagccgcagcaccggcgatgttggccgccattaacgcccggcaaagcgcccggaactagaagcagcgaagaacccgggtgggcagcgaccgtgacagccgagccggaagcggagctgcgggaggggcctcgacgctcctccatcttttattggagctcaccgctgccagtcgcgctgcctgcccgtcccacccttttcgtgcaggcattcagctaaatgacgggcggagcccggcggcggcttccggtcgggggaaaaaagttgggccgaaggaggggccgggaagacgcaagaggaagaagagaaaacggccgggcggcggtggctgtaggttgtgcggctgcagcggctcttccctgggcggacgatggacagccagggcaggaaggtggtggtgtgcgacaacggcaccgggtttgtgaagtgtggatatgcaggctctaactttccagaacacatcttcccagctttggttggaagacctattatcagatcaaccaccaaagtgggaaacattgaaatcaaggatcttatggttggtgatgaggcaagtgaattacgatcaatgttagaagttaactaccctatggaaaatggcatagtacgaaattgggatgacatgaaacacctgtgggactacacatttggaccagagaaacttaatatagataccagaaattgtaaaatcttactcacagaacctcctatgaacccaaccaaaaacagagagaagattgtagaggtaatgtttgaaacttaccagttttccggtgtatatgtagccatccaggcagttctgactttgtacgctcaaggtttattgactggtgtagtggtagactctggagatggtgtgactcacatttgcccagtatatgaaggcttttctctccctcatcttaccaggagactggatattgctgggagggatataactagatatcttatcaagctacttctgttgcgaggatacgccttcaaccactctgctgattttgaaacggttcgcatgattaaagaaaaactgtgttacgtgggatataatattgagcaagagcagaaactggccttagaaaccacagtattagttgaatcttatacactcccagatggacgtatcatcaaagttgggggagagagatttgaagcaccagaagctttatttcagcctcacttgatcaatgttgaaggagttggtgttgctgaattgctttttaacacaattcaggcagctgacattgataccagatctgaattctacaaacacattgtgctttctggagggtctactatgtatcctggcctgccatcacggttggaacgagaacttaaacagctttacttagaacgagttttgaagggtgatgtggaaaaactttctaaatttaagatccgcattgaagacccaccccgcagaaagcacatggtattcctgggtggtgcagttctagcggatatcatgaaagacaaagacaacttttggatgacccgacaagagtaccaagaaaagggtgtccgtgtgctagagaaacttggtgtgactgttcgataaactccaaagcttgttcccatcatacccgtaatgctttcttttttcctttattgccaatctttgaactcattcaactccaggacatggaagaggcctctctctgccctttgactggaaaggtcaagttttattctggtgtcttggggaagctttgttaaatttttgttaatgtgggtaaatctgagtttaattcaactgcttccctacatagactagagggctaaggattctgtctgctgctttgtttcttctaagtaggcatttagatcattcctgtaggcttcctattttcactttactgctctaatgctgctagtcgtagtctttagcacactaggtggtatgcctttattagcataaaacaaaaaaaactttaacaggagcttttacatattactgggatggggggtggttcgggatgggtgggcagctgctgaaccctttagggcatttcctctgtaatgtggcgctttcaactgtactgctgcagctttaagtaccttaaagcttctcctgtgaacttcttagggaaatgttaggttcagaactaaagtgttttgggtgggttttgttgcgggggggagggtaacaatgggtggtcttctgatttttatttttgaggttttgtcaactggagtacgtagaggaactttatttacagtactttgatttggcaggttttcttctacttgtgctctgcctggagctgtttccatatgatataaaaagcaagtgtagtattccattactatgtggcttagggatttatttgttttttaaaatcaaccatgttagctgggattagactccctacagtccttcaatggaaaagtaacatttaaaaatcctttgggtaattcaaattacagatttaaaagagcttaagatctggtgttttgttaatgcttctgtttattccagaagcattaaggtaacccattgccaagtatcattcttgcaaattattcttttatataactgaccagtgcttaataaaacaagcaggtacttacaaataattactggcagtaggttataattggtggtttaaaaataacattggaatacaggacttgttgccaattgggtaattttcattagttgttttgttgttttgatttgaaacctggaaatacagtaaaatttgactgtttaaaatgttggccaaaaaaatcaagatttaatttttttatttgtactgaaaaactaatcataactgttaattctcagccatctttgaagcttgaaagaagagccccaccccagggactccccttcccttgggccccttccccttttttatgaggaaataaaatgccgtaactttttggaaccccagttttttgattttttatttgggtaggtttggggtccaggcca

SEQ ID NO: 301465 - DNA, 3103 bp, Homo sapiens
catcccagttctgtccgctgaaaaggcctagaagcaataacacaccaagccctgtcgaatggtggggtccgccaggacctccaggcttgctccccgccctacccgccagcttctccgccacattccactgccgcagcagaaccggtgtccttcacctgcctgcgtcttctgcagttcgttaagcagcgcccttagctcctgtgacactttagggagaaagccgcagcaccggcgatgttggccgccattaacgcccggcaaagcgcccggaactagaagcagcgaagaacccgggtgggcagcgaccgtgacagccgagccggaagcggagctgcgggaggggcctcgacgctcctccatcttttattggagctcaccgctgccagtcgcgctgcctgcccgtcccacccttttcgtgcaggcattcagctaaatgacgggcggagcccggcggcggcttccggtcgggggaaaaaagttgggccgaaggaggggccgggaagacgcaagaggaagaagagaaaacggccgggcggcggtggctgtaggttgtgcggctgcagcggctcttccctgggcggacgatggacagccagggcaggaaggtggtggtgtgcgacaacggcaccgggtttgtgaagtgtggatatgcaggctctaactttccagaacacatcttcccagctttggttggaagacctattatcagatcaaccaccaaagtgggaaacattgaaatcaaggatcttatggttggtgatgaggcaagtgaattacgatcaatgttagaagttaactaccctatggaaaatggcatagtacgaaattgggatgacatgaaacacctgtgggactacacatttggaccagagaaacttaatatagataccagaaattgtaaaatcttactcacagaacctcctatgaacccaaccaaaaacagagagaagattgtagaggtaatgtttgaaacttaccagttttccggtgtatatgtagccatccaggcagttctgactttgtacgctcaaggtttattgactggtgtagtggtagactctggagatggtgtgactcacatttgcccagtatatgaaggcttttctctccctcatcttaccaggagactggatattgctgggagggatataactagatatcttatcaagctacttctgttgcgaggatacgccttcaaccactctgctgattttgaaacggttcgcatgattaaagaaaaactgtgttacgtgggatataatattgagcaagagcagaaactggccttagaaaccacagtattagttgaatcttatacactcccagatggacgtatcatcaaagttgggggagagagatttgaagcaccagaagctttatttcagcctcacttgatcaatgttgaaggagttggtgttgctgaattgctttttaacacaattcaggcagctgacattgataccagatctgaattctacaaacacattgtgctttctggagggtctactatgtatcctggcctgccatcacggttggaacgagaacttaaacagctttacttagaacgagttttgaagggtgatgtggaaaaactttctaaatttaagatccgcattgaagacccaccccgcagaaagcacatggtattcctgggtggtgcagttctagcggatatcatgaaagacaaagacaacttttggatgacccgacaagagtaccaagaaaagggtgtccgtgtgctagagaaacttggtgtgactgttcgataaactccaaagcttgttcccatcatacccgtaatgctttcttttttcctttattgccaatctttgaactcattcaactccaggacatggaagaggcctctctctgccctttgactggaaaggtcaagttttattctggtgtcttggggaagctttgttaaatttttgttaatgtgggtaaatctgagtttaattcaactgcttccctacatagactagagggctaaggattctgtctgctgctttgtttcttctaagtaggcatttagatcattcctgtaggcttcctattttcactttactgctctaatgctgctagtcgtagtctttagcacactaggtggtatgcctttattagcataaaacaaaaaaaactttaacaggagcttttacatattactgggatggggggtggttcgggatgggtgggcagctgctgaaccctttagggcatttcctctgtaatgtggcgctttcaactgtactgctgcagctttaagtaccttaaagcttctcctgtgaacttcttagggaaatgttaggttcagaactaaagtgttttgggtgggttttgttgcgggggggagggtaacaatgggtggtcttctgatttttatttttgaggttttgtcaactggagtacgtagaggaactttatttacagtactttgatttggcaggttttcttctacttgtgctctgcctggagctgtttccatatgatataaaaagcaagtgtagtattccattactatgtggcttagggatttatttgttttttaaaatcaaccatgttagctgggattagactccctacagtccttcaatggaaaagtaacatttaaaaatcctttgggtaattcaaattacagatttaaaagagcttaagatctggtgttttgttaatgcttctgtttattccagaagcattaaggtaacccattgccaagtatcattcttgcaaattattcttttatataactgaccagtgcttaataaaacaagcaggtacttacaaataattactggcagtaggttataattggtggtttaaaaataacattggaatacaggacttgttgccaattgggtaattttcattagttgttttgttgttttgatttgaaacctggaaatacagtaaaatttgactgtttaaaatgttggccaaaaaaatcaagatttaatttttttatttgtactgaaaaactaatcataactgttaattctcagataccaaggaataccgacaggattcataaataggattttctgacactggcaggaaagtctgctaacgtttacaaaataccaaagactcttctttcaagctttaa

SEQ ID NO: 301466 - DNA, 2872 bp, Homo sapiens
catcccagttctgtccgctgaaaaggcctagaagcaataacacaccaagccctgtcgaatggtggggtccgccaggacctccaggcttgctccccgccctacccgccagcttctccgccacattccactgccgcagcagaaccggtgtccttcacctgcctgcgtcttctgcagttcgttaagcagcgcccttagctcctgtgacactttagggagaaagccgcagcaccggcgatgttggccgccattaacgcccggcaaagcgcccggaactagaagcagcgaagaacccgggtgggcagcgaccgtgacagccgagccggaagcggagctgcgggaggggcctcgacgctcctccatcttttattggagctcaccgctgccagtcgcgctgcctgcccgtcccacccttttcgtgcaggcattcagctaaatgacgggcggagcccggcggcggcttccggtcgggggaaaaaagttgggccgaaggaggggccgggaagacgcaagaggaagaagagaaaacggccgggcggcggtggctgtaggttgtgcggctgcagcggctcttccctgggcggacgatggacagccagggcaggaaggtggtggtgtgcgacaacggcaccgggtttgtgaagtgtggatatgcaggctctaactttccagaacacatcttcccagctttggttggaagacctattatcagatcaaccaccaaagtgggaaacattgaaatcaaggatcttatggttggtgatgaggcaagtgaattacgatcaatgttagaagttaactaccctatggaaaatggcatagtacgaaattgggatgacatgaaacacctgtgggactacacatttggaccagagaaacttaatatagataccagaaattgtaaaatcttactcacagaacctcctatgaacccaaccaaaaacagagagaagattgtagaggtaatgtttgaaacttaccagttttccggtgtatatgtagccatccaggcagttctgactttgtacgctcaaggtttattgactggtgtagtggtagactctggagatggtgtgactcacatttgcccagtatatgaaggcttttctctccctcatcttaccaggagactggatattgctgggagggatataactagatatcttatcaagctacttctgttgcgaggatacgccttcaaccactctgctgattttgaaacggttcgcatgattaaagaaaaactgtgttacgtgggatataatattgagcaagagcagaaactggccttagaaaccacagtattagttgaatcttatacactcccagatggacgtatcatcaaagttgggggagagagatttgaagcaccagaagctttatttcagcctcacttgatcaatgttgaaggagttggtgttgctgaattgctttttaacacaattcaggcagctgacattgataccagatctgaattctacaaacacattgtgctttctggagggtctactatgtatcctggcctgccatcacggttggaacgagaacttaaacagctttacttagaacgagttttgaagggtgatgtggaaaaactttctaaatttaagatccgcattgaagacccaccccgcagaaagcacatggtattcctgggtggtgcagttctagcggatatcatgaaagacaaagacaacttttggatgacccgacaagagtaccaagaaaagggtgtccgtgtgctagagaaacttggtgtgactgttcgataaactccaaagcttgttcccatcatacccgtaatgctttcttttttcctttattgccaatctttgaactcattcaactccaggacatggaagaggcctctctctgccctttgactggaaaggtcaagttttattctggtgtcttggggaagctttgttaaatttttgttaatgtgggtaaatctgagtttaattcaactgcttccctacatagactagagggctaaggattctgtctgctgctttgtttcttctaagtaggcatttagatcattcctgtaggcttcctattttcactttactgctctaatgctgctagtcgtagtctttagcacactaggtggtatgcctttattagcataaaacaaaaaaaactttaacaggagcttttacatattactgggatggggggtggttcgggatgggtgggcagctgctgaaccctttagggcatttcctctgtaatgtggcgctttcaactgtactgctgcagctttaagtaccttaaagcttctcctgtgaacttcttagggaaatgttaggttcagaactaaagtgttttgggtgggttttgttgcgggggggagggtaacaatgggtggtcttctgatttttatttttgaggttttgtcaactggagtacgtagaggaactttatttacagtactttgatttggcaggttttcttctacttgtgctctgcctggagctgtttccatatgatataaaaagcaagtgtagtattccattactatgtggcttagggatttatttgttttttaaaatcaaccatgttagctgggattagactccctacagtccttcaatggaaaagtaacatttaaaaatcctttgggtaattcaaattacagatttaaaagagcttaagatctggtgttttgttaatgcttctgtttattccagaagcattaaggtaacccattgccaagtatcattcttgcaaacccttctccccccgcgagggggggcgggaaaaagcgagggtcgggggcgccgccccccccccccccccccccccccccccctcaggggggggccccggtaccccaatttccccttataggaagtcgttttaacatttacct

SEQ ID NO: 301467 - DNA, 1941 bp, Homo sapiens
catcccagttctgtccgctgaaaaggcctagaagcaataacacaccaagccctgtcgaatggtggggtccgccaggacctccaggcttgctccccgccctacccgccagcttctccgccacattccactgccgcagcagaaccggtgtccttcacctgcctgcgtcttctgcagttcgttaagcagcgcccttagctcctgtgacactttagggagaaagccgcagcaccggcgatgttggccgccattaacgcccggcaaagcgcccggaactagaagcagcgaagaacccgggtgggcagcgaccgtgacagccgagccggaagcggagctgcgggaggggcctcgacgctcctccatcttttattggagctcaccgctgccagtcgcgctgcctgcccgtcccacccttttcgtgcaggcattcagctaaatgacgggcggagcccggcggcggcttccggtcgggggaaaaaagttgggccgaaggaggggccgggaagacgcaagaggaagaagagaaaacggccgggcggcggtggctgtaggttgtgcggctgcagcggctcttccctgggcggacgatggacagccagggcaggaaggtggtggtgtgcgacaacggcaccgggtttgtgaagtgtggatatgcaggctctaactttccagaacacatcttcccagctttggttggaagacctattatcagatcaaccaccaaagtgggaaacattgaaatcaaggatcttatggttggtgatgaggcaagtgaattacgatcaatgttagaagttaactaccctatggaaaatggcatagtacgaaattgggatgacatgaaacacctgtgggactacacatttggaccagagaaacttaatatagataccagaaattgtaaaatcttactcacagaacctcctatgaacccaaccaaaaacagagagaagattgtagaggtaatgtttgaaacttaccagttttccggtgtatatgtagccatccaggcagttctgactttgtacgctcaaggtttattgactggtgtagtggtagactctggagatggtgtgactcacatttgcccagtatatgaaggcttttctctccctcatcttaccaggagactggatattgctgggagggatataactagatatcttatcaagctacttctgttgcgaggatacgccttcaaccactctgctgattttgaaacggttcgcatgattaaagaaaaactgtgttacgtgggatataatattgagcaagagcagaaactggccttagaaaccacagtattagttgaatcttatacactcccagatggacgtatcatcaaagttgggggagagagatttgaagcaccagaagctttatttcagcctcacttgatcaatgttgaaggagttggtgttgctgaattgctttttaacacaattcaggcagctgacattgataccagatctgaattctacaaacacattgtgctttctggagggtctactatgtatcctggcctgccatcacggttggaacgagaacttaaacagctttacttagaacgagttttgaagggtgatgtggaaaaactttctaaatttaagatccgcattgaagacccaccccgcagaaagcacatggtattcctgggtggtgcagttctagcggatatcatgaaagacaaagacaacttttggatgacccgacaagagtaccaagaaaagggtgtccgtgtgctagagaaacttggtgtgactgttcgataaactccaaagcttgttcccatcatacccgtaatgctttcttttttcctttattgccaatctttgaactcattcaactccaggacatggaagaggcctctctctgccctttgactggaaaggtcaagttttattctggtgtcttgttgggagcttaggatcctctagagcaacc

SEQ ID NO: 301468 - DNA, 362 bp, Homo sapiens
aaagcggacggaagcgtaaaaggctcggtttgtgtgttccgagaagggctcttttccccagggccaccggtttgtaaaaaggagaaagacctagaggccttcctcttcctgtatagttgaagatacaccaaacgagaagcaggaagcgggtttacttaaaaaaaaaaaaaaaaaaagggaagtgctgtcatggagtgtggacctcagccctttcgctgtgtttgttgggctttttattagttttttcgagggaaggggtccagatcggcagcgcatcgttcactttttgttttacatactagtatttggcccaggagtaggcccacggagaccagcatgttccattgagtggttttgggtga

SEQ ID NO: 301469 - DNA, 7566 bp, Homo sapiens
gcgcggaggcagggaaccggagccttggagcgacccaacccctcgtctcgctgccctcccgcgcctgcaacggtgcgcggagactccggcgaactcagacacccaacggcggagaacagaagcggcaggcggcggacgtggcccggaagctgcgcgccgaacgcagcgcacccgctgccgagcagaggagccgcgcctttccccgaccctcggctccagcccccggcgcctgccgcctcgcagcccctctgcgtcctcggctcgggggccggcaccggcgatgccgagcggacgctccagtcctccgacccgctgaagaagcagcagccgctcgcccggagcctacggggattgtgcgagcggatcgtgctcggtggaggctcgggctgcggggcgcggggactccggggggcggggggagggaccgctctgtcggtgcccggcgccagccgcggctttgaagggtctccctcccctgcccttagcagctctgccacggactccgggaggctgcgggcggcgtcctgagggctccccagcagacccaatcggacttgagaaggtgatcgctctgctctcccaacccccttccctccccattccccccacttaactttttgtctccgttcatccgcggcttcgtcccctccccggcagacccacccgcggctgtgacaaccgcccggggcatgggccccccaacacggctcctagaggccccgcggcctcgcaagatgtgagaggccctccccgggcagaatcggagcttcaggagaggagctaataccccgccccccgtccctcacatcaggcggggtggaggtgcgcgctgagcccccgcggtgctgagcgtcccggagcgcccaatcctgggctggaacgagtagctggccggaggcgcgccgcggagagccggctgtcatgccctattgatccccctctgccccccgccaagtatgtttgggctggaccaattcgagccccaggtcaacagcaggaacgctggccagggcgagaggaactttaacgagaccggactgagcatgaacacccactttaaggccccggctttccacactggggggccccctggccctgtggatcctgctatgagcgcgctggggcaacccccgatcttgggcatgaacatggagccctacggcttccacgcgcgcggccactcggagttgcacgcaggggggctgcaagcgcagcctgtgcacggcttctttggcggccagcagcctcaccacggccacccgggaagtcatcatccccaccagcatcacccccactttgggggcaacttcggtggcccggaccccggggcctcgtgcctgcacgggggtcgcctgctcggctacggcggcgcagccggaggcctgggcagccagccgcccttcgccgagggctatgagcacatggcggagagccaggggcctgagagcttcggcccgcagcgaccggggaacctcccggacttccacagttcaggtgcctccagccaccgcgtgccggccccatgcctgccgctggaccagagccctaaccgagccgcctccttccacggcctgccgtcctccagcggctccgattcccacagtctggagccacggagggtgacgaaccaaggagccgtcgactcgctggaatacaattaccgggcgaggcgccctcgggacattttgacatgttttcgccctctgactccgaagggcagctgcctcattatgcagcgggtcgccaggttcctggggggcggctttcccggggcgccctcggccatgcccagagctgcgggcatggtgggcttgtccaaaatgcacgcccagccaccgcagcagcagccccagcagcagcagcagccccagcagcagcagcagcatggtgtgttctttgagaggttcagtggggccagaaagatgcctgtgggtctggagccctcagtgggctccaggcacccgttaatgcagcctccccagcaggccccgccaccccctcagcagcagcccccgcagcagccgccacagcagcagccgccgccgccacccgggcttctagtccgacaaaattcgttgcccgcctgcgctccctcggccccagcagggcgaggcgggcacgcccagcggcggcctgcaggacggaggccccatgctgcccagccagcacgcgcaattcgagtatcccatccaccggctggagaaccggagcatgcacccttattccgagcctgttttcagcatgcagcatcctcctccgcagcaggcgcccaaccagcggctgcagcatttcgacgcgcccccctacatgaacgtggccaagaggcgcgcttcgactttccgggcagcgcgggagtggaccgctgcgcttcgtggaacggcagcatgcacaacggcgctctggataatcacctctccccttccgcctacccaggcctacccggcgagttcacaccgcctgtgcccgacagcttcccttcggggccgcccctgcagcatccggccccggaccaccagtccctgcaacagcagcagcagcagcagcagcagcagcaacagcagcagcagcagcagcaacagcaacagcaacagcagcagcagcagcagcgccaaaacgcggccctcatgattaagcagatggcgtcgcggaatcagcagcagcggctgcgccagcccaacctggctcagctaggccaccccggggacgtgggccagggcggcctggtgcatggcggcccggtgggcggcttggcccagccgaactttgagcgcgaaggcggcagcacgggcgccgggcgtctgggcaccttcgagcagcaggcgccgcacttggcgcaagagagcgcgtggttctcaggtccgcatccgccgcccggagacctgctgccccgtaggatgggcggctcgggtctgcccgctgactgtggcccgcacgaccccagcctggcgccccctcctccgcctggtggctcgggggtgctgttccggggccctctgcaggagccgatgaggatgcccggagaggccacgtgccgcgctgccttcaccggcctgcagttcgggggcagtctgggaggcctgggtcagctgcagtcgcccggggcgggcgtggggctccccagcgctgcttcggagcgccggcccccgccgccggactttgctacgtctgcgctcgggggccagccgggctttccgtttggtgcagccggccggcagtccacgccgcacagcggtccaggcgtgaactcgccccccagcgcgggagggggcggtggcagctctggtggcggcggtggcgggggtgcctacccgccgcagcctgatttccagcccagccagcgcacctcggccagtaaattgggcgcgctctcgctgggctccttcaacaagcccagctccaaggacaacctgttcggccagagctgcctggctgcgctctccaccgcttgccagaacatgatcgccagcctcggggcccccaacctcaacgtgaccttcaacaagaagaacccgccagagggcaagaggaaactgagccagaacgagaccgacggcgcggcagtggccggcaacccgggctcggattacttcccaggagggactgctcctgggggccccaggacccggaggccgtccgggaccagtagcagcggctccaaagcctcggggccgcccaaccctccagcccagggggacggcaccagcctctcccccaactacaccctggaatccacgtcggggaatgacggcaagccggtctccgggggcggcggccggggacggggtcgcagaaaaagggacagtggtcacgtgagccctggcaccttctttgacaagtactcggcggctccggacagcgggggcgcacctggggtgagcccagggcagcagcaagcgtcaggcgcagccgtcgggggaagctccgcaggcgagacgcgcggggcaccgacgccccacgaaaaggcgctcacgtcgccatcctgggggaagggggctgagttgctcctgggggatcagccggacctcattgggtccctggacggcggggccaagtcggacagtagttcgccaaacgtgggtgagttcgcctcggacgaggtgagcacgagctacgccaatgaggacgaggtgtcgtccagctctgacaacccccaggcactagttaaagcgagcaggagtcccctggtgaccggctcgcccaaactccctccccgtggggtaggcgccggggaacacggaccgaaggcgcccccgcccgccctcggcctgggcatcatgtctaactctacctcgacccctgacagctacggcggcggtgggggcccgggccatccgggcactccgggcctggagcaggtccgcaccccgacgagcagcagcggcgccccgccacccgacgagatccaccccctggagatccttcaggcgcagatccagctacagaggcagcagttcagcatctccgaggaccagcctctggggctgaagggtggcaagaagggtgagtgcgccgtcggggcctcaggggcgcagaatggcgacagcgagctgggcagctgctgctccgaggcggtcaagagcgccatgagcaccattgacctggactcgctgatggcagagcacagcgctgcctggtacatgcccgctgacaaggccctggtggacagcgcggacgacgacaagacgttggcgccctgggagaaggccaaaccccagaaccccaacagcaaagaagcccacgacctccctgcaaacaaggcctcagcatcccagcctggcagccacttgcagtgcctgtctgtccactgcacagacgacgtgggtgacgccaaggctcgagcctccgtgcccacctggcggtccctgcattctgacatctccaacagatttgggacattcgtggctgccctaacttgaatgacaagaaagatcccctcctctaccaggcccttcctctccccctgtctgtttccttccccctcaaccttaccccacccctctgttaatttgaaagggccactattgctgagtggatgagttttttttttttcctctaggttggtacctgcttagtggcatatggaccggaaagggttaatttaaagggggggaacctcaaaagtttttttaaaaaagaaacttgtctgccacagtatgttaccagtgttaacccttctgcagttagcaaacttttgcttaagcctttttcctctagatactccccatgtttcggtaatcttggcatacattttttagatgacctctttccttgttttgttttcatgctgctgtatgtccaagtattgttatttcataataagacaagagttgctttcttttttattctttttccttttcttaccccctccccttttattttctttttgctttgttcactgcttattaaaatggaaatcctggagaatagtagttctggaatattgccgggtgaaagtccaattgtcatcacaatgttatatattgacaccccagtgtcatcagtcaggcaggagccaaacaatgaatgcccctcttaggtattccgcctgggattttgttttgtctgttccctaagaaaatatattttcattcctgcaaacacagtgctcagccttcagttcccttccacttgagttctctcttctcctgctggaagccgcccctctctgcgatggacgtgaggacgtgtccagctctgctctgtgggaaggagttggaatgttcgacagcagtgttttctctccttttctgggcctcctcgcaaatgcccaggccctgcattttcacgctgtgctaagcagcctttggtctgcatgggggatggtgtgctcccagcctgcagtctttggagcaaggctgctgcccgtgccttgggtgctggagttggaggaggctgttctcagccctttcccttttctgaaagctgttcctggccgggcatcccagggaagaaggaggggactgcgtgtatctcctccacctctcccattccatccccagtccagcctgggcaaccccacccctgggagggatgaggcaccctcttgctcagcctgctcagccttctctgagcctttgcagggatctgcagactcctgagggctagaggacagagaaagagaatagaatgaaatgactttgattcctgcgccttttagttttgaactctggaattcctctgccccctccccaacatttttttggaatctcaccctgttgcaaaactagagccatgtcccaagcatctcacaaaggaataactgctctgagcagagatgagtggtggttggcaggggcaggcaactttgggtgctgctgatgcctgcaaaagccatttatggcttgtggtggggggcacatagattccccggtgggttagacaggaagtaactgatatcacttcacccaaatatataaccgtgatggttatctatttaatttcagtttttgttaacgagcgtgtcttactaaaacgctccactttgagctcccccaccccctccaggtcctcagagtttgcagatctgggctttctaaagcaagtgacctgaaggctctgggctcaccatacaacacccacgttgtttatttcaaagaacttttcagcgaagggagaggagctttcagaaaaacctcactctttcccctcccttctcccctctttccttctgccggtccttttggctggggtctgagtctgcggttctcgcctgggcagtcttgacgaggagcaaaccccgccttcagagggcagacaaagcaggtggcatgaattgatcagcgagaaaggtgtgagccgaggcagttcctgcgttctgctacaaaaggaatggaaagggaagggaatttccccccaccatgggctgtgggagagttgaccgtattctgggcaagactccatgacccctctgattctgcagtgtacagctgtttgagagcctcatcattttacttttgaaacaggaatgatttctccttaattgcttaaggccggggagcaaagtgtcttaacttctgtctttgactttcccagcgttgagtcatcaacactttgccaattagctcatggtcctggcaacctcagaaacccctgaagttttaaaaactttctcgctccccacgaccccagaatgaaacagctttaaaaatagccttaagcaaaaggatgttatttcattaaatttggtttaatggaaagaataaaagtaaatgaaaaacacaccctacacactagactccgaacactggtaatcagtactgcatagcaaactctttgggaaagaaaacgaaaatgttattgcacatgtaaaatatgaaaacttaactctgctgtgtgttaggcaatcctgtaatcttttttgactcttaaaagaaattcatttctgaaatgcttggttggaagactgtgacaatagctcatgaaattgagtgttatttttttctttcttttttaaaaaaatatgtaaagtgcagtcttctgtattcctgcatattgtatatacctgtatatgttttcctgagcagttaaataacaataaatatgacgttaatggtgaaaaaaaaatat

SEQ ID NO: 301470 - DNA, 7019 bp, Homo sapiens
gcgcggaggcagggaaccggagccttggagcgacccaacccctcgtctcgctgccctcccgcgcctgcaacggtgcgcggagactccggcgaactcagacacccaacggcggagaacagaagcggcaggcggcggacgtggcccggaagctgcgcgccgaacgcagcgcacccgctgccgagcagaggagccgcgcctttccccgaccctcggctccagcccccggcgcctgccgcctcgcagcccctctgcgtcctcggctcgggggccggcaccggcgatgccgagcggacgctccagtcctccgacccgctgaagaagcagcagccgctcgcccggagcctacggggattgtgcgagcggatcgtgctcggtggaggctcgggctgcggggcgcggggactccggggggcggggggagggaccgctctgtcggtgcccggcgccagccgcggctttgaagggtctccctcccctgcccttagcagctctgccacggactccgggaggctgcgggcggcgtcctgagggctccccagcagacccaatcggacttgagaaggtgatcgctctgctctcccaacccccttccctccccattccccccacttaactttttgtctccgttcatccgcggcttcgtcccctccccggcagacccacccgcggctgtgacaaccgcccggggcatgggccccccaacacggctcctagaggccccgcggcctcgcaagatgtgagaggccctccccgggcagaatcggagcttcaggagaggagctaataccccgccccccgtccctcacatcaggcggggtggaggtgcgcgctgagcccccgcggtgctgagcgtcccggagcgcccaatcctgggctggaacgagtagctggccggaggcgcgccgcggagagccggctgtcatgccctattgatccccctctgccccccgccaagtatgtttgggctggaccaattcgagccccaggtcaacagcaggaacgctggccagggcgagaggaactttaacgagaccggactgagcatgaacacccactttaaggccccggctttccacactggggggccccctggccctgtggatcctgctatgagcgcgctggggcaacccccgatcttgggcatgaacatggagccctacggcttccacgcgcgcggccactcggagttgcacgcaggggggctgcaagcgcagcctgtgcacggcttctttggcggccagcagcctcaccacggccacccgggaagtcatcatccccaccagcatcacccccactttgggggcaacttcggtggcccggaccccggggcctcgtgcctgcacgggggtcgcctgctcggctacggcggcgcagccggaggcctgggcagccagccgcccttcgccgagggctatgagcacatggcggagagccaggggcctgagagcttcggcccgcagcgaccggggaacctcccggacttccacagttcaggtgcctccagccaccgcgtgccggccccatgcctgccgctggaccagagccctaaccgagccgcctccttccacggcctgccgtcctccagcggctccgattcccacagtctggagccacggagggtgacgaaccaaggagccgtcgactcgctggaatacaattaccgggcgaggcgccctcgggacattttgacatgttttcgccctctgactccgaagggcagctgcctcattatgcagcgggtcgccaggttcctggggggcggctttcccggggcgccctcggccatgcccagagctgcgggcatggtgggcttgtccaaaatgcacgcccagccaccgcagcagcagccccagcagcagcagcagccccagcagcagcagcagcatggtgtgttctttgagaggttcagtggggccagaaagatgcctgtgggtctggagccctcagtgggctccaggcacccgttaatgcagcctccccagcaggccccgccaccccctcagcagcagcccccgcagcagccgccacagcagcagccgccgccgccacccgggcttctagtccgacaaaattcgttgcccgcctgcgctccctcggccccagcagggcgaggcgggcacgcccagcggcggcctgcaggacggaggccccatgctgcccagccagcacgcgcaattcgagtatcccatccaccggctggagaaccggagcatgcacccttattccgagcctgttttcagcatgcagcatcctcctccgcagcaggcgcccaaccagcggctgcagcatttcgacgcgcccccctacatgaacgtggccaagaggcgcgcttcgactttccgggcagcgcgggagtggaccgctgcgcttcgtggaacggcagcatgcacaacggcgctctggataatcacctctccccttccgcctacccaggcctacccggcgagttcacaccgcctgtgcccgacagcttcccttcggggccgcccctgcagcatccggccccggaccaccagtccctgcaacagcagcagcagcagcagcagcagcagcaacagcagcagcagcagcagcaacagcaacagcaacagcagcagcagcagcagcgccaaaacgcggccctcatgattaagcagatggcgtcgcggaatcagcagcagcggctgcgccagcccaacctggctcagctaggccaccccggggacgtgggccagggcggcctggtgcatggcggcccggtgggcggcttggcccagccgaactttgagcgcgaaggcggcagcacgggcgccgggcgtctgggcaccttcgagcagcaggcgccgcacttggcgcaagagagcgcgtggttctcaggtccgcatccgccgcccggagacctgctgccccgtaggatgggcggctcgggtctgcccgctgactgtggcccgcacgaccccagcctggcgccccctcctccgcctggtggctcgggggtgctgttccggggccctctgcaggagccgatgaggatgcccggagaggccacgtgccgcgctgccttcaccggcctgcagttcgggggcagtctgggaggcctgggtcagctgcagtcgcccggggcgggcgtggggctccccagcgctgcttcggagcgccggcccccgccgccggactttgctacgtctgcgctcgggggccagccgggctttccgtttggtgcagccggccggcagtccacgccgcacagcggtccaggcgtgaactcgccccccagcgcgggagggggcggtggcagctctggtggcggcggtggcgggggtgcctacccgccgcagcctgatttccagcccagccagcgcacctcggccagtaaattgggcgcgctctcgctgggctccttcaacaagcccagctccaaggacaacctgttcggccagagctgcctggctgcgctctccaccgcttgccagaacatgatcgccagcctcggggcccccaacctcaacgtgaccttcaacaagaagaacccgccagagggcaagaggaaactgagccagaacgagaccgacggcgcggcagtggccggcaacccgggctcggattacttcccaggagggactgctcctgggggccccaggacccggaggccgtccgggaccagtagcagcggctccaaagcctcggggccgcccaaccctccagcccagggggacggcaccagcctctcccccaactacaccctggaatccacgtcggggaatgacggcaagccggtctccgggggcggcggccggggacggggtcgcagaaaaagggacagtggtcacgtgagccctggcaccttctttgacaagtactcggcggctccggacagcgggggcgcacctggggtgagcccagggcagcagcaagcgtcaggcgcagccgtcgggggaagctccgcaggcgagacgcgcggggcaccgacgccccacgaaaaggcgctcacgtcgccatcctgggggaagggggctgagttgctcctgggggatcagccggacctcattgggtccctggacggcggggccaagtcggacagtagttcgccaaacgtgggtgagttcgcctcggacgaggtgagcacgagctacgccaatgaggacgaggtgtcgtccagctctgacaacccccaggcactagttaaagcgagcaggagtcccctggtgaccggctcgcccaaactccctccccgtggggtaggcgccggggaacacggaccgaaggcgcccccgcccgccctcggcctgggcatcatgtctaactctacctcgacccctgacagctacggcggcggtgggggcccgggccatccgggcactccgggcctggagcaggtccgcaccccgacgagcagcagcggcgccccgccacccgacgagatccaccccctggagatccttcaggcgcagatccagctacagaggcagcagttcagcatctccgaggaccagcctctggggctgaagggtggcaagaagggtgagtgcgccgtcggggcctcaggggcgcagaatggcgacagcgagctgggcagctgctgctccgaggcggtcaagagcgccatgagcaccattgacctggactcgctgatggcagagcacagcgctgcctggtacatgcccgctgacaaggccctggtggacagcgcggacgacgacaagacgttggcgccctgggagaaggccaaaccccagaaccccaacagcaaagaagcccacgacctccctgcaaacaaggcctcagcatcccagcctggcagccacttgcagtgcctgtctgtccactgcacagacgacgtgggtgacgccaaggctcgagcctccgtgcccacctggcggtccctgcattctgacatctccaacagatttgggacattcgtggctgccctaacttgaatgacaagaaagatcccctcctctaccaggcccttcctctccccctgtctgtttccttccccctcaaccttaccccacccctctgttaatttgaaagggccactattgctgagtggatgagttttttttttttcctctagtgctcagccttcagttcccttccacttgagttctctcttctcctgctggaagccgcccctctctgcgatggacgtgaggacgtgtccagctctgctctgtgggaaggagttggaatgttcgacagcagtgttttctctccttttctgggcctcctcgcaaatgcccaggccctgcattttcacgctgtgctaagcagcctttggtctgcatgggggatggtgtgctcccagcctgcagtctttggagcaaggctgctgcccgtgccttgggtgctggagttggaggaggctgttctcagccctttcccttttctgaaagctgttcctggccgggcatcccagggaagaaggaggggactgcgtgtatctcctccacctctcccattccatccccagtccagcctgggcaaccccacccctgggagggatgaggcaccctcttgctcagcctgctcagccttctctgagcctttgcagggatctgcagactcctgagggctagaggacagagaaagagaatagaatgaaatgactttgattcctgcgccttttagttttgaactctggaattcctctgccccctccccaacatttttttggaatctcaccctgttgcaaaactagagccatgtcccaagcatctcacaaaggaataactgctctgagcagagatgagtggtggttggcaggggcaggcaactttgggtgctgctgatgcctgcaaaagccatttatggcttgtggtggggggcacatagattccccggtgggttagacaggaagtaactgatatcacttcacccaaatatataaccgtgatggttatctatttaatttcagtttttgttaacgagcgtgtcttactaaaacgctccactttgagctcccccaccccctccaggtcctcagagtttgcagatctgggctttctaaagcaagtgacctgaaggctctgggctcaccatacaacacccacgttgtttatttcaaagaacttttcagcgaagggagaggagctttcagaaaaacctcactctttcccctcccttctcccctctttccttctgccggtccttttggctggggtctgagtctgcggttctcgcctgggcagtcttgacgaggagcaaaccccgccttcagagggcagacaaagcaggtggcatgaattgatcagcgagaaaggtgtgagccgaggcagttcctgcgttctgctacaaaaggaatggaaagggaagggaatttccccccaccatgggctgtgggagagttgaccgtattctgggcaagactccatgacccctctgattctgcagtgtacagctgtttgagagcctcatcattttacttttgaaacaggaatgatttctccttaattgcttaaggccggggagcaaagtgtcttaacttctgtctttgactttcccagcgttgagtcatcaacactttgccaattagctcatggtcctggcaacctcagaaacccctgaagttttaaaaactttctcgctccccacgaccccagaatgaaacagctttaaaaatagccttaagcaaaaggatgttatttcattaaatttggtttaatggaaagaataaaagtaaatgaaaaacacaccctacacactagactccgaacactggtaatcagtactgcatagcaaactctttgggaaagaaaacgaaaatgttattgcacatgtaaaatatgaaaacttaactctgctgtgtgttaggcaatcctgtaatcttttttgactcttaaaagaaattcatttctgaaatgcttggttggaagactgtgacaatagctcatgaaattgagtgttatttttttctttcttttttaaaaaaatatgtaaagtgcagtcttctgtattcctgcatattgtatatacctgtatatgttttcctgagcagttaaataacaataaatatgacgttaatggtgaaaaaaaaatat

SEQ ID NO: 301471 - DNA, 732 bp, Homo sapiens
ggacaaatatacatccataaaataaccacttcaaagctgaataattattgcttcctttctttatagacttaaaaataataaattggctttcatttttcttccaatctccaacagattgaagaagagatgttggctttgcagaatgagcgcacagaacgaatacgaagcctgttggaacgtcaagccagagagattgaagcttttgactctgaaagcatgagactaggttttagtaatatggtcctttctaatctctcccctgaggcattcagccacagctacccgggagcttctggttggtcacacaaccctactgggggtccaggacctcactggggtcatcccatgggtggcccaccacaagcttggggccatccaatgcaaggtggaccccagccatggggtcacccttcagggccaatgcaaggggtacctcgaggtagcagtatgggagtccgcaatagcccccaggctctgaggcggacagcttctgggggacggacggagcagggcatgagcagaagcacgagtgtcacttcacaaatatccaatgggtcacacatgtcttatacataacttaataattgagagtggcaattccgctggagctgtctgccaaaagaactggttcgacatatacaggaacttcttattggggccacaaggtggaactgagcgtattggtaattattcattttgtgaacggtccggttgggttactaattggaggga

SEQ ID NO: 301472 - DNA, 2304 bp, Homo sapiens
ggacaaatatacatccataaaataaccacttcaaagctgaataattattgcttcctttctttatagacttaaaaataataaattggctttcatttttcttccaatctccaacagattgaagaagagatgttggctttgcagaatgagcgcacagaacgaatacgaagcctgttggaacgtcaagccagagagattgaagcttttgactctgaaagcatgagactaggttttagtaatatggtcctttctaatctctcccctgaggcattcagccacagctacccgggagcttctggttggtcacacaaccctactgggggtccaggacctcactggggtcatcccatgggtggcccaccacaagcttggggccatccaatgcaaggtggaccccagccatggggtcacccttcagggccaatgcaaggggtacctcgaggtagcagtatgggagtccgcaatagcccccaggctctgaggcggacagcttctgggggacggacggagcagggcatgagcagaagcacgagtgtcacttcacaaatatccaatgggtcacacatgtcttatacataacttaataattgagagtggcaattccgctggagctgtctgccaaaagaaactgcctacagacatcatcacagcagcctcctcacttgggtactacagtgtggaagctgagtgcatatggtatattttattcatttttgtaaagcgttctgttttgtgtttactaattgggatgtcatagtacttggctgccgggtttgtttgtttttggggaaattttgaaaagtggagttgatattaaaaataaatgtgtatgtgtgtacatatatatacacacacatacacatatattatgcatgtggtgaaaagaattggctagataggggatttttctgaacactgcaaaaatagaacgtagcaaaatggcttcagttatcacttttgggtgtctgtatcctaagaagtttctgaaaagatctaaagcctttttatcccatatcccaaattcttatgagccactcacagcaggcagcatatgttgaaataagttattactggtacacacctgcattgcctcaccagtgtatttatttgttattaaattgatctgacttctcagcctcatttggactaaaaaaagaaagcagaaatccatgaacacattgcttctcggccttttggctaagatcaagtgtagaaatccatgaacactaaaggacttcattgattttttcagagagtagaaaacaacttagtttttcttttttcctgaatgcgtcataggcttgtgagtgatttttgtccattcaattgtgccttctttgtattatgataagatgggggtacttaaggagatcacaagttgtgtgaggattgcattaacaaacctatgagccttcaatggggaagaccagaagggtgagaggggccctgaaagttcatatggtgggtatgtcccgcagcagagtgaggagatgaagcttacgtgtcctgacgttttgttgcttatactgtgatatctcatcctagctaagctctataatgcccaagaccccaaacagtacttttactttgtttgtacaaaaacaaagacatatagccaatacaaatcaaatgccggaggtgtttgatgccatatttgcaaattgccatctattgaaattctcgtcacactacatagacataattgttatctccttttggcttatgtgattttctgtttacaagtagaatagccaattatttaaatgtttagttgccacagtgaaccaggagtcactgagccaatgactttaccagctgctgactaatcttcatcaccactgtagattttgctgcatgtgcaggtcctctatttttaattgctgttttcgttgctgcagtactttacaaacttctagttcgttgagacttagtgaccatttggcatcaagttaacatcacacaataggaaacaccacttccacaagtctcaagcctcagtgctaaagtactactgaaaaggaactaggaagtttggccaattaaaaaaaaaaagtaaaataagttatagtggtcagggaatctcttgacgaaagctaactcttatttttcagggggcacatgttttgttttgttatgttttgttgtacaatgaaggatgaacccaatgctaaaaagtcagttattttcttggttttccatttcttgtatataaattgtgttggaggtgggtaggaagctgtgagtatgacttgaagaaaaatatccttttcagtgacaaatcagagtttcttacaagttattgtcctg

SEQ ID NO: 301473 - DNA, 1808 bp, Homo sapiens
ggacaaatatacatccataaaataaccacttcaaagctgaataattattgcttcctttctttatagacttaaaaataataaattggctttcatttttcttccaatctccaacagattgaagaagagatgttggctttgcagaatgagcgcacagaacgaatacgaagcctgttggaacgtcaagccagagagattgaagcttttgactctgaaagcatgagactaggttttagtaatatggtcctttctaatctctcccctgaggcattcagccacagctacccgggagcttctggttggtcacacaaccctactgggggtccaggacctcactggggtcatcccatgggtggcccaccacaagcttggggccatccaatgcaaggtggaccccagccatggggtcacccttcagggccaatgcaaggggtacctcgaggtagcagtatgggagtccgcaatagcccccaggctctgaggcggacagcttctgggggacggacggagcagggcatgagcagaagcacgagtgtcacttcacaaatatccaatgggtcacacatgtcttatacataacttaataattgagagtggcaattccgctggagctgtctgccaaaagaaactgcctacagacatcatcacagcagcctcctcacttgggtactacagtgtggaagctgagtgcatatggtatattttattcatttttgtaaagcgttctgttttgtgtttactaattgggatgtcatagtacttggctgccgggtttgtttgtttttggggaaattttgaaaagtggagttgatattaaaaataaatgtgtatgtgtgtacatatatatacacacacatacacatatattatgcatgtggtgaaaagaattggctagataggggatttttctgaacactgcaaaaatagaacgtagcaaaatggcttcagttatcacttttgggtgtctgtatcctaagaagtttctgaaaagatctaaagcctttttatcccatatcccaaattcttatgagccactcacagcaggcagcatatgttgaaataagttattactggtacacacctgcattgcctcaccagtgtatttatttgttattaaattgatctgacttctcagcctcatttggactaaaaaaagaaagcagaaatccatgaacacattgcttctcggccttttggctaagatcaagtgtagaaatccatgaacactaaaggacttcattgattttttcagagagtagaaaacaacttagtttttcttttttcctgaatgcgtcataggcttgtgagtgatttttgtccattcaattgtgccttctttgtattatgataagatgggggtacttaaggagatcacaagttgtgtgaggattgcattaacaaacctatgagccttcaatggggaagaccagaagggtgagaggggccctgaaagttcatatggtgggtatgtcccgcagcagagtgaggagatgaagcttacgtgtcctgacgttttgttgcttatactgtgatatctcatcctagctaagctctataatgcccaagaccccaaacagtacttttactttgtttgtacaaaaacaaagacatatagccaatacaaatcaaatgccggaggtgtttgatgccatatttgcaaattgccatctattgaaattctcgtcacactacatagacataattgttatctccttttggcttatgtgattttctgtttacaagtagaataccctatcaatgtttaatatgtattcacctcagttatccaggattccctgaaacaatgaact

SEQ ID NO: 301474 - DNA, 1940 bp, Homo sapiens
  misc_feature (44)..(44): n is a, c, g, or t
  misc_feature (562)..(562): n is a, c, g, or t
  misc_feature (798)..(798): n is a, c, g, or t
tttgctctcttatgttactggttttgaaaacatttatatttacntgtgtctaagaatgtgtgcttatgtgtacttgcttcctagctttagaatctgcttagaatctgcaccttacctaaaatttccagtgtgtaaaatgaacatattacttatataaaccacatgggactgaacttttcatgagagcccccaaagtttccttcgtggagagattgaagctggaggaaatgaatttggcttataaaagatatgaggcatttaacagcaattggagccaaacttggtgttctttctgatttttttaaaattaatataccagaggaatcataaaatgttatggaacttatttcctcaagttctggaaatcattgggttaaacatagctaatttcccccttatgttattatagagtttatatttatattacaaagaaacgcaagcaataaatcctcattcagaatccttctctagcacattaaatatagcatgtgaactgtagagatttacctaaagtgcccataaacaagagtggccaacttgatgagaagtaagccaagtgccncttaataagtactgtaataacatagcctcctggaatggtctttcatcattttgtcaagaggaacttttatccctgtttatataaagctcctttgctaaatgaaacaagcaaaatgtatattcagcaattgttgacagagcaatgttgatagaaatgcaatgggggcccaacgacagctcctctttccaaagtggcttctgtgttttaaaaagatcttttgcttcaatcaggataanttccaagatattatgaaggaggtaatgtacttctccattcagtctatgataatgggatcctaattaacacctagtaggcctactgaaacaagcacctctataataagaggaagattctacatgaatatccaacctacttaacctttagggatttatttttacaatgtaagaaagtgataaagtcaccttcaaaaagttctaagtcagtacttaaaagtatttgatcaattgctttgtttcatgaagtaacattttacaattttaagtcacaactataaatttgttcatcccaaaccaagttatttcatgtcttaagatgtataattctagatgttttcatatgttataactattaaaaagttgaggctggacatggtggctcatgcctgtaatcccaacactttggaattacactttgggcatagatggggagatctcttgagcccaggagttggagagcagcctgggcaacacggcgaagggaggatcgcttgagcccaggaggttgaggctgcagtaagccttgattgcgccattgcactccagcctgggcaacagagcaagaacctgtctcaaaaaattttaagttgatctttctttctctacaattctattagtaaggctaaaaacaaaaccactaactttgcataaaacagcattccaatttaatctcaagctaacagttgactttgaaacatgctcttaatatttggtgcaggacatttcaaagctgagccctcttgcattgcctttttcagatgacctcaagcagtttggcctaacaaccagtattccgttccgaggttgcatcagatccctgaagctcaccaaaggcacaggcaagccactggaggttaattttgccaaggccctggaactgaggggcgttcaacctgtatcatgcccagccaactaataaaaataagtgtaaccccaggaagagtctgtcaaaacaagtatatcaagtaaaacaaacaaatatattttacctatatatgttaattaaactaatttgtgcatgtacatagaattctttctgtattcagatggtgctaattcagactccagactgaattttaattcaagttctttctcaagtctataaatattaaactgattatttcattctaaaaaaaaaaaag

SEQ ID NO: 301475 - DNA, 9644 bp, Homo sapiens
cagcgactcctctggctcccgagaagtggatccggtcgcggccactacgatgccgggagccgccggggtcctcctccttctgctgctctccggaggcctcgggggcgtacaggcgcagcggccgcagcagcagcggcagtcacaggcacatcagcaaagaggtttattccctgctgtcctgaatcttgcttctaatgctcttatcacgaccaatgcaacatgtggagaaaaaggacctgaaatgtactgcaaattggtagaacatgtccctgggcagcctgtgaggaacccgcagtgtcgaatctgcaatcaaaacagcagcaatccaaaccagagacacccgattacaaatgctattgatggaaagaacacttggtggcagagtcccagtattaagaatggaatcgaataccattatgtgacaattacactggatttacagcaggtgttccagatcgcgtatgtgattgtgaaggcagctaactccccccggcctggaaactggattttggaacgctctcttgatgatgttgaatacaagccctggcagtatcatgctgtgacagacacggagtgcctaacgctttacaatatttatccccgcactgggccaccgtcatatgccaaagatgatgaggtcatctgcacttcattttactccaagatacaccccttagaaaatggagagattcacatctctttaatcaatgggagaccaagtgccgatgatccttctccagaactgctagaatttacctccgctcgctatattcgcctgagatttcagaggatccgcacactgaatgctgacttgatgatgtttgctcacaaagacccaagagaaattgaccccattgtcaccagaagatattactactcggtcaaggatatttcagttggagggatgtgcatctgctatggtcatgccagggcttgtccacttgatccagcgacaaataaatctcgctgtgagtgtgagcataacacatgtggcgatagctgtgatcagtgctgtccaggattccatcagaaaccctggagagctggaacttttctaactaaaactgaatgtgaagcatgcaattgtcatggaaaagctgaagaatgctattatgatgaaaatgttgccagaagaaatctgagtttgaatatacgtggaaagtacattggagggggtgtctgcattaattgtacccaaaacactgctggtataaactgcgagacatgtacagatggcttcttcagacccaaaggggtatctccaaattatccaaggccatgccagccatgtcattgcgatccaattggttccttaaatgaagtctgtgtcaaggatgagaaacatgctcgacgaggtttggcacctggatcctgtcattgcaaaactggttttggaggtgtgagctgtgatcggtgtgccaggggctacactggctacccggactgcaaagcctgtaactgcagtgggttagggagcaaaaatgaggatccttgttttggcccctgtatctgcaaggaaaatgttgaaggaggagactgtagtcgttgcaaatccggcttcttcaatttgcaagaggataattggaaaggctgcgatgagtgtttctgttcaggggtttcaaacagatgtcagagttcctactggacctatggcaaaatacaagatatgagtggctggtatctgactgaccttcctggccgcattcgagtggctccccagcaggacgacttggactcacctcagcagatcagcatcagtaacgcggaggcccggcaagccctgccgcacagctactactggagcgcgccggctccctatctgggaaacaaactcccagcagtaggaggacagttgacatttaccatatcatatgaccttgaagaagaggaagaagatacagaacgtgttctccagcttatgattatcttagagggtaatgacttgagcatcagcacagcccaagatgaggtgtacctgcacccatctgaagaacatactaatgtattgttacttaaagaagaatcatttaccatacatggcacacattttccagtccgtagaaaggaatttatgacagtgcttgcgaatttgaagagagtcctcctacaaatcacatacagctttgggatggatgccatcttcaggttgagctctgttaaccttgaatccgctgtctcctatcctactgatggaagcattgcagcagctgtagaagtgtgtcagtgcccaccagggtatactggctcctcttgtgaatcttgttggcctaggcacaggcgagttaacggcactatttttggtggcatctgtgagccatgtcagtgctttggtcatgcggagtcctgtgatgacgtcactggagaatgcctgaactgtaaggatcacacaggtggcccatattgtgataaatgtcttcctggtttctatggcgagcctactaaaggaacctctgaagactgtcaaccctgtgcctgtccactcaatatcccatccaataactttagcccaacgtgccatttagaccggagtcttggattgatctgtgatggatgccctgtcgggtacacaggaccacgctgtgagaggtgtgcagaaggctattttggacaaccctctgtacctggaggatcatgtcagccatgccaatgcaatgacaaccttgacttctccatccctggcagctgtgacagcttgtctggctcctgtctgatatgtaaaccaggtacaacaggccggtactgtgagctctgtgctgatggatattttggagatgcagttgatgcgaagaactgtcagccctgtcgctgtaatgccggtggctctttctctgaggtttgccacagtcaaactggacagtgtgagtgcagagccaacgttcagggtcagagatgtgacaaatgcaaggctgggacctttggcctacaatcagcaaggggctgtgttccctgcaactgcaattcttttgggtctaagtcattcgactgtgaagagagtggacaatgttggtgccaacctggagtcacagggaagaaatgtgaccgctgtgcccacggctatttcaacttccaagaaggaggctgcacagcttgtgaatgttctcatctgggtaataattgtgacccaaagactgggcgatgcatttgcccacccaataccattggagagaaatgttctaaatgtgcacccaatacctggggccacagcattaccactggttgtaaggcttgtaactgcagcacagtgggatccttggatttccaatgcaatgtaaatacaggccaatgcaactgtcatccaaaattctctggtgcaaaatgtacagagtgcagtcgaggtcactggaactaccctcgctgcaatctctgtgactgcttcctccctgggacagatgccacaacctgtgattcagagactaaaaaatgctcctgtagtgatcaaactgggcagtgcacttgtaaggtgaatgtggaaggcatccactgtgacagatgccggcctggcaaattcggactcgatgccaagaatccacttggctgcagcagctgctattgcttcggcactactacccagtgctctgaagcaaaaggactgatccggacgtgggtgactctgaaggctgagcagaccattctacccctggtagatgaggctctgcagcacacgaccaccaagggcattgtttttcaacatccagagattgttgcccacatggacctgatgagagaagatctccatttggaacctttttattggaaacttccagaacaatttgaaggaaagaagttgatggcctatgggggcaaactcaagtatgcaatctatttcgaggctcgggaagaaacaggtttctctacatataatcctcaagtgatcattcgaggtgggacacctactcatgctagaattatcgtcaggcatatggctgctcctctgattggccaattgacaaggcatgaaattgaaatgacagagaaagaatggaaatattatggggatgatcctcgagtccatagaactgtgacccgagaagacttcttggatatactatatgatattcattacattcttatcaaagctacttatggaaatttcatgcgacaaagcaggatttctgaaatctcaatggaggtagctgaacaaggacgtggaacaacaatgactcctccagctgacttgattgaaaaatgtgattgtcccctgggctattctggcctgtcctgtgaggcatgcttgccgggattttatcgactgcgttctcaaccaggtggccgcacccctggaccaaccctgggcacctgtgttccatgtcaatgtaatggacacagcagcctgtgtgaccctgaaacatcgatatgccagaattgtcaacatcacactgctggtgacttctgtgaacgatgtgctcttggatactatggaattgtcaagggattgccaaatgactgtcagcaatgtgcctgccctctgatttcttccagtaacaatttcagcccctcttgtgtcgcagaaggacttgacgactaccgctgcacggcttgtccacggggatatgaaggccagtactgtgaaaggtgtgcccctggctatactggcagtccaggcaaccctggaggctcctgccaagaatgtgagtgtgatccctatggctcactgcctgtgccctgtgaccctgtcacaggattctgcacgtgccgacctggagccacgggaaggaagtgtgacggctgcaagcactggcatgcacgcgagggctgggagtgtgttttttgtggagatgagtgcactggccttcttctcggtgacttggctcgcctggagcagatggtcatgagcatcaacctcactggtccgctgcctgcgccatataaaatgctgtatggtcttgaaaatatgactcaggagctaaagcacttgctgtcacctcagcgggccccagagaggcttattcagctggcagagggcaatctgaatacactcgtgaccgaaatgaacgagctgctgaccagggctaccaaagtgacagcagatggcgagcagaccggacaggatgctgagaggaccaacacaagagcaaagtccctgggagaattcattaaggagcttgcccgggatgcagaagctgtaaatgaaaaagctataaaactaaatgaaactctaggaactcgagacgaggcctttgagagaaatttggaagggcttcagaaagagattgaccagatgattaaagaactgaggaggaaaaatctagagacacaaaaggaaattgctgaagatgagttggtagctgcagaagcccttctgaaaaaagtgaagaagctgtttggagagtcccggggggaaaatgaagaaatggagaaggatctccgggaaaaactggctgactacaaaaacaaagttgatgatgcttgggaccttttgagagaagccacagataaaatcagagaagctaatcgcctatttgcagtaaatcagaaaaacatgactgcattggagaaaaagaaggaggctgttgagagcggcaaacgacaaattgagaacactttaaaagaaggcaatgacatactcgatgaagccaaccgtcttgcagatgaaatcaactccatcatagactatgttgaagacatccaaactaaattgccacctatgtctgaggagcttaatgataaaatagatgacctctcccaagaaataaaggacaggaagcttgctgagaaggtgtcccaggctgagagccacgcagctcagttgaatgactcatctgctgtccttgatggaatccttgatgaggctaaaaacatctccttcaatgccactgcagccttcaaagcttacagcaatattaaggactatattgatgaagctgagaaagttgccaaagaagccaaagatcttgcacatgaagctacaaaactggcaacaggtcctcggggtttattaaaggaagatgccaaaggctgtcttcagaaaagcttcaggattcttaacgaagccaagaagttagcaaatgatgtaaaagaaaatgaagaccatctaaatggcttaaaaaccaggatagaaaatgctgatgctagaaatggggatctcttgagaactttgaatgacactttgggaaagttatcagctattccaaatgatacagctgctaaactgcaagctgttaaggacaaagccagacaagccaacgacacagctaaagatgtactggcacagattacagagctccaccagaacctcgatggcctgaagaagaattacaataaactagcagacagcgtcgccaaaacgaatgctgtggttaaagatccttccaagaacaaaatcattgccgatgcagatgccactgtcaaaaatttagaacaggaagctgaccggctaatagataaactcaaacccatcaaggaacttgaggataacctaaagaaaaacatctctgagataaaggaattgataaaccaagctcggaaacaagccaattctatcaaagtatctgtgtcttcaggaggtgactgcattcgaacatacaaaccagaaatcaagaaaggaagttacaataatattgttgtcaacgtaaagacagctgttgctgataacctcctcttttatcttggaagtgccaaatttattgactttctggctatagaaatgcgtaaaggcaaagtcagcttcctctgggatgttggatctggagttggacgtgtagagtacccagatttgactattgatgactcatattggtaccgtatcgtagcatcaagaactgggagaaatggaactatttctgtgagagccctggatggacccaaagccagcattgtgcccagcacacaccattcgacgtctcctccagggtacacgattctagatgtggatgcaaatgcaatgctgtttgttggtggcctgactgggaaattaaagaaggctgatgctgtacgtgtgattacattcactggctgcatgggagaaacatactttgacaacaaacctataggtttgtggaatttccgagaaaaagaaggtgactgcaaaggatgcactgtcagtcctcaggtggaagatagtgaggggactattcaatttgatggagaaggttatgcattggtcagccgtcccattcgctggtaccccaacatctccactgtcatgttcaagttcagaacattttcttcgagtgctcttctgatgtatcttgccacacgagacctgagagatttcatgagtgtggagctcactgatgggcacataaaagtcagttacgatctgggctcaggaatggcttccgttgtcagcaatcaaaaccataatgatgggaaatggaaatcattcactctgtcaagaattcaaaaacaagccaatatatcaattgtagatatagatactaatcaggaggagaatatagcaacttcgtcttctggaaacaactttggtcttgacttgaaagcagatgacaaaatatattttggtggcctgccaacgctgagaaacttgagtatgaaagcaaggccagaagtaaatctgaagaaatattccggctgcctcaaagatattgaaatttcaagaactccgtacaatatactcagtagtcccgattatgttggtgttaccaaaggatgttccctggagaatgtttacacagttagctttcctaagcctggttttgtggagctctcccctgtgccaattgatgtaggaacagaaatcaacctgtcattcagcaccaagaatgagtccggcatcattcttttgggaagtggagggacaccagcaccacctaggagaaaacgaaggcagactggacaggcctattatgtaatactcctcaacaggggccgtctggaagtgcatctctccacaggggcacgaacaatgaggaaaattgtcatcagaccagagccgaatctgtttcatgatggaagagaacattccgttcatgtagagcgaactagaggcatctttacagttcaagtggatgaaaacagaagatacatgcaaaacctgacagttgaacagcctatcgaagttaaaaagcttttcgttgggggtgctccacctgaatttcaaccttccccactcagaaatattcctccttttgaaggctgcatatggaatcttgttattaactctgtccccatggactttgcaaggcctgtgtccttcaaaaatgctgacattggtcgctgtgcccatcagaaactccgtgaagatgaagatggagcagctccagctgaaatagttatccagcctgagccagttcccaccccagcctttcctacgcccaccccagttctgacacatggtccttgtgctgcagaatcagaaccagctcttttgatagggagcaagcagttcgggctttcaagaaacagtcacattgcaattgcatttgatgacaccaaagttaaaaaccgtctcacaattgagttggaagtaagaaccgaagctgaatccggcttgcttttttacatggctcgcatcaatcatgctgattttgcaacagttcagctgagaaatggattgccctacttcagctatgacttggggagtggggacacccacaccatgatccccaccaaaatcaatgatggccagtggcacaagattaagataatgagaagtaagcaagaaggaattctttatgtagatggggcttccaacagaaccatcagtcccaaaaaagccgacatcctggatgtcgtgggaatgctgtatgttggtgggttacccatcaactacactacccgaagaattggtccagtgacctatagcattgatggctgcgtcaggaatctccacatggcagaggcccctgccgatctggaacaacccacctccagcttccatgttgggacatgttttgcaaatgctcagaggggaacatattttgacggaaccggttttgccaaagcagttggtggattcaaagtgggattggaccttcttgtagaatttgaattccgcacaactacaacgactggagttcttctggggatcagtagtcaaaaaatggatggaatgggtattgaaatgattgatgaaaagttgatgtttcatgtggacaatggtgcgggcagattcactgctgtctatgatgctggggttccagggcatttgtgtgatggacaatggcataaagtcactgccaacaagatcaaacaccgcattgagctcacagtcgatgggaaccaggtggaagcccaaagcccaaacccagcatctacatcagctgacacaaatgaccctgtgtttgttggaggcttcccagatgacctcaagcagtttggcctaacaaccagtattccgttccgaggttgcatcagatccctgaagctcaccaaaggcacaggcaagccactggaggttaattttgccaaggccctggaactgaggggcgttcaacctgtatcatgcccagccaactaataaaaataagtgtaaccccaggaagagtctgtcaaaacaagtatatcaagtaaaacaaacaaatatattttacctatatatgttaattaaactaatttgtgcatgtacatagaattctttctgtattcagatggtgctaattcagactccagactgaattttaattcaagttctttctcaagtctataaatattaaactgattatttcattctaaaaaaaaaaaag

SEQ ID NO: 301476 - DNA, 9944 bp, Homo sapiens
cagcgactcctctggctcccgagaagtggatccggtcgcggccactacgatgccgggagccgccggggtcctcctccttctgctgctctccggaggcctcgggggcgtacaggcgcagcggccgcagcagcagcggcagtcacaggcacatcagcaaagaggcatagtaccaattctgtgtcaggcattttattcactttgtttcaactgttcttgagatcccggaggattaggactattgcagttataagtctataactgaggaaaggaagcttatctggacaggaagatatttagagtatgatataaagacagtctctttttaaaaacagcattttaaagtgagatgaacccggtacctcagatggaaaagcagaaatcacctgtcttctgcgtcgctcacgctgggagctgtagaccggagctgttcctattcggccatcttggctcctcccctaaaggtttattccctgctgtcctgaatcttgcttctaatgctcttatcacgaccaatgcaacatgtggagaaaaaggacctgaaatgtactgcaaattggtagaacatgtccctgggcagcctgtgaggaacccgcagtgtcgaatctgcaatcaaaacagcagcaatccaaaccagagacacccgattacaaatgctattgatggaaagaacacttggtggcagagtcccagtattaagaatggaatcgaataccattatgtgacaattacactggatttacagcaggtgttccagatcgcgtatgtgattgtgaaggcagctaactccccccggcctggaaactggattttggaacgctctcttgatgatgttgaatacaagccctggcagtatcatgctgtgacagacacggagtgcctaacgctttacaatatttatccccgcactgggccaccgtcatatgccaaagatgatgaggtcatctgcacttcattttactccaagatacaccccttagaaaatggagagattcacatctctttaatcaatgggagaccaagtgccgatgatccttctccagaactgctagaatttacctccgctcgctatattcgcctgagatttcagaggatccgcacactgaatgctgacttgatgatgtttgctcacaaagacccaagagaaattgaccccattgtcaccagaagatattactactcggtcaaggatatttcagttggagggatgtgcatctgctatggtcatgccagggcttgtccacttgatccagcgacaaataaatctcgctgtgagtgtgagcataacacatgtggcgatagctgtgatcagtgctgtccaggattccatcagaaaccctggagagctggaacttttctaactaaaactgaatgtgaagcatgcaattgtcatggaaaagctgaagaatgctattatgatgaaaatgttgccagaagaaatctgagtttgaatatacgtggaaagtacattggagggggtgtctgcattaattgtacccaaaacactgctggtataaactgcgagacatgtacagatggcttcttcagacccaaaggggtatctccaaattatccaaggccatgccagccatgtcattgcgatccaattggttccttaaatgaagtctgtgtcaaggatgagaaacatgctcgacgaggtttggcacctggatcctgtcattgcaaaactggttttggaggtgtgagctgtgatcggtgtgccaggggctacactggctacccggactgcaaagcctgtaactgcagtgggttagggagcaaaaatgaggatccttgttttggcccctgtatctgcaaggaaaatgttgaaggaggagactgtagtcgttgcaaatccggcttcttcaatttgcaagaggataattggaaaggctgcgatgagtgtttctgttcaggggtttcaaacagatgtcagagttcctactggacctatggcaaaatacaagatatgagtggctggtatctgactgaccttcctggccgcattcgagtggctccccagcaggacgacttggactcacctcagcagatcagcatcagtaacgcggaggcccggcaagccctgccgcacagctactactggagcgcgccggctccctatctgggaaacaaactcccagcagtaggaggacagttgacatttaccatatcatatgaccttgaagaagaggaagaagatacagaacgtgttctccagcttatgattatcttagagggtaatgacttgagcatcagcacagcccaagatgaggtgtacctgcacccatctgaagaacatactaatgtattgttacttaaagaagaatcatttaccatacatggcacacattttccagtccgtagaaaggaatttatgacagtgcttgcgaatttgaagagagtcctcctacaaatcacatacagctttgggatggatgccatcttcaggttgagctctgttaaccttgaatccgctgtctcctatcctactgatggaagcattgcagcagctgtagaagtgtgtcagtgcccaccagggtatactggctcctcttgtgaatcttgttggcctaggcacaggcgagttaacggcactatttttggtggcatctgtgagccatgtcagtgctttggtcatgcggagtcctgtgatgacgtcactggagaatgcctgaactgtaaggatcacacaggtggcccatattgtgataaatgtcttcctggtttctatggcgagcctactaaaggaacctctgaagactgtcaaccctgtgcctgtccactcaatatcccatccaataactttagcccaacgtgccatttagaccggagtcttggattgatctgtgatggatgccctgtcgggtacacaggaccacgctgtgagaggtgtgcagaaggctattttggacaaccctctgtacctggaggatcatgtcagccatgccaatgcaatgacaaccttgacttctccatccctggcagctgtgacagcttgtctggctcctgtctgatatgtaaaccaggtacaacaggccggtactgtgagctctgtgctgatggatattttggagatgcagttgatgcgaagaactgtcagccctgtcgctgtaatgccggtggctctttctctgaggtttgccacagtcaaactggacagtgtgagtgcagagccaacgttcagggtcagagatgtgacaaatgcaaggctgggacctttggcctacaatcagcaaggggctgtgttccctgcaactgcaattcttttgggtctaagtcattcgactgtgaagagagtggacaatgttggtgccaacctggagtcacagggaagaaatgtgaccgctgtgcccacggctatttcaacttccaagaaggaggctgcacagcttgtgaatgttctcatctgggtaataattgtgacccaaagactgggcgatgcatttgcccacccaataccattggagagaaatgttctaaatgtgcacccaatacctggggccacagcattaccactggttgtaaggcttgtaactgcagcacagtgggatccttggatttccaatgcaatgtaaatacaggccaatgcaactgtcatccaaaattctctggtgcaaaatgtacagagtgcagtcgaggtcactggaactaccctcgctgcaatctctgtgactgcttcctccctgggacagatgccacaacctgtgattcagagactaaaaaatgctcctgtagtgatcaaactgggcagtgcacttgtaaggtgaatgtggaaggcatccactgtgacagatgccggcctggcaaattcggactcgatgccaagaatccacttggctgcagcagctgctattgcttcggcactactacccagtgctctgaagcaaaaggactgatccggacgtgggtgactctgaaggctgagcagaccattctacccctggtagatgaggctctgcagcacacgaccaccaagggcattgtttttcaacatccagagattgttgcccacatggacctgatgagagaagatctccatttggaacctttttattggaaacttccagaacaatttgaaggaaagaagttgatggcctatgggggcaaactcaagtatgcaatctatttcgaggctcgggaagaaacaggtttctctacatataatcctcaagtgatcattcgaggtgggacacctactcatgctagaattatcgtcaggcatatggctgctcctctgattggccaattgacaaggcatgaaattgaaatgacagagaaagaatggaaatattatggggatgatcctcgagtccatagaactgtgacccgagaagacttcttggatatactatatgatattcattacattcttatcaaagctacttatggaaatttcatgcgacaaagcaggatttctgaaatctcaatggaggtagctgaacaaggacgtggaacaacaatgactcctccagctgacttgattgaaaaatgtgattgtcccctgggctattctggcctgtcctgtgaggcatgcttgccgggattttatcgactgcgttctcaaccaggtggccgcacccctggaccaaccctgggcacctgtgttccatgtcaatgtaatggacacagcagcctgtgtgaccctgaaacatcgatatgccagaattgtcaacatcacactgctggtgacttctgtgaacgatgtgctcttggatactatggaattgtcaagggattgccaaatgactgtcagcaatgtgcctgccctctgatttcttccagtaacaatttcagcccctcttgtgtcgcagaaggacttgacgactaccgctgcacggcttgtccacggggatatgaaggccagtactgtgaaaggtgtgcccctggctatactggcagtccaggcaaccctggaggctcctgccaagaatgtgagtgtgatccctatggctcactgcctgtgccctgtgaccctgtcacaggattctgcacgtgccgacctggagccacgggaaggaagtgtgacggctgcaagcactggcatgcacgcgagggctgggagtgtgttttttgtggagatgagtgcactggccttcttctcggtgacttggctcgcctggagcagatggtcatgagcatcaacctcactggtccgctgcctgcgccatataaaatgctgtatggtcttgaaaatatgactcaggagctaaagcacttgctgtcacctcagcgggccccagagaggcttattcagctggcagagggcaatctgaatacactcgtgaccgaaatgaacgagctgctgaccagggctaccaaagtgacagcagatggcgagcagaccggacaggatgctgagaggaccaacacaagagcaaagtccctgggagaattcattaaggagcttgcccgggatgcagaagctgtaaatgaaaaagctataaaactaaatgaaactctaggaactcgagacgaggcctttgagagaaatttggaagggcttcagaaagagattgaccagatgattaaagaactgaggaggaaaaatctagagacacaaaaggaaattgctgaagatgagttggtagctgcagaagcccttctgaaaaaagtgaagaagctgtttggagagtcccggggggaaaatgaagaaatggagaaggatctccgggaaaaactggctgactacaaaaacaaagttgatgatgcttgggaccttttgagagaagccacagataaaatcagagaagctaatcgcctatttgcagtaaatcagaaaaacatgactgcattggagaaaaagaaggaggctgttgagagcggcaaacgacaaattgagaacactttaaaagaaggcaatgacatactcgatgaagccaaccgtcttgcagatgaaatcaactccatcatagactatgttgaagacatccaaactaaattgccacctatgtctgaggagcttaatgataaaatagatgacctctcccaagaaataaaggacaggaagcttgctgagaaggtgtcccaggctgagagccacgcagctcagttgaatgactcatctgctgtccttgatggaatccttgatgaggctaaaaacatctccttcaatgccactgcagccttcaaagcttacagcaatattaaggactatattgatgaagctgagaaagttgccaaagaagccaaagatcttgcacatgaagctacaaaactggcaacaggtcctcggggtttattaaaggaagatgccaaaggctgtcttcagaaaagcttcaggattcttaacgaagccaagaagttagcaaatgatgtaaaagaaaatgaagaccatctaaatggcttaaaaaccaggatagaaaatgctgatgctagaaatggggatctcttgagaactttgaatgacactttgggaaagttatcagctattccaaatgatacagctgctaaactgcaagctgttaaggacaaagccagacaagccaacgacacagctaaagatgtactggcacagattacagagctccaccagaacctcgatggcctgaagaagaattacaataaactagcagacagcgtcgccaaaacgaatgctgtggttaaagatccttccaagaacaaaatcattgccgatgcagatgccactgtcaaaaatttagaacaggaagctgaccggctaatagataaactcaaacccatcaaggaacttgaggataacctaaagaaaaacatctctgagataaaggaattgataaaccaagctcggaaacaagccaattctatcaaagtatctgtgtcttcaggaggtgactgcattcgaacatacaaaccagaaatcaagaaaggaagttacaataatattgttgtcaacgtaaagacagctgttgctgataacctcctcttttatcttggaagtgccaaatttattgactttctggctatagaaatgcgtaaaggcaaagtcagcttcctctgggatgttggatctggagttggacgtgtagagtacccagatttgactattgatgactcatattggtaccgtatcgtagcatcaagaactgggagaaatggaactatttctgtgagagccctggatggacccaaagccagcattgtgcccagcacacaccattcgacgtctcctccagggtacacgattctagatgtggatgcaaatgcaatgctgtttgttggtggcctgactgggaaattaaagaaggctgatgctgtacgtgtgattacattcactggctgcatgggagaaacatactttgacaacaaacctataggtttgtggaatttccgagaaaaagaaggtgactgcaaaggatgcactgtcagtcctcaggtggaagatagtgaggggactattcaatttgatggagaaggttatgcattggtcagccgtcccattcgctggtaccccaacatctccactgtcatgttcaagttcagaacattttcttcgagtgctcttctgatgtatcttgccacacgagacctgagagatttcatgagtgtggagctcactgatgggcacataaaagtcagttacgatctgggctcaggaatggcttccgttgtcagcaatcaaaaccataatgatgggaaatggaaatcattcactctgtcaagaattcaaaaacaagccaatatatcaattgtagatatagatactaatcaggaggagaatatagcaacttcgtcttctggaaacaactttggtcttgacttgaaagcagatgacaaaatatattttggtggcctgccaacgctgagaaacttgagtatgaaagcaaggccagaagtaaatctgaagaaatattccggctgcctcaaagatattgaaatttcaagaactccgtacaatatactcagtagtcccgattatgttggtgttaccaaaggatgttccctggagaatgtttacacagttagctttcctaagcctggttttgtggagctctcccctgtgccaattgatgtaggaacagaaatcaacctgtcattcagcaccaagaatgagtccggcatcattcttttgggaagtggagggacaccagcaccacctaggagaaaacgaaggcagactggacaggcctattatgtaatactcctcaacaggggccgtctggaagtgcatctctccacaggggcacgaacaatgaggaaaattgtcatcagaccagagccgaatctgtttcatgatggaagagaacattccgttcatgtagagcgaactagaggcatctttacagttcaagtggatgaaaacagaagatacatgcaaaacctgacagttgaacagcctatcgaagttaaaaagcttttcgttgggggtgctccacctgaatttcaaccttccccactcagaaatattcctccttttgaaggctgcatatggaatcttgttattaactctgtccccatggactttgcaaggcctgtgtccttcaaaaatgctgacattggtcgctgtgcccatcagaaactccgtgaagatgaagatggagcagctccagctgaaatagttatccagcctgagccagttcccaccccagcctttcctacgcccaccccagttctgacacatggtccttgtgctgcagaatcagaaccagctcttttgatagggagcaagcagttcgggctttcaagaaacagtcacattgcaattgcatttgatgacaccaaagttaaaaaccgtctcacaattgagttggaagtaagaaccgaagctgaatccggcttgcttttttacatggctcgcatcaatcatgctgattttgcaacagttcagctgagaaatggattgccctacttcagctatgacttggggagtggggacacccacaccatgatccccaccaaaatcaatgatggccagtggcacaagattaagataatgagaagtaagcaagaaggaattctttatgtagatggggcttccaacagaaccatcagtcccaaaaaagccgacatcctggatgtcgtgggaatgctgtatgttggtgggttacccatcaactacactacccgaagaattggtccagtgacctatagcattgatggctgcgtcaggaatctccacatggcagaggcccctgccgatctggaacaacccacctccagcttccatgttgggacatgttttgcaaatgctcagaggggaacatattttgacggaaccggttttgccaaagcagttggtggattcaaagtgggattggaccttcttgtagaatttgaattccgcacaactacaacgactggagttcttctggggatcagtagtcaaaaaatggatggaatgggtattgaaatgattgatgaaaagttgatgtttcatgtggacaatggtgcgggcagattcactgctgtctatgatgctggggttccagggcatttgtgtgatggacaatggcataaagtcactgccaacaagatcaaacaccgcattgagctcacagtcgatgggaaccaggtggaagcccaaagcccaaacccagcatctacatcagctgacacaaatgaccctgtgtttgttggaggcttcccagatgacctcaagcagtttggcctaacaaccagtattccgttccgaggttgcatcagatccctgaagctcaccaaaggcacaggcaagccactggaggttaattttgccaaggccctggaactgaggggcgttcaacctgtatcatgcccagccaactaataaaaataagtgtaaccccaggaagagtctgtcaaaacaagtatatcaagtaaaacaaacaaatatattttacctatatatgttaattaaactaatttgtgcatgtacatagaattctttctgtattcagatggtgctaattcagactccagactgaattttaattcaagttctttctcaagtctataaatattaaactgattatttcattctaaaaaaaaaaaag

SEQ ID NO: 301477 - DNA, 2227 bp, Homo sapiens
tccagtcggtccggtgttatcgatgccaccaaaatatattttggtggcctgccaacgctgagaaacttgagtatgaaagcaaggccagaagtaaatctgaagaaatattccggctgcctcaaagatattgaaatttcaagaactccgtacaatatactcagtagtcccgattatgttggtgttaccaaaggatgttccctggagaatgtttacacagttagctttcctaagcctggttttgtggagctctcccctgtgccaattgatgtaggaacagaaatcaacctgtcattcagcaccaagaatgagtccggcatcattcttttgggaagtggagggacaccagcaccacctaggagaaaacgaaggcagactggacaggcctattatgtaatactcctcaacaggggccgtctggaagtgcatctctccacaggggcacgaacaatgaggaaaattgtcatcagaccagagccgaatctgtttcatgatggaagagaacattccgttcatgtagagcgaactagaggcatctttacagttcaagtggatgaaaacagaagatacatgcaaaacctgacagttgaacagcctatcgaagttaaaaagcttttcgttgggggtgctccacctgaatttcaaccttccccactcagaaatattcctccttttgaaggctgcatatggaatcttgttattaactctgtccccatggactttgcaaggcctgtgtccttcaaaaatgctgacattggtcgctgtgcccatcagaaactccgtgaagatgaagatggagcagctccagctgaaatagttatccagcctgagccagttcccaccccagcctttcctacgcccaccccagttctgacacatggtccttgtgctgcagaatcagaaccagctcttttgatagggagcaagcagttcgggctttcaagaaacagtcacattgcaattgcatttgatgacaccaaagttaaaaaccgtctcacaattgagttggaagtaagaaccgaagctgaatccggcttgcttttttacatggctcgcatcaatcatgctgattttgcaacagttcagctgagaaatggattgccctacttcagctatgacttggggagtggggacacccacaccatgatccccaccaaaatcaatgatggccagtggcacaagattaagataatgagaagtaagcaagaaggaattctttatgtagatggggcttccaacagaaccatcagtcccaaaaaagccgacatcctggatgtcgtgggaatgctgtatgttggtgggttacccatcaactacactacccgaagaattggtccagtgacctatagcattgatggctgcgtcaggaatctccacatggcagaggcccctgccgatctggaacaacccacctccagcttccatgttgggacatgttttgcaaatgctcagaggggaacatattttgacggaaccggttttgccaaagcagttggtggattcaaagtgggattggaccttcttgtagaatttgaattccgcacaactacaacgactggagttcttctggggatcagtagtcaaaaaatggatggaatgggtattgaaatgattgatgaaaagttgatgtttcatgtggacaatggtgcgggcagattcactgctgtctatgatgctggggttccagggcatttgtgtgatggacaatggcataaagtcactgccaacaagatcaaacaccgcattgagctcacagtcgatgggaaccaggtggaagcccaaagcccaaacccagcatctacatcagctgacacaaatgaccctgtgtttgttggaggcttcccagatgacctcaagcagtttggcctaacaaccagtattccgttccgaggttgcatcagatccctgaagctcaccaaaggcacaggcaagccactggaggttaattttgccaaggccctggaactgaggggcgttcaacctgtatcatgcccagccaactaataaaaataagtgtaaccccaggaagagtctgtcaaaacaagtatatcaagtaaaacaaacaaatatattttacctatatatgttaattaaactaatttgtgcatgtacatagaattctttctgtattcagatggtgctaattcagactccagactgaattttaattcaagttctttctcaagtctataaatattaaactgattatttcattctaaaaaaaaaaaag

SEQ ID NO: 301478 - DNA, 2266 bp, Homo sapiens
tgtcattctcatacatttttaattatcctatcataatacaattattcattttgtctgctgcttctaatcaaaattatcttaaaccactccaatagaattagggaaatgaagggaaaatgtgggtaaagaaaaaagtaaatccaccacttgaatgatgaggtttaaagactggaacagaactttcaggatcttcattgttcatagctacaggctccaatttggaattggccatagacacccactaatgtttacacagttagctttcctaagcctggttttgtggagctctcccctgtgccaattgatgtaggaacagaaatcaacctgtcattcagcaccaagaatgagtccggcatcattcttttgggaagtggagggacaccagcaccacctaggagaaaacgaaggcagactggacaggcctattatgtaatactcctcaacaggggccgtctggaagtgcatctctccacaggggcacgaacaatgaggaaaattgtcatcagaccagagccgaatctgtttcatgatggaagagaacattccgttcatgtagagcgaactagaggcatctttacagttcaagtggatgaaaacagaagatacatgcaaaacctgacagttgaacagcctatcgaagttaaaaagcttttcgttgggggtgctccacctgaatttcaaccttccccactcagaaatattcctccttttgaaggctgcatatggaatcttgttattaactctgtccccatggactttgcaaggcctgtgtccttcaaaaatgctgacattggtcgctgtgcccatcagaaactccgtgaagatgaagatggagcagctccagctgaaatagttatccagcctgagccagttcccaccccagcctttcctacgcccaccccagttctgacacatggtccttgtgctgcagaatcagaaccagctcttttgatagggagcaagcagttcgggctttcaagaaacagtcacattgcaattgcatttgatgacaccaaagttaaaaaccgtctcacaattgagttggaagtaagaaccgaagctgaatccggcttgcttttttacatggctcgcatcaatcatgctgattttgcaacagttcagctgagaaatggattgccctacttcagctatgacttggggagtggggacacccacaccatgatccccaccaaaatcaatgatggccagtggcacaagattaagataatgagaagtaagcaagaaggaattctttatgtagatggggcttccaacagaaccatcagtcccaaaaaagccgacatcctggatgtcgtgggaatgctgtatgttggtgggttacccatcaactacactacccgaagaattggtccagtgacctatagcattgatggctgcgtcaggaatctccacatggcagaggcccctgccgatctggaacaacccacctccagcttccatgttgggacatgttttgcaaatgctcagaggggaacatattttgacggaaccggttttgccaaagcagttggtggattcaaagtgggattggaccttcttgtagaatttgaattccgcacaactacaacgactggagttcttctggggatcagtagtcaaaaaatggatggaatgggtattgaaatgattgatgaaaagttgatgtttcatgtggacaatggtgcgggcagattcactgctgtctatgatgctggggttccagggcatttgtgtgatggacaatggcataaagtcactgccaacaagatcaaacaccgcattgagctcacagtcgatgggaaccaggtggaagcccaaagcccaaacccagcatctacatcagctgacacaaatgaccctgtgtttgttggaggcttcccagatgacctcaagcagtttggcctaacaaccagtattccgttccgaggttgcatcagatccctgaagctcaccaaaggcacaggcaagccactggaggttaattttgccaaggccctggaactgaggggcgttcaacctgtatcatgcccagccaactaataaaaataagtgtaaccccaggaagagtctgtcaaaacaagtatatcaagtaaaacaaacaaatatattttacctatatatgttaattaaactaatttgtgcatgtacatagaattctttctgtattcagatggtgctaattcagactccagactgaattttaattcaagttctttctcaagtctataaatattaaactgattatttcattctaaaaaaaaaaaag

SEQ ID NO: 301479 - DNA, 1757 bp, Homo sapiens
aacctcctgggttttgccaacacatttttccatagtttggtaaagaaagaaacctcaaaacatctttacagttcaagtggatgaaaacagaagatacatgcaaaacctgacagttgaacagcctatcgaagttaaaaagcttttcgttgggggtgctccacctgaatttcaaccttccccactcagaaatattcctccttttgaaggctgcatatggaatcttgttattaactctgtccccatggactttgcaaggcctgtgtccttcaaaaatgctgacattggtcgctgtgcccatcagaaactccgtgaagatgaagatggagcagctccagctgaaatagttatccagcctgagccagttcccaccccagcctttcctacgcccaccccagttctgacacatggtccttgtgctgcagaatcagaaccagctcttttgatagggagcaagcagttcgggctttcaagaaacagtcacattgcaattgcatttgatgacaccaaagttaaaaaccgtctcacaattgagttggaagtaagaaccgaagctgaatccggcttgcttttttacatggctcgcatcaatcatgctgattttgcaacagttcagctgagaaatggattgccctacttcagctatgacttggggagtggggacacccacaccatgatccccaccaaaatcaatgatggccagtggcacaagattaagataatgagaagtaagcaagaaggaattctttatgtagatggggcttccaacagaaccatcagtcccaaaaaagccgacatcctggatgtcgtgggaatgctgtatgttggtgggttacccatcaactacactacccgaagaattggtccagtgacctatagcattgatggctgcgtcaggaatctccacatggcagaggcccctgccgatctggaacaacccacctccagcttccatgttgggacatgttttgcaaatgctcagaggggaacatattttgacggaaccggttttgccaaagcagttggtggattcaaagtgggattggaccttcttgtagaatttgaattccgcacaactacaacgactggagttcttctggggatcagtagtcaaaaaatggatggaatgggtattgaaatgattgatgaaaagttgatgtttcatgtggacaatggtgcgggcagattcactgctgtctatgatgctggggttccagggcatttgtgtgatggacaatggcataaagtcactgccaacaagatcaaacaccgcattgagctcacagtcgatgggaaccaggtggaagcccaaagcccaaacccagcatctacatcagctgacacaaatgaccctgtgtttgttggaggcttcccagatgacctcaagcagtttggcctaacaaccagtattccgttccgaggttgcatcagatccctgaagctcaccaaaggcacaggcaagccactggaggttaattttgccaaggccctggaactgaggggcgttcaacctgtatcatgcccagccaactaataaaaataagtgtaaccccaggaagagtctgtcaaaacaagtatatcaagtaaaacaaacaaatatattttacctatatatgttaattaaactaatttgtgcatgtacatagaattctttctgtattcagatggtgctaattcagactccagactgaattttaattcaagttctttctcaagtctataaatattaaactgattatttcattctaaaaaaaaaaaag

SEQ ID NO: 301480 - DNA, 9945 bp, Homo sapiens
cagcgactcctctggctcccgagaagtggatccggtcgcggccactacgatgccgggagccgccggggtcctcctccttctgctgctctccggaggcctcgggggcgtacaggcgcagcggccgcagcagcagcggcagtcacaggcacatcagcaaagaggcatagtaccaattctgtgtcaggcattttattcactttgtttcaactgttcttgagatcccggaggattaggactattgcagttataagtctataactgaggaaaggaagcttatctggacaggaagatatttagagtatgatataaagacagtctctttttaaaaacagcattttaaagtgagatgaacccggtacctcagatggaaaagcagaaatcacctgtcttctgcgtcgctcacgctgggagctgtagaccggagctgttcctattcggccatcttggctcctcccctaaaggtttattccctgctgtcctgaatcttgcttctaatgctcttatcacgaccaatgcaacatgtggagaaaaaggacctgaaatgtactgcaaattggtagaacatgtccctgggcagcctgtgaggaacccgcagtgtcgaatctgcaatcaaaacagcagcaatccaaaccagagacacccgattacaaatgctattgatggaaagaacacttggtggcagagtcccagtattaagaatggaatcgaataccattatgtgacaattacactggatttacagcaggtgttccagatcgcgtatgtgattgtgaaggcagctaactccccccggcctggaaactggattttggaacgctctcttgatgatgttgaatacaagccctggcagtatcatgctgtgacagacacggagtgcctaacgctttacaatatttatccccgcactgggccaccgtcatatgccaaagatgatgaggtcatctgcacttcattttactccaagatacaccccttagaaaatggagagattcacatctctttaatcaatgggagaccaagtgccgatgatccttctccagaactgctagaatttacctccgctcgctatattcgcctgagatttcagaggatccgcacactgaatgctgacttgatgatgtttgctcacaaagacccaagagaaattgaccccattgtcaccagaagatattactactcggtcaaggatatttcagttggagggatgtgcatctgctatggtcatgccagggcttgtccacttgatccagcgacaaataaatctcgctgtgagtgtgagcataacacatgtggcgatagctgtgatcagtgctgtccaggattccatcagaaaccctggagagctggaacttttctaactaaaactgaatgtgaagcatgcaattgtcatggaaaagctgaagaatgctattatgatgaaaatgttgccagaagaaatctgagtttgaatatacgtggaaagtacattggagggggtgtctgcattaattgtacccaaaacactgctggtataaactgcgagacatgtacagatggcttcttcagacccaaaggggtatctccaaattatccaaggccatgccagccatgtcattgcgatccaattggttccttaaatgaagtctgtgtcaaggatgagaaacatgctcgacgaggtttggcacctggatcctgtcattgcaaaactggttttggaggtgtgagctgtgatcggtgtgccaggggctacactggctacccggactgcaaagcctgtaactgcagtgggttagggagcaaaaatgaggatccttgttttggcccctgtatctgcaaggaaaatgttgaaggaggagactgtagtcgttgcaaatccggcttcttcaatttgcaagaggataattggaaaggctgcgatgagtgtttctgttcaggggtttcaaacagatgtcagagttcctactggacctatggcaaaatacaagatatgagtggctggtatctgactgaccttcctggccgcattcgagtggctccccagcaggacgacttggactcacctcagcagatcagcatcagtaacgcggaggcccggcaagccctgccgcacagctactactggagcgcgccggctccctatctgggaaacaaactcccagcagtaggaggacagttgacatttaccatatcatatgaccttgaagaagaggaagaagatacagaacgtgttctccagcttatgattatcttagagggtaatgacttgagcatcagcacagcccaagatgaggtgtacctgcacccatctgaagaacatactaatgtattgttacttaaagaagaatcatttaccatacatggcacacattttccagtccgtagaaaggaatttatgacagtgcttgcgaatttgaagagagtcctcctacaaatcacatacagctttgggatggatgccatcttcaggttgagctctgttaaccttgaatccgctgtctcctatcctactgatggaagcattgcagcagctgtagaagtgtgtcagtgcccaccagggtatactggctcctcttgtgaatcttgttggcctaggcacaggcgagttaacggcactatttttggtggcatctgtgagccatgtcagtgctttggtcatgcggagtcctgtgatgacgtcactggagaatgcctgaactgtaaggatcacacaggtggcccatattgtgataaatgtcttcctggtttctatggcgagcctactaaaggaacctctgaagactgtcaaccctgtgcctgtccactcaatatcccatccaataactttagcccaacgtgccatttagaccggagtcttggattgatctgtgatggatgccctgtcgggtacacaggaccacgctgtgagaggtgtgcagaaggctattttggacaaccctctgtacctggaggatcatgtcagccatgccaatgcaatgacaaccttgacttctccatccctggcagctgtgacagcttgtctggctcctgtctgatatgtaaaccaggtacaacaggccggtactgtgagctctgtgctgatggatattttggagatgcagttgatgcgaagaactgtcagccctgtcgctgtaatgccggtggctctttctctgaggtttgccacagtcaaactggacagtgtgagtgcagagccaacgttcagggtcagagatgtgacaaatgcaaggctgggacctttggcctacaatcagcaaggggctgtgttccctgcaactgcaattcttttgggtctaagtcattcgactgtgaagagagtggacaatgttggtgccaacctggagtcacagggaagaaatgtgaccgctgtgcccacggctatttcaacttccaagaaggaggctgcacagcttgtgaatgttctcatctgggtaataattgtgacccaaagactgggcgatgcatttgcccacccaataccattggagagaaatgttctaaatgtgcacccaatacctggggccacagcattaccactggttgtaaggcttgtaactgcagcacagtgggatccttggatttccaatgcaatgtaaatacaggccaatgcaactgtcatccaaaattctctggtgcaaaatgtacagagtgcagtcgaggtcactggaactaccctcgctgcaatctctgtgactgcttcctccctgggacagatgccacaacctgtgattcagagactaaaaaatgctcctgtagtgatcaaactgggcagtgcacttgtaaggtgaatgtggaaggcatccactgtgacagatgccggcctggcaaattcggactcgatgccaagaatccacttggctgcagcagctgctattgcttcggcactactacccagtgctctgaagcaaaaggactgatccggacgtgggtgactctgaaggctgagcagaccattctacccctggtagatgaggctctgcagcacacgaccaccaagggcattgtttttcaacatccagagattgttgcccacatggacctgatgagagaagatctccatttggaacctttttattggaaacttccagaacaatttgaaggaaagaagttgatggcctatgggggcaaactcaagtatgcaatctatttcgaggctcgggaagaaacaggtttctctacatataatcctcaagtgatcattcgaggtgggacacctactcatgctagaattatcgtcaggcatatggctgctcctctgattggccaattgacaaggcatgaaattgaaatgacagagaaagaatggaaatattatggggatgatcctcgagtccatagaactgtgacccgagaagacttcttggatatactatatgatattcattacattcttatcaaagctacttatggaaatttcatgcgacaaagcaggatttctgaaatctcaatggaggtagctgaacaaggacgtggaacaacaatgactcctccagctgacttgattgaaaaatgtgattgtcccctgggctattctggcctgtcctgtgaggcatgcttgccgggattttatcgactgcgttctcaaccaggtggccgcacccctggaccaaccctgggcacctgtgttccatgtcaatgtaatggacacagcagcctgtgtgaccctgaaacatcgatatgccagaattgtcaacatcacactgctggtgacttctgtgaacgatgtgctcttggatactatggaattgtcaagggattgccaaatgactgtcagcaatgtgcctgccctctgatttcttccagtaacaatttcagcccctcttgtgtcgcagaaggacttgacgactaccgctgcacggcttgtccacggggatatgaaggccagtactgtgaaaggtgtgcccctggctatactggcagtccaggcaaccctggaggctcctgccaagaatgtgagtgtgatccctatggctcactgcctgtgccctgtgaccctgtcacaggattctgcacgtgccgacctggagccacgggaaggaagtgtgacggctgcaagcactggcatgcacgcgagggctgggagtgtgttttttgtggagatgagtgcactggccttcttctcggtgacttggctcgcctggagcagatggtcatgagcatcaacctcactggtccgctgcctgcgccatataaaatgctgtatggtcttgaaaatatgactcaggagctaaagcacttgctgtcacctcagcgggccccagagaggcttattcagctggcagagggcaatctgaatacactcgtgaccgaaatgaacgagctgctgaccagggctaccaaagtgacagcagatggcgagcagaccggacaggatgctgagaggaccaacacaagagcaaagtccctgggagaattcattaaggagcttgcccgggatgcagaagctgtaaatgaaaaagctataaaactaaatgaaactctaggaactcgagacgaggcctttgagagaaatttggaagggcttcagaaagagattgaccagatgattaaagaactgaggaggaaaaatctagagacacaaaaggaaattgctgaagatgagttggtagctgcagaagcccttctgaaaaaagtgaagaagctgtttggagagtcccggggggaaaatgaagaaatggagaaggatctccgggaaaaactggctgactacaaaaacaaagttgatgatgcttgggaccttttgagagaagccacagataaaatcagagaagctaatcgcctatttgcagtaaatcagaaaaacatgactgcattggagaaaaagaaggaggctgttgagagcggcaaacgacaaattgagaacactttaaaagaaggcaatgacatactcgatgaagccaaccgtcttgcagatgaaatcaactccatcatagactatgttgaagacatccaaactaaattgccacctatgtctgaggagcttaatgataaaatagatgacctctcccaagaaataaaggacaggaagcttgctgagaaggtgtcccaggctgagagccacgcagctcagttgaatgactcatctgctgtccttgatggaatccttgatgaggctaaaaacatctccttcaatgccactgcagccttcaaagcttacagcaatattaaggactatattgatgaagctgagaaagttgccaaagaagccaaagatcttgcacatgaagctacaaaactggcaacaggtcctcggggtttattaaaggaagatgccaaaggctgtcttcagaaaagcttcaggattcttaacgaagccaagaagttagcaaatgatgtaaaagaaaatgaagaccatctaaatggcttaaaaaccaggatagaaaatgctgatgctagaaatggggatctcttgagaactttgaatgacactttgggaaagttatcagctattccaaatgatacagctgctaaactgcaagctgttaaggacaaagccagacaagccaacgacacagctaaagatgtactggcacagattacagagctccaccagaacctcgatggcctgaagaagaattacaataaactagcagacagcgtcgccaaaacgaatgctgtggttaaagatccttccaagaacaaaatcattgccgatgcagatgccactgtcaaaaatttagaacaggaagctgaccggctaatagataaactcaaacccatcaaggaacttgaggataacctaaagaaaaacatctctgagataaaggaattgataaaccaagctcggaaacaagccaattctatcaaagtatctgtgtcttcaggaggtgactgcattcgaacatacaaaccagaaatcaagaaaggaagttacaataatattgttgtcaacgtaaagacagctgttgctgataacctcctcttttatcttggaagtgccaaatttattgactttctggctatagaaatgcgtaaaggcaaagtcagcttcctctgggatgttggatctggagttggacgtgtagagtacccagatttgactattgatgactcatattggtaccgtatcgtagcatcaagaactgggagaaatggaactatttctgtgagagccctggatggacccaaagccagcattgtgcccagcacacaccattcgacgtctcctccagggtacacgattctagatgtggatgcaaatgcaatgctgtttgttggtggcctgactgggaaattaaagaaggctgatgctgtacgtgtgattacattcactggctgcatgggagaaacatactttgacaacaaacctataggtttgtggaatttccgagaaaaagaaggtgactgcaaaggatgcactgtcagtcctcaggtggaagatagtgaggggactattcaatttgatggagaaggttatgcattggtcagccgtcccattcgctggtaccccaacatctccactgtcatgttcaagttcagaacattttcttcgagtgctcttctgatgtatcttgccacacgagacctgagagatttcatgagtgtggagctcactgatgggcacataaaagtcagttacgatctgggctcaggaatggcttccgttgtcagcaatcaaaaccataatgatgggaaatggaaatcattcactctgtcaagaattcaaaaacaagccaatatatcaattgtagatatagatactaatcaggaggagaatatagcaacttcgtcttctggaaacaactttggtcttgacttgaaagcagatgacaaaatatattttggtggcctgccaacgctgagaaacttgagtatgaaagcaaggccagaagtaaatctgaagaaatattccggctgcctcaaagatattgaaatttcaagaactccgtacaatatactcagtagtcccgattatgttggtgttaccaaaggatgttccctggagaatgtttacacagttagctttcctaagcctggttttgtggagctctcccctgtgccaattgatgtaggaacagaaatcaacctgtcattcagcaccaagaatgagtccggcatcattcttttgggaagtggagggacaccagcaccacctaggagaaaacgaaggcagactggacaggcctattatgtaatactcctcaacaggggccgtctggaagtgcatctctccacaggggcacgaacaatgaggaaaattgtcatcagaccagagccgaatctgtttcatgatggaagagaacattccgttcatgtagagcgaactagaggcatctttacagttcaagtggatgaaaacagaagatacatgcaaaacctgacagttgaacagcctatcgaagttaaaaagcttttcgttgggggtgctccacctgaatttcaaccttccccactcagaaatattcctccttttgaaggctgcatatggaatcttgttattaactctgtccccatggactttgcaaggcctgtgtccttcaaaaatgctgacattggtcgctgtgcccatcagaaactccgtgaagatgaagatggagcagctccagctgaaatagttatccagcctgagccagttcccaccccagcctttcctacgcccaccccagttctgacacatggtccttgtgctgcagaatcagaaccagctcttttgatagggagcaagcagttcgggctttcaagaaacagtcacattgcaattgcatttgatgacaccaaagttaaaaaccgtctcacaattgagttggaagtaagaaccgaagctgaatccggcttgcttttttacatggctcgcatcaatcatgctgattttgcaacagttcagctgagaaatggattgccctacttcagctatgacttggggagtggggacacccacaccatgatccccaccaaaatcaatgatggccagtggcacaagattaagataatgagaagtaagcaagaaggaattctttatgtagatggggcttccaacagaaccatcagtcccaaaaaagccgacatcctggatgtcgtgggaatgctgtatgttggtgggttacccatcaactacactacccgaagaattggtccagtgacctatagcattgatggctgcgtcaggaatctccacatggcagaggcccctgccgatctggaacaacccacctccagcttccatgttgggacatgttttgcaaatgctcagaggggaacatattttgacggaaccggttttgccaaagcagttggtggattcaaagtgggattggaccttcttgtagaatttgaattccgcacaactacaacgactggagttcttctggggatcagtagtcaaaaaatggatggaatgggtattgaaatgattgatgaaaagttgatgtttcatgtggacaatggtgcgggcagattcactgctgtctatgatgctggggttccagggcatttgtgtgatggacaatggcataaagtcactgccaacaagatcaaacaccgcattgagctcacagtcgatgggaaccaggtggaagcccaaagcccaaacccagcatctacatcagctgacacaaatgaccctgtgtttgttggaggcttcccagatgacctcaagcagtttggcctaacaaccagtattccgttccgaggttgcatcagatccctgaagctcaccaaaggcacaggcaagccactggaggttaattttgccaaggccctggaactgaggggcgttcaacctgtatcatgcccagccaactaataaaaataagtgtaaccccaggaagagtctgtcaaaacaagtatatcgtgtttttctaacacttagcttctacccatatatgtggattaaatggttctgggcatgcagggaggcttcgttaggaactcagctggagataattggttctcgaccggtaagtttaaccccagttcgttctcccgtgcataaagtttgttttgctattttcattttgtattgtttaaaaa

SEQ ID NO: 301481 - DNA, 1491 bp, Homo sapiens
actccacccaatatagtaaacatttcattaataattacatcaatagagtttacaaacttttcacctatttacttgcatttttaatctttcttcttaagacttcatttcttttcttttaccttgtcgaatgtcttgccaaactgactaatgtttttagtgtttcaatatgtttcgtttcttcaccagcttcaaaagaattctgtcatctcaaatttcaggggcttttccacattactaaaaacagatttttctcatttagaccagaacttctagtctaagttcttcattgttaggaatttaactggccttctggctcaggtctttggcacctgtgacatgaaacgggctccaaaatgtaatttatgtaactctcaatcttgtatataaaatgaaatccatgaaggaaaaaaatataattaaaacatcaaaagtttaaaatttaaaaaatcctttactttgaatttgtaaaccaaattaatgagtcactttaaacaatatcttttaagaaaattttataaggttcagtcagaactctcacattctaaaaagacgtgaggtagaatttttccctgtgtacactaggtccttttcttgtcacctggcctcaaatttttctgaaagcagaattattaccagctttacgtatcttgcctattaactcccaacaatgccccaaagcaaagagcataatttgtggctcctggtgattagatttatactttaatttgtcaagttttaaaatttttttcaatatgcccagttacatccatttcaaatgattctggctgatgtctttcctagagacctgatcatttgtatgtgtgaaccatcatgatacttctttaatgaaaccatctgtgactgttctatttcctactttccagttgatgtttcatgtggacaatggtgcgggcagattcactgctgtctatgatgctggggttccagggcatttgtgtgatggacaatggcataaagtcactgccaacaagatcaaacaccgcattgagctcacagtcgatgggaaccaggtggaagcccaaagcccaaacccagcatctacatcagctgacacaaatgaccctgtgtttgttggaggcttcccagatgacctcaagcagtttggcctaacaaccagtattccgttccgaggttgcatcagatccctgaagctcaccaaaggcacaggcaagccactggaggttaattttgccaaggccctggaactgaggggcgttcaacctgtatcatgcccagccaactaataaaaataagtgtaaccccaggaagagtctgtcaaaacaagtatatcaagtaaaacaaacaaatatattttacctatatatgttaattaaactaatttgtgcatgtacatagaattctttctgtattcagatggtgctaattcagactccagactgaattttaattcaagttctttctcaagtctataaatattaaactgattatttcattctaaaaaaaaaaaag

SEQ ID NO: 301482 - DNA, 9665 bp, Homo sapiens
cagcgactcctctggctcccgagaagtggatccggtcgcggccactacgatgccgggagccgccggggtcctcctccttctgctgctctccggaggcctcgggggcgtacaggcgcagcggccgcagcagcagcggcagtcacaggcacatcagcaaagaggcatagtaccaattctgtgtcaggcattttattcactttgtttcaactgttcttgagatcccggaggattaggactattgcagttataagtctataactgaggaaaggaagcttatctggacaggaagatatttagagtatgatataaagacagtctctttttaaaaacagcattttaaagtgagatgaacccggtacctcagatggaaaagcagaaatcacctgtcttctgcgtcgctcacgctgggagctgtagaccggagctgttcctattcggccatcttggctcctcccctaaaggtttattccctgctgtcctgaatcttgcttctaatgctcttatcacgaccaatgcaacatgtggagaaaaaggacctgaaatgtactgcaaattggtagaacatgtccctgggcagcctgtgaggaacccgcagtgtcgaatctgcaatcaaaacagcagcaatccaaaccagagacacccgattacaaatgctattgatggaaagaacacttggtggcagagtcccagtattaagaatggaatcgaataccattatgtgacaattacactggatttacagcaggtgttccagatcgcgtatgtgattgtgaaggcagctaactccccccggcctggaaactggattttggaacgctctcttgatgatgttgaatacaagccctggcagtatcatgctgtgacagacacggagtgcctaacgctttacaatatttatccccgcactgggccaccgtcatatgccaaagatgatgaggtcatctgcacttcattttactccaagatacaccccttagaaaatggagagattcacatctctttaatcaatgggagaccaagtgccgatgatccttctccagaactgctagaatttacctccgctcgctatattcgcctgagatttcagaggatccgcacactgaatgctgacttgatgatgtttgctcacaaagacccaagagaaattgaccccattgtcaccagaagatattactactcggtcaaggatatttcagttggagggatgtgcatctgctatggtcatgccagggcttgtccacttgatccagcgacaaataaatctcgctgtgagtgtgagcataacacatgtggcgatagctgtgatcagtgctgtccaggattccatcagaaaccctggagagctggaacttttctaactaaaactgaatgtgaagcatgcaattgtcatggaaaagctgaagaatgctattatgatgaaaatgttgccagaagaaatctgagtttgaatatacgtggaaagtacattggagggggtgtctgcattaattgtacccaaaacactgctggtataaactgcgagacatgtacagatggcttcttcagacccaaaggggtatctccaaattatccaaggccatgccagccatgtcattgcgatccaattggttccttaaatgaagtctgtgtcaaggatgagaaacatgctcgacgaggtttggcacctggatcctgtcattgcaaaactggttttggaggtgtgagctgtgatcggtgtgccaggggctacactggctacccggactgcaaagcctgtaactgcagtgggttagggagcaaaaatgaggatccttgttttggcccctgtatctgcaaggaaaatgttgaaggaggagactgtagtcgttgcaaatccggcttcttcaatttgcaagaggataattggaaaggctgcgatgagtgtttctgttcaggggtttcaaacagatgtcagagttcctactggacctatggcaaaatacaagatatgagtggctggtatctgactgaccttcctggccgcattcgagtggctccccagcaggacgacttggactcacctcagcagatcagcatcagtaacgcggaggcccggcaagccctgccgcacagctactactggagcgcgccggctccctatctgggaaacaaactcccagcagtaggaggacagttgacatttaccatatcatatgaccttgaagaagaggaagaagatacagaacgtgttctccagcttatgattatcttagagggtaatgacttgagcatcagcacagcccaagatgaggtgtacctgcacccatctgaagaacatactaatgtattgttacttaaagaagaatcatttaccatacatggcacacattttccagtccgtagaaaggaatttatgacagtgcttgcgaatttgaagagagtcctcctacaaatcacatacagctttgggatggatgccatcttcaggttgagctctgttaaccttgaatccgctgtctcctatcctactgatggaagcattgcagcagctgtagaagtgtgtcagtgcccaccagggtatactggctcctcttgtgaatcttgttggcctaggcacaggcgagttaacggcactatttttggtggcatctgtgagccatgtcagtgctttggtcatgcggagtcctgtgatgacgtcactggagaatgcctgaactgtaaggatcacacaggtggcccatattgtgataaatgtcttcctggtttctatggcgagcctactaaaggaacctctgaagactgtcaaccctgtgcctgtccactcaatatcccatccaataactttagcccaacgtgccatttagaccggagtcttggattgatctgtgatggatgccctgtcgggtacacaggaccacgctgtgagaggtgtgcagaaggctattttggacaaccctctgtacctggaggatcatgtcagccatgccaatgcaatgacaaccttgacttctccatccctggcagctgtgacagcttgtctggctcctgtctgatatgtaaaccaggtacaacaggccggtactgtgagctctgtgctgatggatattttggagatgcagttgatgcgaagaactgtcagccctgtcgctgtaatgccggtggctctttctctgaggtttgccacagtcaaactggacagtgtgagtgcagagccaacgttcagggtcagagatgtgacaaatgcaaggctgggacctttggcctacaatcagcaaggggctgtgttccctgcaactgcaattcttttgggtctaagtcattcgactgtgaagagagtggacaatgttggtgccaacctggagtcacagggaagaaatgtgaccgctgtgcccacggctatttcaacttccaagaaggaggctgcacagcttgtgaatgttctcatctgggtaataattgtgacccaaagactgggcgatgcatttgcccacccaataccattggagagaaatgttctaaatgtgcacccaatacctggggccacagcattaccactggttgtaaggcttgtaactgcagcacagtgggatccttggatttccaatgcaatgtaaatacaggccaatgcaactgtcatccaaaattctctggtgcaaaatgtacagagtgcagtcgaggtcactggaactaccctcgctgcaatctctgtgactgcttcctccctgggacagatgccacaacctgtgattcagagactaaaaaatgctcctgtagtgatcaaactgggcagtgcacttgtaaggtgaatgtggaaggcatccactgtgacagatgccggcctggcaaattcggactcgatgccaagaatccacttggctgcagcagctgctattgcttcggcactactacccagtgctctgaagcaaaaggactgatccggacgtgggtgactctgaaggctgagcagaccattctacccctggtagatgaggctctgcagcacacgaccaccaagggcattgtttttcaacatccagagattgttgcccacatggacctgatgagagaagatctccatttggaacctttttattggaaacttccagaacaatttgaaggaaagaagttgatggcctatgggggcaaactcaagtatgcaatctatttcgaggctcgggaagaaacaggtttctctacatataatcctcaagtgatcattcgaggtgggacacctactcatgctagaattatcgtcaggcatatggctgctcctctgattggccaattgacaaggcatgaaattgaaatgacagagaaagaatggaaatattatggggatgatcctcgagtccatagaactgtgacccgagaagacttcttggatatactatatgatattcattacattcttatcaaagctacttatggaaatttcatgcgacaaagcaggatttctgaaatctcaatggaggtagctgaacaaggacgtggaacaacaatgactcctccagctgacttgattgaaaaatgtgattgtcccctgggctattctggcctgtcctgtgaggcatgcttgccgggattttatcgactgcgttctcaaccaggtggccgcacccctggaccaaccctgggcacctgtgttccatgtcaatgtaatggacacagcagcctgtgtgaccctgaaacatcgatatgccagaattgtcaacatcacactgctggtgacttctgtgaacgatgtgctcttggatactatggaattgtcaagggattgccaaatgactgtcagcaatgtgcctgccctctgatttcttccagtaacaatttcagcccctcttgtgtcgcagaaggacttgacgactaccgctgcacggcttgtccacggggatatgaaggccagtactgtgaaaggtgtgcccctggctatactggcagtccaggcaaccctggaggctcctgccaagaatgtgagtgtgatccctatggctcactgcctgtgccctgtgaccctgtcacaggattctgcacgtgccgacctggagccacgggaaggaagtgtgacggctgcaagcactggcatgcacgcgagggctgggagtgtgttttttgtggagatgagtgcactggccttcttctcggtgacttggctcgcctggagcagatggtcatgagcatcaacctcactggtccgctgcctgcgccatataaaatgctgtatggtcttgaaaatatgactcaggagctaaagcacttgctgtcacctcagcgggccccagagaggcttattcagctggcagagggcaatctgaatacactcgtgaccgaaatgaacgagctgctgaccagggctaccaaagtgacagcagatggcgagcagaccggacaggatgctgagaggaccaacacaagagcaaagtccctgggagaattcattaaggagcttgcccgggatgcagaagctgtaaatgaaaaagctataaaactaaatgaaactctaggaactcgagacgaggcctttgagagaaatttggaagggcttcagaaagagattgaccagatgattaaagaactgaggaggaaaaatctagagacacaaaaggaaattgctgaagatgagttggtagctgcagaagcccttctgaaaaaagtgaagaagctgtttggagagtcccggggggaaaatgaagaaatggagaaggatctccgggaaaaactggctgactacaaaaacaaagttgatgatgcttgggaccttttgagagaagccacagataaaatcagagaagctaatcgcctatttgcagtaaatcagaaaaacatgactgcattggagaaaaagaaggaggctgttgagagcggcaaacgacaaattgagaacactttaaaagaaggcaatgacatactcgatgaagccaaccgtcttgcagatgaaatcaactccatcatagactatgttgaagacatccaaactaaattgccacctatgtctgaggagcttaatgataaaatagatgacctctcccaagaaataaaggacaggaagcttgctgagaaggtgtcccaggctgagagccacgcagctcagttgaatgactcatctgctgtccttgatggaatccttgatgaggctaaaaacatctccttcaatgccactgcagccttcaaagcttacagcaatattaaggactatattgatgaagctgagaaagttgccaaagaagccaaagatcttgcacatgaagctacaaaactggcaacaggtcctcggggtttattaaaggaagatgccaaaggctgtcttcagaaaagcttcaggattcttaacgaagccaagaagttagcaaatgatgtaaaagaaaatgaagaccatctaaatggcttaaaaaccaggatagaaaatgctgatgctagaaatggggatctcttgagaactttgaatgacactttgggaaagttatcagctattccaaatgatacagctgctaaactgcaagctgttaaggacaaagccagacaagccaacgacacagctaaagatgtactggcacagattacagagctccaccagaacctcgatggcctgaagaagaattacaataaactagcagacagcgtcgccaaaacgaatgctgtggttaaagatccttccaagaacaaaatcattgccgatgcagatgccactgtcaaaaatttagaacaggaagctgaccggctaatagataaactcaaacccatcaaggaacttgaggataacctaaagaaaaacatctctgagataaaggaattgataaaccaagctcggaaacaagccaattctatcaaagtatctgtgtcttcaggaggtgactgcattcgaacatacaaaccagaaatcaagaaaggaagttacaataatattgttgtcaacgtaaagacagctgttgctgataacctcctcttttatcttggaagtgccaaatttattgactttctggctatagaaatgcgtaaaggcaaagtcagcttcctctgggatgttggatctggagttggacgtgtagagtacccagatttgactattgatgactcatattggtaccgtatcgtagcatcaagaactgggagaaatggaactatttctgtgagagccctggatggacccaaagccagcattgtgcccagcacacaccattcgacgtctcctccagggtacacgattctagatgtggatgcaaatgcaatgctgtttgttggtggcctgactgggaaattaaagaaggctgatgctgtacgtgtgattacattcactggctgcatgggagaaacatactttgacaacaaacctataggtttgtggaatttccgagaaaaagaaggtgactgcaaaggatgcactgtcagtcctcaggtggaagatagtgaggggactattcaatttgatggagaaggttatgcattggtcagccgtcccattcgctggtaccccaacatctccactgtcatgttcaagttcagaacattttcttcgagtgctcttctgatgtatcttgccacacgagacctgagagatttcatgagtgtggagctcactgatgggcacataaaagtcagttacgatctgggctcaggaatggcttccgttgtcagcaatcaaaaccataatgatgggaaatggaaatcattcactctgtcaagaattcaaaaacaagccaatatatcaattgtagatatagatactaatcaggaggagaatatagcaacttcgtcttctggaaacaactttggtcttgacttgaaagcagatgacaaaatatattttggtggcctgccaacgctgagaaacttgagtatgaaagcaaggccagaagtaaatctgaagaaatattccggctgcctcaaagatattgaaatttcaagaactccgtacaatatactcagtagtcccgattatgttggtgttaccaaaggatgttccctggagaatgtttacacagttagctttcctaagcctggttttgtggagctctcccctgtgccaattgatgtaggaacagaaatcaacctgtcattcagcaccaagaatgagtccggcatcattcttttgggaagtggagggacaccagcaccacctaggagaaaacgaaggcagactggacaggcctattatgtaatactcctcaacaggggccgtctggaagtgcatctctccacaggggcacgaacaatgaggaaaattgtcatcagaccagagccgaatctgtttcatgatggaagagaacattccgttcatgtagagcgaactagaggcatctttacagttcaagtggatgaaaacagaagatacatgcaaaacctgacagttgaacagcctatcgaagttaaaaagcttttcgttgggggtgctccacctgaatttcaaccttccccactcagaaatattcctccttttgaaggctgcatatggaatcttgttattaactctgtccccatggactttgcaaggcctgtgtccttcaaaaatgctgacattggtcgctgtgcccatcagaaactccgtgaagatgaagatggagcagctccagctgaaatagttatccagcctgagccagttcccaccccagcctttcctacgcccaccccagttctgacacatggtccttgtgctgcagaatcagaaccagctcttttgatagggagcaagcagttcgggctttcaagaaacagtcacattgcaattgcatttgatgacaccaaagttaaaaaccgtctcacaattgagttggaagtaagaaccgaagctgaatccggcttgcttttttacatggctcgcatcaatcatgctgattttgcaacagttcagctgagaaatggattgccctacttcagctatgacttggggagtggggacacccacaccatgatccccaccaaaatcaatgatggccagtggcacaagattaagataatgagaagtaagcaagaaggaattctttatgtagatggggcttccaacagaaccatcagtcccaaaaaagccgacatcctggatgtcgtgggaatgctgtatgttggtgggttacccatcaactacactacccgaagaattggtccagtgacctatagcattgatggctgcgtcaggaatctccacatggcagaggcccctgccgatctggaacaacccacctccagcttccatgttgggacatgttttgcaaatgctcagaggggaacatattttgacggaaccggttttgccaaagcagttggtggattcaaagtgggattggaccttcttgtagaatttgaattccgcacaactacaacgactggagttcttctggggctggggttccagggcatttgtgtgatggacaatggcataaagtcactgccaacaagatcaaacaccaaaggcacaggcaagccactggaggttaattttgccaaggccctggaactgaggggcgttcaacctgtatcatgcccagccaactaataaaaataagtgtaaccccaggaagagtctgtcaaaacaagtatatcaagtaaaacaaacaaatatattttacctatatatgttaattaaactaatttgtgcatgtacatagaattctttctgtattcagatggtgctaattcagactccagactgaattttaattcaagttctttctcaagtctataaatattaaactgattatttcattctaaaaaaaaaaaag

SEQ ID NO: 301483 - DNA, 9520 bp, Homo sapiens
cagcgactcctctggctcccgagaagtggatccggtcgcggccactacgatgccgggagccgccggggtcctcctccttctgctgctctccggaggcctcgggggcgtacaggcgcagcggccgcagcagcagcggcagtcacaggcacatcagcaaagaggcatagtaccaattctgtgtcaggcattttattcactttgtttcaactgttcttgagatcccggaggattaggactattgcagttataagtctataactgaggaaaggaagcttatctggacaggaagatatttagagtatgatataaagacagtctctttttaaaaacagcattttaaagtgagatgaacccggtacctcagatggaaaagcagaaatcacctgtcttctgcgtcgctcacgctgggagctgtagaccggagctgttcctattcggccatcttggctcctcccctaaaggtttattccctgctgtcctgaatcttgcttctaatgctcttatcacgaccaatgcaacatgtggagaaaaaggacctgaaatgtactgcaaattggtagaacatgtccctgggcagcctgtgaggaacccgcagtgtcgaatctgcaatcaaaacagcagcaatccaaaccagagacacccgattacaaatgctattgatggaaagaacacttggtggcagagtcccagtattaagaatggaatcgaataccattatgtgacaattacactggatttacagcaggtgttccagatcgcgtatgtgattgtgaaggcagctaactccccccggcctggaaactggattttggaacgctctcttgatgatgttgaatacaagccctggcagtatcatgctgtgacagacacggagtgcctaacgctttacaatatttatccccgcactgggccaccgtcatatgccaaagatgatgaggtcatctgcacttcattttactccaagatacaccccttagaaaatggagagattcacatctctttaatcaatgggagaccaagtgccgatgatccttctccagaactgctagaatttacctccgctcgctatattcgcctgagatttcagaggatccgcacactgaatgctgacttgatgatgtttgctcacaaagacccaagagaaattgaccccattgtcaccagaagatattactactcggtcaaggatatttcagttggagggatgtgcatctgctatggtcatgccagggcttgtccacttgatccagcgacaaataaatctcgctgtgagtgtgagcataacacatgtggcgatagctgtgatcagtgctgtccaggattccatcagaaaccctggagagctggaacttttctaactaaaactgaatgtgaagcatgcaattgtcatggaaaagctgaagaatgctattatgatgaaaatgttgccagaagaaatctgagtttgaatatacgtggaaagtacattggagggggtgtctgcattaattgtacccaaaacactgctggtataaactgcgagacatgtacagatggcttcttcagacccaaaggggtatctccaaattatccaaggccatgccagccatgtcattgcgatccaattggttccttaaatgaagtctgtgtcaaggatgagaaacatgctcgacgaggtttggcacctggatcctgtcattgcaaaactggttttggaggtgtgagctgtgatcggtgtgccaggggctacactggctacccggactgcaaagcctgtaactgcagtgggttagggagcaaaaatgaggatccttgttttggcccctgtatctgcaaggaaaatgttgaaggaggagactgtagtcgttgcaaatccggcttcttcaatttgcaagaggataattggaaaggctgcgatgagtgtttctgttcaggggtttcaaacagatgtcagagttcctactggacctatggcaaaatacaagatatgagtggctggtatctgactgaccttcctggccgcattcgagtggctccccagcaggacgacttggactcacctcagcagatcagcatcagtaacgcggaggcccggcaagccctgccgcacagctactactggagcgcgccggctccctatctgggaaacaaactcccagcagtaggaggacagttgacatttaccatatcatatgaccttgaagaagaggaagaagatacagaacgtgttctccagcttatgattatcttagagggtaatgacttgagcatcagcacagcccaagatgaggtgtacctgcacccatctgaagaacatactaatgtattgttacttaaagaagaatcatttaccatacatggcacacattttccagtccgtagaaaggaatttatgacagtgcttgcgaatttgaagagagtcctcctacaaatcacatacagctttgggatggatgccatcttcaggttgagctctgttaaccttgaatccgctgtctcctatcctactgatggaagcattgcagcagctgtagaagtgtgtcagtgcccaccagggtatactggctcctcttgtgaatcttgttggcctaggcacaggcgagttaacggcactatttttggtggcatctgtgagccatgtcagtgctttggtcatgcggagtcctgtgatgacgtcactggagaatgcctgaactgtaaggatcacacaggtggcccatattgtgataaatgtcttcctggtttctatggcgagcctactaaaggaacctctgaagactgtcaaccctgtgcctgtccactcaatatcccatccaataactttagcccaacgtgccatttagaccggagtcttggattgatctgtgatggatgccctgtcgggtacacaggaccacgctgtgagaggtgtgcagaaggctattttggacaaccctctgtacctggaggatcatgtcagccatgccaatgcaatgacaaccttgacttctccatccctggcagctgtgacagcttgtctggctcctgtctgatatgtaaaccaggtacaacaggccggtactgtgagctctgtgctgatggatattttggagatgcagttgatgcgaagaactgtcagccctgtcgctgtaatgccggtggctctttctctgaggtttgccacagtcaaactggacagtgtgagtgcagagccaacgttcagggtcagagatgtgacaaatgcaaggctgggacctttggcctacaatcagcaaggggctgtgttccctgcaactgcaattcttttgggtctaagtcattcgactgtgaagagagtggacaatgttggtgccaacctggagtcacagggaagaaatgtgaccgctgtgcccacggctatttcaacttccaagaaggaggctgcacagcttgtgaatgttctcatctgggtaataattgtgacccaaagactgggcgatgcatttgcccacccaataccattggagagaaatgttctaaatgtgcacccaatacctggggccacagcattaccactggttgtaaggcttgtaactgcagcacagtgggatccttggatttccaatgcaatgtaaatacaggccaatgcaactgtcatccaaaattctctggtgcaaaatgtacagagtgcagtcgaggtcactggaactaccctcgctgcaatctctgtgactgcttcctccctgggacagatgccacaacctgtgattcagagactaaaaaatgctcctgtagtgatcaaactgggcagtgcacttgtaaggtgaatgtggaaggcatccactgtgacagatgccggcctggcaaattcggactcgatgccaagaatccacttggctgcagcagctgctattgcttcggcactactacccagtgctctgaagcaaaaggactgatccggacgtgggtgactctgaaggctgagcagaccattctacccctggtagatgaggctctgcagcacacgaccaccaagggcattgtttttcaacatccagagattgttgcccacatggacctgatgagagaagatctccatttggaacctttttattggaaacttccagaacaatttgaaggaaagaagttgatggcctatgggggcaaactcaagtatgcaatctatttcgaggctcgggaagaaacaggtttctctacatataatcctcaagtgatcattcgaggtgggacacctactcatgctagaattatcgtcaggcatatggctgctcctctgattggccaattgacaaggcatgaaattgaaatgacagagaaagaatggaaatattatggggatgatcctcgagtccatagaactgtgacccgagaagacttcttggatatactatatgatattcattacattcttatcaaagctacttatggaaatttcatgcgacaaagcaggatttctgaaatctcaatggaggtagctgaacaaggacgtggaacaacaatgactcctccagctgacttgattgaaaaatgtgattgtcccctgggctattctggcctgtcctgtgaggcatgcttgccgggattttatcgactgcgttctcaaccaggtggccgcacccctggaccaaccctgggcacctgtgttccatgtcaatgtaatggacacagcagcctgtgtgaccctgaaacatcgatatgccagaattgtcaacatcacactgctggtgacttctgtgaacgatgtgctcttggatactatggaattgtcaagggattgccaaatgactgtcagcaatgtgcctgccctctgatttcttccagtaacaatttcagcccctcttgtgtcgcagaaggacttgacgactaccgctgcacggcttgtccacggggatatgaaggccagtactgtgaaaggtgtgcccctggctatactggcagtccaggcaaccctggaggctcctgccaagaatgtgagtgtgatccctatggctcactgcctgtgccctgtgaccctgtcacaggattctgcacgtgccgacctggagccacgggaaggaagtgtgacggctgcaagcactggcatgcacgcgagggctgggagtgtgttttttgtggagatgagtgcactggccttcttctcggtgacttggctcgcctggagcagatggtcatgagcatcaacctcactggtccgctgcctgcgccatataaaatgctgtatggtcttgaaaatatgactcaggagctaaagcacttgctgtcacctcagcgggccccagagaggcttattcagctggcagagggcaatctgaatacactcgtgaccgaaatgaacgagctgctgaccagggctaccaaagtgacagcagatggcgagcagaccggacaggatgctgagaggaccaacacaagagcaaagtccctgggagaattcattaaggagcttgcccgggatgcagaagctgtaaatgaaaaagctataaaactaaatgaaactctaggaactcgagacgaggcctttgagagaaatttggaagggcttcagaaagagattgaccagatgattaaagaactgaggaggaaaaatctagagacacaaaaggaaattgctgaagatgagttggtagctgcagaagcccttctgaaaaaagtgaagaagctgtttggagagtcccggggggaaaatgaagaaatggagaaggatctccgggaaaaactggctgactacaaaaacaaagttgatgatgcttgggaccttttgagagaagccacagataaaatcagagaagctaatcgcctatttgcagtaaatcagaaaaacatgactgcattggagaaaaagaaggaggctgttgagagcggcaaacgacaaattgagaacactttaaaagaaggcaatgacatactcgatgaagccaaccgtcttgcagatgaaatcaactccatcatagactatgttgaagacatccaaactaaattgccacctatgtctgaggagcttaatgataaaatagatgacctctcccaagaaataaaggacaggaagcttgctgagaaggtgtcccaggctgagagccacgcagctcagttgaatgactcatctgctgtccttgatggaatccttgatgaggctaaaaacatctccttcaatgccactgcagccttcaaagcttacagcaatattaaggactatattgatgaagctgagaaagttgccaaagaagccaaagatcttgcacatgaagctacaaaactggcaacaggtcctcggggtttattaaaggaagatgccaaaggctgtcttcagaaaagcttcaggattcttaacgaagccaagaagttagcaaatgatgtaaaagaaaatgaagaccatctaaatggcttaaaaaccaggatagaaaatgctgatgctagaaatggggatctcttgagaactttgaatgacactttgggaaagttatcagctattccaaatgatacagctgctaaactgcaagctgttaaggacaaagccagacaagccaacgacacagctaaagatgtactggcacagattacagagctccaccagaacctcgatggcctgaagaagaattacaataaactagcagacagcgtcgccaaaacgaatgctgtggttaaagatccttccaagaacaaaatcattgccgatgcagatgccactgtcaaaaatttagaacaggaagctgaccggctaatagataaactcaaacccatcaaggaacttgaggataacctaaagaaaaacatctctgagataaaggaattgataaaccaagctcggaaacaagccaattctatcaaagtatctgtgtcttcaggaggtgactgcattcgaacatacaaaccagaaatcaagaaaggaagttacaataatattgttgtcaacgtaaagacagctgttgctgataacctcctcttttatcttggaagtgccaaatttattgactttctggctatagaaatgcgtaaaggcaaagtcagcttcctctgggatgttggatctggagttggacgtgtagagtacccagatttgactattgatgactcatattggtaccgtatcgtagcatcaagaactgggagaaatggaactatttctgtgagagccctggatggacccaaagccagcattgtgcccagcacacaccattcgacgtctcctccagggtacacgattctagatgtggatgcaaatgcaatgctgtttgttggtggcctgactgggaaattaaagaaggctgatgctgtacgtgtgattacattcactggctgcatgggagaaacatactttgacaacaaacctataggtttgtggaatttccgagaaaaagaaggtgactgcaaaggatgcactgtcagtcctcaggtggaagatagtgaggggactattcaatttgatggagaaggttatgcattggtcagccgtcccattcgctggtaccccaacatctccactgtcatgttcaagttcagaacattttcttcgagtgctcttctgatgtatcttgccacacgagacctgagagatttcatgagtgtggagctcactgatgggcacataaaagtcagttacgatctgggctcaggaatggcttccgttgtcagcaatcaaaaccataatgatgggaaatggaaatcattcactctgtcaagaattcaaaaacaagccaatatatcaattgtagatatagatactaatcaggaggagaatatagcaacttcgtcttctggaaacaactttggtcttgacttgaaagcagatgacaaaatatattttggtggcctgccaacgctgagaaacttgagtatgaaagcaaggccagaagtaaatctgaagaaatattccggctgcctcaaagatattgaaatttcaagaactccgtacaatatactcagtagtcccgattatgttggtgttaccaaaggatgttccctggagaatgtttacacagttagctttcctaagcctggttttgtggagctctcccctgtgccaattgatgtaggaacagaaatcaacctgtcattcagcaccaagaatgagtccggcatcattcttttgggaagtggagggacaccagcaccacctaggagaaaacgaaggcagactggacaggcctattatgtaatactcctcaacaggggccgtctggaagtgcatctctccacaggggcacgaacaatgaggaaaattgtcatcagaccagagccgaatctgtttcatgatggaagagaacattccgttcatgtagagcgaactagaggcatctttacagttcaagtggatgaaaacagaagatacatgcaaaacctgacagttgaacagcctatcgaagttaaaaagcttttcgttgggggtgctccacctgaatttcaaccttccccactcagaaatattcctccttttgaaggctgcatatggaatcttgttattaactctgtccccatggactttgcaaggcctgtgtccttcaaaaatgctgacattggtcgctgtgcccatcagaaactccgtgaagatgaagatggagcagctccagctgaaatagttatccagcctgagccagttcccaccccagcctttcctacgcccaccccagttctgacacatggtccttgtgctgcagaatcagaaccagctcttttgatagggagcaagcagttcgggctttcaagaaacagtcacattgcaattgcatttgatgacaccaaagttaaaaaccgtctcacaattgagttggaagtaagaaccgaagctgaatccggcttgcttttttacatggctcgcatcaatcatgctgattttgcaacagttcagctgagaaatggattgccctacttcagctatgacttggggagtggggacacccacaccatgatccccaccaaaatcaatgatggccagtggcacaagattaagataatgagaagtaagcaagaaggaattctttatgtagatggggcttccaacagaaccatcagtcccaaaaaagccgacatcctggatgtcgtgggaatgctgtatgttggtgggttacccatcaactacactacccgaagaattggtccagtgacctatagcattgatggctgcgtcaggaatctccacatggcagaggcccctgccgatctggaacaacccacctccagcttccatgttgggacatgttttgcaaatgctcagaggggaacatattttgacggaaccggttttgccaaagcagttggtggattcaaagtgggattggaccttcttgtagaatttgaattccgcacaactacaacgactggagttcttctggggccaactaataaaaataagtgtaaccccaggaagagtctgtcaaaacaagtatatcaagtaaaacaaacaaatatattttacctatatatgttaattaaactaatttgtgcatgtacatagaattctttctgtattcagatggtgctaattcagactccagactgaattttaattcaagttctttctcaagtctataaatattaaactgattatttcattctaaaaaaaaaaaag

SEQ ID NO: 301484 - DNA, 7910 bp, Homo sapiens
cagcgactcctctggctcccgagaagtggatccggtcgcggccactacgatgccgggagccgccggggtcctcctccttctgctgctctccggaggcctcgggggcgtacaggcgcagcggccgcagcagcagcggcagtcacaggcacatcagcaaagaggcatagtaccaattctgtgtcaggcattttattcactttgtttcaactgttcttgagatcccggaggattaggactattgcagttataagtctataactgaggaaaggaagcttatctggacaggaagatatttagagtatgatataaagacagtctctttttaaaaacagcattttaaagtgagatgaacccggtacctcagatggaaaagcagaaatcacctgtcttctgcgtcgctcacgctgggagctgtagaccggagctgttcctattcggccatcttggctcctcccctaaaggtttattccctgctgtcctgaatcttgcttctaatgctcttatcacgaccaatgcaacatgtggagaaaaaggacctgaaatgtactgcaaattggtagaacatgtccctgggcagcctgtgaggaacccgcagtgtcgaatctgcaatcaaaacagcagcaatccaaaccagagacacccgattacaaatgctattgatggaaagaacacttggtggcagagtcccagtattaagaatggaatcgaataccattatgtgacaattacactggatttacagcaggtgttccagatcgcgtatgtgattgtgaaggcagctaactccccccggcctggaaactggattttggaacgctctcttgatgatgttgaatacaagccctggcagtatcatgctgtgacagacacggagtgcctaacgctttacaatatttatccccgcactgggccaccgtcatatgccaaagatgatgaggtcatctgcacttcattttactccaagatacaccccttagaaaatggagagattcacatctctttaatcaatgggagaccaagtgccgatgatccttctccagaactgctagaatttacctccgctcgctatattcgcctgagatttcagaggatccgcacactgaatgctgacttgatgatgtttgctcacaaagacccaagagaaattgaccccattgtcaccagaagatattactactcggtcaaggatatttcagttggagggatgtgcatctgctatggtcatgccagggcttgtccacttgatccagcgacaaataaatctcgctgtgagtgtgagcataacacatgtggcgatagctgtgatcagtgctgtccaggattccatcagaaaccctggagagctggaacttttctaactaaaactgaatgtgaagcatgcaattgtcatggaaaagctgaagaatgctattatgatgaaaatgttgccagaagaaatctgagtttgaatatacgtggaaagtacattggagggggtgtctgcattaattgtacccaaaacactgctggtataaactgcgagacatgtacagatggcttcttcagacccaaaggggtatctccaaattatccaaggccatgccagccatgtcattgcgatccaattggttccttaaatgaagtctgtgtcaaggatgagaaacatgctcgacgaggtttggcacctggatcctgtcattgcaaaactggttttggaggtgtgagctgtgatcggtgtgccaggggctacactggctacccggactgcaaagcctgtaactgcagtgggttagggagcaaaaatgaggatccttgttttggcccctgtatctgcaaggaaaatgttgaaggaggagactgtagtcgttgcaaatccggcttcttcaatttgcaagaggataattggaaaggctgcgatgagtgtttctgttcaggggtttcaaacagatgtcagagttcctactggacctatggcaaaatacaagatatgagtggctggtatctgactgaccttcctggccgcattcgagtggctccccagcaggacgacttggactcacctcagcagatcagcatcagtaacgcggaggcccggcaagccctgccgcacagctactactggagcgcgccggctccctatctgggaaacaaactcccagcagtaggaggacagttgacatttaccatatcatatgaccttgaagaagaggaagaagatacagaacgtgttctccagcttatgattatcttagagggtaatgacttgagcatcagcacagcccaagatgaggtgtacctgcacccatctgaagaacatactaatgtattgttacttaaagaagaatcatttaccatacatggcacacattttccagtccgtagaaaggaatttatgacagtgcttgcgaatttgaagagagtcctcctacaaatcacatacagctttgggatggatgccatcttcaggttgagctctgttaaccttgaatccgctgtctcctatcctactgatggaagcattgcagcagctgtagaagtgtgtcagtgcccaccagggtatactggctcctcttgtgaatcttgttggcctaggcacaggcgagttaacggcactatttttggtggcatctgtgagccatgtcagtgctttggtcatgcggagtcctgtgatgacgtcactggagaatgcctgaactgtaaggatcacacaggtggcccatattgtgataaatgtcttcctggtttctatggcgagcctactaaaggaacctctgaagactgtcaaccctgtgcctgtccactcaatatcccatccaataactttagcccaacgtgccatttagaccggagtcttggattgatctgtgatggatgccctgtcgggtacacaggaccacgctgtgagaggtgtgcagaaggctattttggacaaccctctgtacctggaggatcatgtcagccatgccaatgcaatgacaaccttgacttctccatccctggcagctgtgacagcttgtctggctcctgtctgatatgtaaaccaggtacaacaggccggtactgtgagctctgtgctgatggatattttggagatgcagttgatgcgaagaactgtcagccctgtcgctgtaatgccggtggctctttctctgaggtttgccacagtcaaactggacagtgtgagtgcagagccaacgttcagggtcagagatgtgacaaatgcaaggctgggacctttggcctacaatcagcaaggggctgtgttccctgcaactgcaattcttttgggtctaagtcattcgactgtgaagagagtggacaatgttggtgccaacctggagtcacagggaagaaatgtgaccgctgtgcccacggctatttcaacttccaagaaggaggctgcacagcttgtgaatgttctcatctgggtaataattgtgacccaaagactgggcgatgcatttgcccacccaataccattggagagaaatgttctaaatgtgcacccaatacctggggccacagcattaccactggttgtaaggcttgtaactgcagcacagtgggatccttggatttccaatgcaatgtaaatacaggccaatgcaactgtcatccaaaattctctggtgcaaaatgtacagagtgcagtcgaggtcactggaactaccctcgctgcaatctctgtgactgcttcctccctgggacagatgccacaacctgtgattcagagactaaaaaatgctcctgtagtgatcaaactgggcagtgcacttgtaaggtgaatgtggaaggcatccactgtgacagatgccggcctggcaaattcggactcgatgccaagaatccacttggctgcagcagctgctattgcttcggcactactacccagtgctctgaagcaaaaggactgatccggacgtgggtgactctgaaggctgagcagaccattctacccctggtagatgaggctctgcagcacacgaccaccaagggcattgtttttcaacatccagagattgttgcccacatggacctgatgagagaagatctccatttggaacctttttattggaaacttccagaacaatttgaaggaaagaagttgatggcctatgggggcaaactcaagtatgcaatctatttcgaggctcgggaagaaacaggtttctctacatataatcctcaagtgatcattcgaggtgggacacctactcatgctagaattatcgtcaggcatatggctgctcctctgattggccaattgacaaggcatgaaattgaaatgacagagaaagaatggaaatattatggggatgatcctcgagtccatagaactgtgacccgagaagacttcttggatatactatatgatattcattacattcttatcaaagctacttatggaaatttcatgcgacaaagcaggatttctgaaatctcaatggaggtagctgaacaaggacgtggaacaacaatgactcctccagctgacttgattgaaaaatgtgattgtcccctgggctattctggcctgtcctgtgaggcatgcttgccgggattttatcgactgcgttctcaaccaggtggccgcacccctggaccaaccctgggcacctgtgttccatgtcaatgtaatggacacagcagcctgtgtgaccctgaaacatcgatatgccagaattgtcaacatcacactgctggtgacttctgtgaacgatgtgctcttggatactatggaattgtcaagggattgccaaatgactgtcagcaatgtgcctgccctctgatttcttccagtaacaatttcagcccctcttgtgtcgcagaaggacttgacgactaccgctgcacggcttgtccacggggatatgaaggccagtactgtgaaaggtgtgcccctggctatactggcagtccaggcaaccctggaggctcctgccaagaatgtgagtgtgatccctatggctcactgcctgtgccctgtgaccctgtcacaggattctgcacgtgccgacctggagccacgggaaggaagtgtgacggctgcaagcactggcatgcacgcgagggctgggagtgtgttttttgtggagatgagtgcactggccttcttctcggtgacttggctcgcctggagcagatggtcatgagcatcaacctcactggtccgctgcctgcgccatataaaatgctgtatggtcttgaaaatatgactcaggagctaaagcacttgctgtcacctcagcgggccccagagaggcttattcagctggcagagggcaatctgaatacactcgtgaccgaaatgaacgagctgctgaccagggctaccaaagtgacagcagatggcgagcagaccggacaggatgctgagaggaccaacacaagagcaaagtccctgggagaattcattaaggagcttgcccgggatgcagaagctgtaaatgaaaaagctataaaactaaatgaaactctaggaactcgagacgaggcctttgagagaaatttggaagggcttcagaaagagattgaccagatgattaaagaactgaggaggaaaaatctagagacacaaaaggaaattgctgaagatgagttggtagctgcagaagcccttctgaaaaaagtgaagaagctgtttggagagtcccggggggaaaatgaagaaatggagaaggatctccgggaaaaactggctgactacaaaaacaaagttgatgatgcttgggaccttttgagagaagccacagataaaatcagagaagctaatcgcctatttgcagtaaatcagaaaaacatgactgcattggagaaaaagaaggaggctgttgagagcggcaaacgacaaattgagaacactttaaaagaaggcaatgacatactcgatgaagccaaccgtcttgcagatgaaatcaactccatcatagactatgttgaagacatccaaactaaattgccacctatgtctgaggagcttaatgataaaatagatgacctctcccaagaaataaaggacaggaagcttgctgagaaggtgtcccaggctgagagccacgcagctcagttgaatgactcatctgctgtccttgatggaatccttgatgaggctaaaaacatctccttcaatgccactgcagccttcaaagcttacagcaatattaaggactatattgatgaagctgagaaagttgccaaagaagccaaagatcttgcacatgaagctacaaaactggcaacaggtcctcggggtttattaaaggaagatgccaaaggctgtcttcagaaaagcttcaggattcttaacgaagccaagaagttagcaaatgatgtaaaagaaaatgaagaccatctaaatggcttaaaaaccaggatagaaaatgctgatgctagaaatggggatctcttgagaactttgaatgacactttgggaaagttatcagctattccaaatgatacagctgctaaactgcaagctgttaaggacaaagccagacaagccaacgacacagctaaagatgtactggcacagattacagagctccaccagaacctcgatggcctgaagaagaattacaataaactagcagacagcgtcgccaaaacgaatgctgtggttaaagatccttccaagaacaaaatcattgccgatgcagatgccactgtcaaaaatttagaacaggaagctgaccggctaatagataaactcaaacccatcaaggaacttgaggataacctaaagaaaaacatctctgagataaaggaattgataaaccaagctcggaaacaagccaattctatcaaagtatctgtgtcttcaggaggtgactgcattcgaacatacaaaccagaaatcaagaaaggaagttacaataatattgttgtcaacgtaaagacagctgttgctgataacctcctcttttatcttggaagtgccaaatttattgactttctggctatagaaatgcgtaaaggcaaagtcagcttcctctgggatgttggatctggagttggacgtgtagagtacccagatttgactattgatgactcatattggtaccgtatcgtagcatcaagaactgggagaaatggaactatttctgtgagagccctggatggacccaaagccagcattgtgcccagcacacaccattcgacgtctcctccagggtacacgattctagatgtggatgcaaatgcaatgctgtttgttggtggcctgactgggaaattaaagaaggctgatgctgtacgtgtgattacattcactggctgcatgggagaaacatactttgacaacaaacctataggtttgtggaatttccgagaaaaagaaggtgactgcaaaggatgcactgtcagtcctcaggtggaagatagtgaggggactattcaatttgatggagaaggttatgcattggtcagccgtcccattcgctggtaccccaacatctccactgtcatgttcaagttcagaacattttcttcgagtgctcttctgatgtatcttgccacacgagacctgagagatttcatgagtgtggagctcactgatgggcacataaaagtcagttacgatctgggctcaggaatggcttccgttgtcagcaatcaaaaccataatgatgggaaatggaaatcattcactctgtcaagaattcaaaaacaagcaacaggaatggacctggaggtcattatcctaagtgacataacccagaaacagaaaatccaataccatatgttctcacttacaaggcgagaagctaaacaatggatacacgaagacgtgaagatggaaacaatagacactggggactccaaaaggggggagggaggagaaggggtgaagatttaaaaatcgcctgttgggtacagtgttcactgtgtgggtgatgggtccactagaagcccaaacttcactcttatgcaat

SEQ ID NO: 301485 - DNA, 187 bp, Homo sapiens
gatcttgcacatgaagctacaaaactggtaagaaacaaatggcacatgtgctgggaatggaagtcaacctttttgaatttttcaaatgtaagtcagtctggaaaatcccagtaaattggtatatttgttttgggttatttttgaagacctcttttaaaatttgcctaaaataaattctcggtatgct

SEQ ID NO: 301486 - DNA, 596 bp, Homo sapiens
cagctatgcaggggaggagggaaacaatgaggatcttcaacttagactgagaaaagcacactaatggacttaaaaaggcatgcggggattgggcttaattgtaaggaagcaaaaaaacgaaaataaaaaaatcttatttattacattctattagccccatggactttgcaaggcctgtgtccttcaaaaatgctgacattggtcgctgtgcccatcagaaactccgtgaagatgaagatggagcagctccagctgaaatagttatccagcctgagccagttcccaccccagcctttcctacgcccaccccagttctgacacatgtaagtgtttatattatccccattgctttctaatttttacccagtattctgagtcatttcagaaggaagattattcaggatatctagtacactctgatattagaattgaaagaaatataacctatctaaacctattcttacatcttcattgaatgacttacctatatttccatcttcaattttgtttacaaaacagtacattttcagttgaaatgttggaaaacacagaaatatccagaatcatgaataaaagacacttataataccatgaca

SEQ ID NO: 301487 - DNA, 214 bp, Homo sapiens
actgaggtccccccaaaggctcactgatgaaatttcttgccttaggtgtgcagaaggctattttggacaaccctctgtacctggaggatcatgtcagccatgccaatgcaatgacaaccttgacttctccatccctggcagctgtgacagcttgtctggctcctgtctgatatgtaaaccaggtacaacaggccggtactgtgagctctgtgct

SEQ ID NO: 301488 - DNA, 593 bp, Homo sapiens
gcacgagaaatgtttgtggtttggttttttttgtttttaatttccaaaagtggacacgaccaggaacatgaaagagaaaagcagctgatagatattttttaaaaattaatgatgactgtgtgttttctctaagatacaagatatgagtggctggtatctgactgaccttcctggccgcattcgagtggctccccagcaggacgacttggactcacctcagcagatcagcatcagtaacgcggaggcccggcaagccctgccgcacagctactactggagcgcgccggctccctatctgggaaacaaagtaagtccacgcttgcttcccgctattctgctttaactgactgatcgtgagaatgggttttagttggtaattcttttaaagaaagacaaaatcaaatacacactgaattggattgccagaaccagctaaatcacattgagttgggcgtttcttccatgttgcacaagaccttaaagagccacggcatccttaatatgcaactttgtatagctgatgttctatgtaaactttttgaatgggcaaataaattaatgaagccgctagtgtattttcgtaaagcaaatta

SEQ ID NO: 301489 - DNA, 1054 bp, Homo sapiens
atagccggacctgctgctgactatttgttgcttaaatgatgagagacatataatctccaccctcacggagttgtcatcaccctggagaggaagaagacagccaaaagagagaagtattgtcttgtagacttactagattcacatagtatcatccttctccagtgtgtaaggtgttgtctaaataggtccagttaaagaactacagggtagccatttttaaaaaaaaattttggccacgttttcaaattcacaggggagggggaatgtctcatactccagccctcctgagcctaggccctctgtgagatgtgtcaccatttcttggacaccatatgagacattccccctcggattagagatgctcaacctgcatcaacaaatctaaagcctgcatctggctaccctggggcgagtcctgtttacagtgcctattcctggagctcgcctctttttgccttttgtttgattatgtgatgtattacttttcccagcaggccagtgctagcatactggaagagggatttaataagctggcacccttgatgctatgctcctaatccaaccttatttgcctcattggccatttccattatggtggcagccctccattccagccacagcagcccctcagcgtcccccagtcacactgtccccattgctgctcatctgtgcctttgtccatctacaatgcccttatttcactctgcctgtgggagtcctgtgaatctctccaaagccaactcagttcatctttctgcttgaaaccttccctgaataggccaggtgcggtggctcacgcctgtaatcccagcactttgggaggccaaggcaggcggatcacaaggtcaggagatcgagaccatcctggctaacacagaccattctctactaaaaatgcaaaaaattagctgggtgtggtggcgggcgtgtgtcgtcccagctacttgtgaggctgaagcaggaaaatggcatgaacctgggaggtggagcatgcagccagccaagatcgggccgctgcactccagcctgggggacagagcgagactctgcctca

SEQ ID NO: 301490 - DNA, 3644 bp, Homo sapiens
agctgtggtcgtcatggaccggaagcgtgtgcggcgcgcctgccttgaggccagcatcagggaagggtgtcccaggtgcaggcgaagcttccttcaggtgctcctggaggacttttggctcgcaagcgcttctccattctcccaacgtctcgggcctgatgttatcatctccctatccttggctgcacctgaaaagagcaggagccggcaggtaacccgatcgcctcccccaggaggtgaagtgaaatctgcaagagtcctgctcgttcaaggcctgcatacaggaaagaagcaggggaaaagcgttagaaacagcttttgttctacagcattttaaaatataataggtatattgaaaagtctgattcagttacaatcagtgtatggaatcacaagaagatccataagaaacaaggtgctggatttctccgttgtgttcgtctttttccagtgccatcaaccacctcaaagacactggttatcagaggttggatttatgcaaacttgggccaaaggacagttagaagacagtagctgaagaagcatctgtagggaatccagaaggagcattcatgaagatgttacaagcccggaagcagcacatgagcactgagctgactattgagtcggaggcgccctcagacagcagtggcatcaacttgtcaggctttgggagtgagcagctagacaccaatgacgagagtgatgttagcagcgcactaagttacatcttgccttatctctcactgagaaatctaggtgcagaatcaatattgttaccgttcactgaacagctattttcaaatgtacaagatggagataggctcctgagtattttgaaaaacaatagaaagagcccctcacagtccagccttctaggtaacaaatttaaaaacaaaatatttgaaaaaaaaattagaaactgcgcaaccacaggaaaaccgcctggcaaagattcaaagtgtaggcaaaaacctgcagagagtgaacagagtcctcatgggcccaaggagcatccaggaaaggcacttcaaaaaggtgggaaagcacagcactaggaaagaacaggatgcccaggcatttgtggacaatgctgccaaaggaaaaaggcttgagggtccagccccaagggagctggaacagcctcacatagtgcaggggcctgagaaggtagtgggaaacaccatctacaccaagccttcattcacccaagagcataaggcagcagtctcctctgtgctgaaacccttctccatgggcgtgccttctgcctctagccctgcaaaagccctacctcaggtcagagacagatcgaaagacttagcctacaccattttaattttagaaatggcaatggctagagtgaaaaacatgaaggctgctaaaccaatcacacattccagaaaaaaatagcgcttttataaaactcactccattgtggcccacagaacacccaaggccaaaaagattagaaagtttagaaagggcagttatctcaacagaccgatgctcgcaaagaggccgctgttctctgcagcaaagagcctcatacattcgcaagggattttttcatccttaggagacctgagtcctcaagaaaaccctcttctggaagtagttgctccttcagaacgttttacagaaaacactaatgtaaaagacacaactaatgtaaaagacacaaaagagatgtgttcaaagacacatctctgaaaacacaaactacaatcatcctcctgaggcagtttccgctgggactgcattcaacttagaaccaactgttaaacaaactgagacaaaatgggaatacaacaatgtgggcattgacttgtcccctgagcccaaaagcttcaattacccattgctctcgtccccaggtgatcagcttgaaattcagctaaccgagcagctacggtccctcatccccaacgaggatgtgagaaagttcatgtctcatgttatctggaccttgaaaatggaatgttcagaaacacatgtgcaagggagctgtgccaagctcatgtcgcgaacaggcctcctgatgaagcttctcagcgagcagcaggaagcaaaggcattgaatgtagaatgggatacggaccaacaaaaaacaaattatattaatgagaacatggaacagaatgaacagaaagagcagaagtcaagtgagctcatgaaagaagttccaggatatgactataagaacaaactcatcttcgcaatatctgtgactgtcatactaataattttgattataattttttgttttatagaggtaaagacaataattaattcaggttttcaaaatacaatcctgtgtttgtgtggattcagaatccacaaactgaaaaccaacgtcactttcccacttgacattcttcttctgtcatttaaggctgaggtgtgctttgttcttttactgcaatgtatattccaggattgttaaaggatcctcgcttccaggaggtctctgtgaaataaaaccaagttaatcccactagactattttaagaagttaagttgatataatagcaaaatttctcccacccaaaactatgtcaacaattggatgtactcactgagtcaccccttactctgccactaatttatttccttgttgcttaaatgatgagagacatataatctccaccctcacggagttgtcatcaccctggagaggaagaagacagccaaaagagagaagtattgtcttgtagacttactagattcacatagtatcatccttctccagtgtgtaaggtgttgtctaaataggtccagttaaagaactacagggtagccatttttaaaaaaaaattttggccacgttttcaaattcacaggggagggggaatgtctcatactccagccctcctgagcctaggccctctgtgagatgtgtcaccatttcttggacaccatatgagacattccccctcggattagagatgctcaacctgcatcaacaaatctaaagcctgcatctggctaccctggggcgagtcctgtttacagtgcctattcctggagctcgcctctttttgccttttgtttgattatgtgatgtattacttttcccagcaggccagtgctagcatactggaagagggatttaataagctggcacccttgatgctatgctcctaatccaaccttatttgcctcattggccatttccattatggtggcagccctccattccagccacagcagcccctcagcgtcccccagtcacactgtccccattgctgctcatctgtgcctttgtccatctacaatgcccttatttcactctgcctgtgggagtcctgtgaatctctccaaagccaactcagttcatctttctgcttgaaaccttccctgaataggccaggtgcggtggctcacgcctgtaatcccagcactttgggaggccaaggcaggcggatcacaaggtcaggagatcgagaccatcctggctaacacagaccattctctactaaaaatgcaaaaaattagctgggtgtggtggcgggcgtgtgtcgtcccagctacttgtgaggctgaagcaggaaaatggcatgaacctgggaggtggagcatgcagccagccaagatcgggccgctgcactccagcctgggggacagagcgagactctgcctca

SEQ ID NO: 301491 - DNA, 3729 bp, Homo sapiens
agctgtggtcgtcatggaccggaagcgtgtgcggcgcgcctgccttgaggccagcatcagggaagggtgtcccaggtgcaggcgaagcttccttcaggtgctcctggaggacttttggctcgcaagcgcttctccattctcccaacgtctcgggcctgatgttatcatctccctatccttggctgcacctgaaaagagcaggagccggcaggtaacccgatcgcctcccccaggaggtgaagtgaaatctgcaagagtcctgctcgttcaaggcctgcatacaggaaagaagcaggggaaaagcgttagaaacagcttttgttctacagcattttaaaatataataggtatattgaaaagtctgattcagttacaatcagtgtatggaatcacaagaagatccataagaaacaaggtgctggatttctccgttgtgttcgtctttttccagtgccatcaaccacctcaaagacactggttatcagaggttggatttatgcaaacttgggccaaaggacagttagaagacagtagtaagtcttcagtccagggaccaaatcggcacaggaggacaagttgtggactgcagtcatttatttgataatgatttaccagacaactgaagaagcatctgtagggaatccagaaggagcattcatgaagatgttacaagcccggaagcagcacatgagcactgagctgactattgagtcggaggcgccctcagacagcagtggcatcaacttgtcaggctttgggagtgagcagctagacaccaatgacgagagtgatgttagcagcgcactaagttacatcttgccttatctctcactgagaaatctaggtgcagaatcaatattgttaccgttcactgaacagctattttcaaatgtacaagatggagataggctcctgagtattttgaaaaacaatagaaagagcccctcacagtccagccttctaggtaacaaatttaaaaacaaaatatttgaaaaaaaaattagaaactgcgcaaccacaggaaaaccgcctggcaaagattcaaagtgtaggcaaaaacctgcagagagtgaacagagtcctcatgggcccaaggagcatccaggaaaggcacttcaaaaaggtgggaaagcacagcactaggaaagaacaggatgcccaggcatttgtggacaatgctgccaaaggaaaaaggcttgagggtccagccccaagggagctggaacagcctcacatagtgcaggggcctgagaaggtagtgggaaacaccatctacaccaagccttcattcacccaagagcataaggcagcagtctcctctgtgctgaaacccttctccatgggcgtgccttctgcctctagccctgcaaaagccctacctcaggtcagagacagatcgaaagacttagcctacaccattttaattttagaaatggcaatggctagagtgaaaaacatgaaggctgctaaaccaatcacacattccagaaaaaaatagcgcttttataaaactcactccattgtggcccacagaacacccaaggccaaaaagattagaaagtttagaaagggcagttatctcaacagaccgatgctcgcaaagaggccgctgttctctgcagcaaagagcctcatacattcgcaagggattttttcatccttaggagacctgagtcctcaagaaaaccctcttctggaagtagttgctccttcagaacgttttacagaaaacactaatgtaaaagacacaactaatgtaaaagacacaaaagagatgtgttcaaagacacatctctgaaaacacaaactacaatcatcctcctgaggcagtttccgctgggactgcattcaacttagaaccaactgttaaacaaactgagacaaaatgggaatacaacaatgtgggcattgacttgtcccctgagcccaaaagcttcaattacccattgctctcgtccccaggtgatcagcttgaaattcagctaaccgagcagctacggtccctcatccccaacgaggatgtgagaaagttcatgtctcatgttatctggaccttgaaaatggaatgttcagaaacacatgtgcaagggagctgtgccaagctcatgtcgcgaacaggcctcctgatgaagcttctcagcgagcagcaggaagcaaaggcattgaatgtagaatgggatacggaccaacaaaaaacaaattatattaatgagaacatggaacagaatgaacagaaagagcagaagtcaagtgagctcatgaaagaagttccaggatatgactataagaacaaactcatcttcgcaatatctgtgactgtcatactaataattttgattataattttttgttttatagaggtaaagacaataattaattcaggttttcaaaatacaatcctgtgtttgtgtggattcagaatccacaaactgaaaaccaacgtcactttcccacttgacattcttcttctgtcatttaaggctgaggtgtgctttgttcttttactgcaatgtatattccaggattgttaaaggatcctcgcttccaggaggtctctgtgaaataaaaccaagttaatcccactagactattttaagaagttaagttgatataatagcaaaatttctcccacccaaaactatgtcaacaattggatgtactcactgagtcaccccttactctgccactaatttatttccttgttgcttaaatgatgagagacatataatctccaccctcacggagttgtcatcaccctggagaggaagaagacagccaaaagagagaagtattgtcttgtagacttactagattcacatagtatcatccttctccagtgtgtaaggtgttgtctaaataggtccagttaaagaactacagggtagccatttttaaaaaaaaattttggccacgttttcaaattcacaggggagggggaatgtctcatactccagccctcctgagcctaggccctctgtgagatgtgtcaccatttcttggacaccatatgagacattccccctcggattagagatgctcaacctgcatcaacaaatctaaagcctgcatctggctaccctggggcgagtcctgtttacagtgcctattcctggagctcgcctctttttgccttttgtttgattatgtgatgtattacttttcccagcaggccagtgctagcatactggaagagggatttaataagctggcacccttgatgctatgctcctaatccaaccttatttgcctcattggccatttccattatggtggcagccctccattccagccacagcagcccctcagcgtcccccagtcacactgtccccattgctgctcatctgtgcctttgtccatctacaatgcccttatttcactctgcctgtgggagtcctgtgaatctctccaaagccaactcagttcatctttctgcttgaaaccttccctgaataggccaggtgcggtggctcacgcctgtaatcccagcactttgggaggccaaggcaggcggatcacaaggtcaggagatcgagaccatcctggctaacacagaccattctctactaaaaatgcaaaaaattagctgggtgtggtggcgggcgtgtgtcgtcccagctacttgtgaggctgaagcaggaaaatggcatgaacctgggaggtggagcatgcagccagccaagatcgggccgctgcactccagcctgggggacagagcgagactctgcctca

SEQ ID NO: 301492 - DNA, 2731 bp, Homo sapiens
agctgtggtcgtcatggaccggaagcgtgtgcggcgcgcctgccttgaggccagcatcagggaagggtgtcccaggtgcaggcgaagcttccttcaggtgctcctggaggacttttggctcgcaagcgcttctccattctcccaacgtctcgggcctgatgttatcatctccctatccttggctgcacctgaaaagagcaggagccggcaggtaacccgatcgcctcccccaggaggtgaagtgaaatctgcaagagtcctgctcgttcaaggcctgcatacaggaaagaagcaggggaaaagcgttagaaacagcttttgttctacagcattttaaaatataataggtatattgaaaagtctgattcagttacaatcagtgtatggaatcacaagaagatccataagaaacaaggtgctggatttctccgttgtgttcgtctttttccagtgccatcaaccacctcaaagacactggttatcagaggttggatttatgcaaacttgggccaaaggacagttagaagacagtagtaagtcttcagtccagggaccaaatcggcacaggaggacaagttgtggactgcagtcatttatttgataatgatttaccagacaactgaagaagcatctgtagggaatccagaaggagcattcatgaagatgttacaagcccggaagcagcacatgagcactgagctgactattgagtcggaggcgccctcagacagcagtggcatcaacttgtcaggctttgggagtgagcagctagacaccaatgacgagagtgatgttagcagcgcactaagttacatcttgccttatctctcactgagaaatctaggtgcagaatcaatattgttaccgttcactgaacagctattttcaaatgtacaagatggagataggctcctgagtattttgaaaaacaatagaaagagcccctcacagtccagccttctaggtgatcagcttgaaattcagctaaccgagcagctacggtccctcatccccaacgaggatgtgagaaagttcatgtctcatgttatctggaccttgaaaatggaatgttcagaaacacatgtgcaagggagctgtgccaagctcatgtcgcgaacaggcctcctgatgaagcttctcagcgagcagcaggaagcaaaggcattgaatgtagaatgggatacggaccaacaaaaaacaaattatattaatgagaacatggaacagaatgaacagaaagagcagaagtcaagtgagctcatgaaagaagttccaggatatgactataagaacaaactcatcttcgcaatatctgtgactgtcatactaataattttgattataattttttgttttatagaggtaaagacaataattaattcaggttttcaaaatacaatcctgtgtttgtgtggattcagaatccacaaactgaaaaccaacgtcactttcccacttgacattcttcttctgtcatttaaggctgaggtgtgctttgttcttttactgcaatgtatattccaggattgttaaaggatcctcgcttccaggaggtctctgtgaaataaaaccaagttaatcccactagactattttaagaagttaagttgatataatagcaaaatttctcccacccaaaactatgtcaacaattggatgtactcactgagtcaccccttactctgccactaatttatttccttgttgcttaaatgatgagagacatataatctccaccctcacggagttgtcatcaccctggagaggaagaagacagccaaaagagagaagtattgtcttgtagacttactagattcacatagtatcatccttctccagtgtgtaaggtgttgtctaaataggtccagttaaagaactacagggtagccatttttaaaaaaaaattttggccacgttttcaaattcacaggggagggggaatgtctcatactccagccctcctgagcctaggccctctgtgagatgtgtcaccatttcttggacaccatatgagacattccccctcggattagagatgctcaacctgcatcaacaaatctaaagcctgcatctggctaccctggggcgagtcctgtttacagtgcctattcctggagctcgcctctttttgccttttgtttgattatgtgatgtattacttttcccagcaggccagtgctagcatactggaagagggatttaataagctggcacccttgatgctatgctcctaatccaaccttatttgcctcattggccatttccattatggtggcagccctccattccagccacagcagcccctcagcgtcccccagtcacactgtccccattgctgctcatctgtgcctttgtccatctacaatgcccttatttcactctgcctgtgggagtcctgtgaatctctccaaagccaactcagttcatctttctgcttgaaaccttccctgaataggccaggtgcggtggctcacgcctgtaatcccagcactttgggaggccaaggcaggcggatcacaaggtcaggagatcgagaccatcctggctaacacagaccattctctactaaaaatgcaaaaaattagctgggtgtggtggcgggcgtgtgtcgtcccagctacttgtgaggctgaagcaggaaaatggcatgaacctgggaggtggagcatgcagccagccaagatcgggccgctgcactccagcctgggggacagagcgagactctgcctca

SEQ ID NO: 301493 - DNA, 2115 bp, Homo sapiens
gcagccattttcatttttaggtatattgaaaagtctgattcagttacaatcagtgtatggaatcacaagaagatccataagaaacaaggtgctggatttctccgttgtgttcgtctttttccagtgccatcaaccacctcaaagacactggttatcagaggttggatttatgcaaacttgggccaaaggacagttagaagacagtagctgaagaagcatctgtagggaatccagaaggagcattcatgaagatgttacaagcccggaagcagcacatgagcactgagctgactattgagtcggaggcgccctcagacagcagtggcatcaacttgtcaggctttgggagtgatcagcttgaaattcagctaaccgagcagctacggtccctcatccccaacgaggatgtgagaaagttcatgtctcatgttatctggaccttgaaaatggaatgttcagaaacacatgtgcaagggagctgtgccaagctcatgtcgcgaacaggcctcctgatgaagcttctcagcgagcagcaggaagcaaaggcattgaatgtagaatgggatacggaccaacaaaaaacaaattatattaatgagaacatggaacagaatgaacagaaagagcagaagtcaagtgagctcatgaaagaagttccaggatatgactataagaacaaactcatcttcgcaatatctgtgactgtcatactaataattttgattataattttttgttttatagaggtaaagacaataattaattcaggttttcaaaatacaatcctgtgtttgtgtggattcagaatccacaaactgaaaaccaacgtcactttcccacttgacattcttcttctgtcatttaaggctgaggtgtgctttgttcttttactgcaatgtatattccaggattgttaaaggatcctcgcttccaggaggtctctgtgaaataaaaccaagttaatcccactagactattttaagaagttaagttgatataatagcaaaatttctcccacccaaaactatgtcaacaattggatgtactcactgagtcaccccttactctgccactaatttatttccttgttgcttaaatgatgagagacatataatctccaccctcacggagttgtcatcaccctggagaggaagaagacagccaaaagagagaagtattgtcttgtagacttactagattcacatagtatcatccttctccagtgtgtaaggtgttgtctaaataggtccagttaaagaactacagggtagccatttttaaaaaaaaattttggccacgttttcaaattcacaggggagggggaatgtctcatactccagccctcctgagcctaggccctctgtgagatgtgtcaccatttcttggacaccatatgagacattccccctcggattagagatgctcaacctgcatcaacaaatctaaagcctgcatctggctaccctggggcgagtcctgtttacagtgcctattcctggagctcgcctctttttgccttttgtttgattatgtgatgtattacttttcccagcaggccagtgctagcatactggaagagggatttaataagctggcacccttgatgctatgctcctaatccaaccttatttgcctcattggccatttccattatggtggcagccctccattccagccacagcagcccctcagcgtcccccagtcacactgtccccattgctgctcatctgtgcctttgtccatctacaatgcccttatttcactctgcctgtgggagtcctgtgaatctctccaaagccaactcagttcatctttctgcttgaaaccttccctgaataggccaggtgcggtggctcacgcctgtaatcccagcactttgggaggccaaggcaggcggatcacaaggtcaggagatcgagaccatcctggctaacacagaccattctctactaaaaatgcaaaaaattagctgggtgtggtggcgggcgtgtgtcgtcccagctacttgtgaggctgaagcaggaaaatggcatgaacctgggaggtggagcatgcagccagccaagatcgggccgctgcactccagcctgggggacagagcgagactctgcctca

SEQ ID NO: 301494 - DNA, 2611 bp, Homo sapiens
agctgtggtcgtcatggaccggaagcgtgtgcggcgcgcctgccttgaggccagcatcagggaagggtgtcccaggtgcaggcgaagcttccttcaggtgctcctggaggacttttggctcgcaagcgcttctccattctcccaacgtctcgggcctgatgttatcatctccctatccttggctgcacctgaaaagagcaggagccggcaggtaacccgatcgcctcccccaggaggtgaagtgaaatctgcaagagtcctgctcgttcaaggcctgcatacaggaaagaagcaggggaaaagcgttagaaacagcttttgttctacagcattttaaaatataataggtatattgaaaagtctgattcagttacaatcagtgtatggaatcacaagaagatccataagaaacaaggtgctggatttctccgttgtgttcgtctttttccagtgccatcaaccacctcaaagacactggttatcagaggttggatttatgcaaacttgggccaaaggacagttagaagacagtagtaagtcttcagtccagggaccaaatcggcacaggaggacaagttgtggactgcagtcatttatttgataatgatttaccagacaactgaagaagcatctgtagggaatccagaaggagcattcatgaagatgttacaagcccggaagcagcacatgagcactgagctgactattgagtcggaggcgccctcagacagcagtggcatcaacttgtcaggctttgggagtgagcagctagacaccaatgacgagagtgatgttagcagcgcactaagttacatcttgccttatctctcactgagaaatctaggtgatcagcttgaaattcagctaaccgagcagctacggtccctcatccccaacgaggatgtgagaaagttcatgtctcatgttatctggaccttgaaaatggaatgttcagaaacacatgtgcaagggagctgtgccaagctcatgtcgcgaacaggcctcctgatgaagcttctcagcgagcagcaggaagcaaaggcattgaatgtagaatgggatacggaccaacaaaaaacaaattatattaatgagaacatggaacagaatgaacagaaagagcagaagtcaagtgagctcatgaaagaagttccaggatatgactataagaacaaactcatcttcgcaatatctgtgactgtcatactaataattttgattataattttttgttttatagaggtaaagacaataattaattcaggttttcaaaatacaatcctgtgtttgtgtggattcagaatccacaaactgaaaaccaacgtcactttcccacttgacattcttcttctgtcatttaaggctgaggtgtgctttgttcttttactgcaatgtatattccaggattgttaaaggatcctcgcttccaggaggtctctgtgaaataaaaccaagttaatcccactagactattttaagaagttaagttgatataatagcaaaatttctcccacccaaaactatgtcaacaattggatgtactcactgagtcaccccttactctgccactaatttatttccttgttgcttaaatgatgagagacatataatctccaccctcacggagttgtcatcaccctggagaggaagaagacagccaaaagagagaagtattgtcttgtagacttactagattcacatagtatcatccttctccagtgtgtaaggtgttgtctaaataggtccagttaaagaactacagggtagccatttttaaaaaaaaattttggccacgttttcaaattcacaggggagggggaatgtctcatactccagccctcctgagcctaggccctctgtgagatgtgtcaccatttcttggacaccatatgagacattccccctcggattagagatgctcaacctgcatcaacaaatctaaagcctgcatctggctaccctggggcgagtcctgtttacagtgcctattcctggagctcgcctctttttgccttttgtttgattatgtgatgtattacttttcccagcaggccagtgctagcatactggaagagggatttaataagctggcacccttgatgctatgctcctaatccaaccttatttgcctcattggccatttccattatggtggcagccctccattccagccacagcagcccctcagcgtcccccagtcacactgtccccattgctgctcatctgtgcctttgtccatctacaatgcccttatttcactctgcctgtgggagtcctgtgaatctctccaaagccaactcagttcatctttctgcttgaaaccttccctgaataggccaggtgcggtggctcacgcctgtaatcccagcactttgggaggccaaggcaggcggatcacaaggtcaggagatcgagaccatcctggctaacacagaccattctctactaaaaatgcaaaaaattagctgggtgtggtggcgggcgtgtgtcgtcccagctacttgtgaggctgaagcaggaaaatggcatgaacctgggaggtggagcatgcagccagccaagatcgggccgctgcactccagcctgggggacagagcgagactctgcctca

SEQ ID NO: 301495 - DNA, 2008 bp, Homo sapiens
ggctatctagaggatccctatcagccccttcatgccacttcctacttcctagcccttttatcaactcctagcaatagttaaatgagagacacatctagatgggatgaaagcactcgatatgttcatgtccagggccttcatgccatgcccaacacacctctccctgggcctcctggctctctccctcaggtcttaacctggaggaccccccacgagcacagtcctggctttggtagggagcgcaggggcatgaaagcactcgacatgaattcatgtcggtccctcatccccaacgaggatgtgagaaagttcatgtctcatgttatctggaccttgaaaatggaatgttcagaaacacatgtgcaagggagctgtgccaagctcatgtcgcgaacaggcctcctgatgaagcttctcagcgagcagcaggaagcaaaggcattgaatgtagaatgggatacggaccaacaaaaaacaaattatattaatgagaacatggaacagaatgaacagaaagagcagaagtcaagtgagctcatgaaagaagttccaggatatgactataagaacaaactcatcttcgcaatatctgtgactgtcatactaataattttgattataattttttgttttatagaggtaaagacaataattaattcaggttttcaaaatacaatcctgtgtttgtgtggattcagaatccacaaactgaaaaccaacgtcactttcccacttgacattcttcttctgtcatttaaggctgaggtgtgctttgttcttttactgcaatgtatattccaggattgttaaaggatcctcgcttccaggaggtctctgtgaaataaaaccaagttaatcccactagactattttaagaagttaagttgatataatagcaaaatttctcccacccaaaactatgtcaacaattggatgtactcactgagtcaccccttactctgccactaatttatttccttgttgcttaaatgatgagagacatataatctccaccctcacggagttgtcatcaccctggagaggaagaagacagccaaaagagagaagtattgtcttgtagacttactagattcacatagtatcatccttctccagtgtgtaaggtgttgtctaaataggtccagttaaagaactacagggtagccatttttaaaaaaaaattttggccacgttttcaaattcacaggggagggggaatgtctcatactccagccctcctgagcctaggccctctgtgagatgtgtcaccatttcttggacaccatatgagacattccccctcggattagagatgctcaacctgcatcaacaaatctaaagcctgcatctggctaccctggggcgagtcctgtttacagtgcctattcctggagctcgcctctttttgccttttgtttgattatgtgatgtattacttttcccagcaggccagtgctagcatactggaagagggatttaataagctggcacccttgatgctatgctcctaatccaaccttatttgcctcattggccatttccattatggtggcagccctccattccagccacagcagcccctcagcgtcccccagtcacactgtccccattgctgctcatctgtgcctttgtccatctacaatgcccttatttcactctgcctgtgggagtcctgtgaatctctccaaagccaactcagttcatctttctgcttgaaaccttccctgaataggccaggtgcggtggctcacgcctgtaatcccagcactttgggaggccaaggcaggcggatcacaaggtcaggagatcgagaccatcctggctaacacagaccattctctactaaaaatgcaaaaaattagctgggtgtggtggcgggcgtgtgtcgtcccagctacttgtgaggctgaagcaggaaaatggcatgaacctgggaggtggagcatgcagccagccaagatcgggccgctgcactccagcctgggggacagagcgagactctgcctca

SEQ ID NO: 301496 - DNA, 2759 bp, Homo sapiens
  misc_feature (1700)..(1700): n is a, c, g, or t
  misc_feature (1904)..(1904): n is a, c, g, or t
  misc_feature (1923)..(1923): n is a, c, g, or t
  misc_feature (2069)..(2069): n is a, c, g, or t
  misc_feature (2075)..(2075): n is a, c, g, or t
agctgtggtcgtcatggaccggaagcgtgtgcggcgcgcctgccttgaggccagcatcagggaagggtgtcccaggtgcaggcgaagcttccttcaggtgctcctggaggacttttggctcgcaagcgcttctccattctcccaacgtctcgggcctgatgttatcatctccctatccttggctgcacctgaaaagagcaggagccggcaggtaacccgatcgcctcccccaggaggtgaagtgaaatctgcaagagtcctgctcgttcaaggcctgcatacaggaaagaagcaggggaaaagcgttagaaacagcttttgttctacagcattttaaaatataataggtatattgaaaagtctgattcagttacaatcagtgtatggaatcacaagaagatccataagaaacaaggtgctggatttctccgttgtgttcgtctttttccagtgccatcaaccacctcaaagacactggttatcagaggttggatttatgcaaacttgggccaaaggacagttagaagacagtaggtgccgtgctgggcagtgaatgaatgaaccttgccctggggttaacactccagtgggatgaacagacaaaccccacaagcactgcatacgatgagaaaagttggagctggagaaagaccgtgttcctcgtgttctgtgagacctgggaaggctgctaaaacccagggagcaggagttctcctccctccatccttatccacagtctgggtcccatccagaccctcctctccaaaccgggggtttgcgacaaagcaggtgagggaggcatttcattccagagcagaagaaggggtttcctcccccatcccactcccgtttcatttttaaggggaaaagcagctccccatacggtgaggcaatgaggcggaccagcaggttcccggggatctctgcagccccgttgccataacaaccgaactcactcgcagcctctgataggggagtcagctgggaccacagcttgggcaggaaagggatgagggagtaggaaagaaacttcaagatcaaccactggccctcacaccgagctgcgcacaccccaaggccaagggaggctggaaacccttgtcatccttgggaaatgggggagggcactggtacccctgggacctccctcctgaatctgggcagctttaaacattttttttccaactttggaagacagttgtacaacctcgaaggagaggaggtgtcacgattcacaaagcgtatggatcacacatggctctaggggacattctctttgctctgttttattttgagatagggtcttgctctattgcccaggctggagtccagtggcatgatcacaccttactgcagcctcaaattactggactgaggtgatcctcctgcctcagccatgtgagtagctgggactacagacatgcaccaccacacctggctaatttttaaaatatatatgtttttgtagagatagggtcctgctacattgcccaggctggtctcaaactcctggcttcaagtgatcctcctgctttggcctcccaaagtgttgggattataggcatgagccactgcatccagcatcatttcttttcattattattatgattattattttgagatggagtctcgctctgtcacccaggctgtagtggagtggtgtgacctcagctcactgcaacctccacctcccgggttcnagtgattctcctgcctcagcctcctgaggaggtgcgattacaggtaccctccacaatgcctggctaatttttttttctttttgagacggagtcttcctctgtctcccaggctggagtgcaatggcgcgatctcagctcactggaacctctgcttcccaggttcaagcaattcttctgcctcagcttcctgagtagctgggactncaggcaggcgcccaccacncctgactaatttttgtatttttagtagagacggggtttcaccatattggctggtctcaaactcctgaccttataatccgcccacctcggcctccaaagtgctgggattacaggcgtaagccaccgtccctggcctaacctggctantttttntatttttagtagagacggggcttcaccatgttggcaaggcaagtctcgaacttatgacctcaagtgatctgctcaccttggcctcccaaagtgctgggattacaggcgtgagccactgcacccagcctaattttttttttttttttaatgaagacagggtctcactacattacccaggctggtctcgagctcctggcctcaagcgatcctcccatctcagcctcctgagtagcttggattacaggcacaagccatcatgactggcttcctcttttttttttttttaatgaatatggtaaagtgcacaaatcataaatttcagcgtggtgaatttctacacatgtatacccatgtatccaccatgcagaccagaagaacatatttgtccctccaggaaattcccaaatgctctttctcagtcaatatcctccaatttgacattttcatcatagattagttttgcctacccctgaactttgtgtaagtggaaatacatggtttggcatcttgcttttatgcaacattgtatctgtgagaatctattgtcatgtctgttttcctgttctttttctttgttgtataatattccattgtggagatgtatcacaatgtatttatcttactgctgatagatatttgagttgtttgcagtgaatggttattgtagataaagcagctatgaac

SEQ ID NO: 301497 - DNA, 2820 bp, Homo sapiens
agctgtggtcgtcatggaccggaagcgtgtgcggcgcgcctgccttgaggccagcatcagggaagggtgtcccaggtgcaggcgaagcttccttcaggtgctcctggaggacttttggctcgcaagcgcttctccattctcccaacgtctcgggcctgatgttatcatctccctatccttggctgcacctgaaaagagcaggagccggcaggtaacccgatcgcctcccccaggaggtgaagtgaaatctgcaagagtcctgctcgttcaaggcctgcatacaggaaagaagcaggggaaaagcgttagaaacagcttttgttctacagcattttaaaatataataggtatattgaaaagtctgattcagttacaatcagtgtatggaatcacaagaagatccataagaaacaaggtgctggatttctccgttgtgttcgtctttttccagtgccatcaaccacctcaaagacactggttatcagaggttggatttatgcaaacttgggccaaaggacagttagaagacagtagctgaagaagcatctgtagggaatccagaaggagcattcatgaagatgttacaagcccggaagcagcacatgagcactgagctgactattgagtcggaggcgccctcagacagcagtggcatcaacttgtcaggctttgggagtgagcagctagacaccaatgacgagagtgatgttagcagcgcactaagttacatcttgccttatctctcactgagaaatctaggtgcagaatcaatattgttaccgttcactgaacagctattttcaaatgtacaagatggagataggctcctgagtattttgaaaaacaatagaaagagcccctcacagtccagccttctaggtaacaaatttaaaaacaaaatatttgaaaaaaaaattagaaactgcgcaaccacaggaaaaccgcctggcaaagattcaaagtgtaggcaaaaacctgcagagagtgaacagagtcctcatgggcccaaggagcatccaggaaaggcacttcaaaaaggtgggaaagcacagcactaggaaagaacaggatgcccaggcatttgtggacaatgctgccaaaggaaaaaggcttgagggtccagccccaagggagctggaacagcctcacatagtgcaggggcctgagaaggtagtgggaaacaccatctacaccaagccttcattcacccaagagcataaggcagcagtctcctctgtgctgaaacccttctccatgggcgtgccttctgcctctagccctgcaaaagccctacctcaggtcagagacagatcgaaagacttagcctacaccattttaattttagaaatggcaatggctagagtgaaaaacatgaaggctgctaaaccaatcacacattccagaaaaaaatagcgcttttataaaactcactccattgtggcccacagaacacccaaggccaaaaagattagaaagtttagaaagggcagttatctcaacagaccgatgctcgcaaagaggccgctgttctctgcagcaaagagcctcatacattcgcaagggattttttcatccttaggagacctgagtcctcaagaaaaccctcttctggaagtagttgctccttcagaacgttttacagaaaacactaatgtaaaagacacaactaatgtaaaagacacaaaagagatgtgttcaaagacacatctctgaaaacacaaactacaatcatcctcctgaggcagtttccgctgggactgcattcaacttagaaccaactgttaaacaaactgagacaaaatgggaatacaacaatgtgggcattgacttgtcccctgagcccaaaagcttcaattacccattgctctcgtccccaggtgatcagcttgaaattcagctaaccgagcagctacggtccctcatccccaacgaggatgtgagaaagttcatgtctcatgttatctggaccttgaaaatggaatgttcagaaacacatgtgcaagggagctgtgccaagctcatgtcgcgaacaggcctcctgatgaagcttctcagcgagcagcaggaagcaaaggcattgaatgtagaatgggatacggaccaacaaaaaacaaattatattaatgagaacatggaacagaatgaacagaaagagcagaagtcaagtgagctcatgaaagaagttccaggatatgactataagaacaaactcatcttcgcaatatctgtgactgtcatactaataattttgattataattttttgttttatagaggtaaagacaataattaattcaggttttcaaaatacaatcctgtgtttgtgtggattcagaatccacaaactgaaaaccaacgtcactttcccacttgacattcttcttctgtcatttaaggctgaggtgtgctttgttcttttactgcaatgtatattccaggattgttaaaggatcctcgcttccaggaggtctctgtgaaataaaaccaagttaatcccactaaaaaaaaaaaaaaaaaaaaaaaaaaaaaaaaaaaaattgggggggggcctgcggacctccaggagaaaaagtttctctaacacacccatcggctcggggcggggcgggggcaccccagatgggtcagtcgcgacaaagtggggccacaacgcggctggctcccaagaaaaaacccggggcccacgacacgggcgggcgggttcctcccaccattaaaaaagccgccgcgggacacgagaccggtcggcaaccaatcccaaagaggggtcggagggccagagggccctctccaaagggggctccaggagccgaataatgca

SEQ ID NO: 301498 - DNA, 848 bp, Homo sapiens
ccgatgctcgcaaagaggccgctgttctctgcagcaaagagcctcatacattcgcaagggattttttcatccttaggagacctgagtcctcaagaaaaccctcttctggaagtagttgctccttcagaacgttttacagaaaacactaatgtaaaagacacaactaatgtaaaagacacaaaagagatgtgttcaaagacacatctctgaaaacacaaactacaatcatcctcctgaggcagtttccgctgggactgcattcaacttagaaccaactgttaaacaaactgagacaaaatgggaatacaacaatgtgggcattgacttgtcccctgagcccaaaagcttcaattacccattgctctcgtccccaggtgatcagcttgaaattcagctaaccgagcagctacggtccctcatccccaacgaggatgtgagaaagttcatgtctcatgttatctggaccttgaaaatggaatgttcagaaacacatgtgcaagggagctgtgccaagctcatgtcgcgaacaggcctcctgatgaagcttctcagcgagcagcaggaagcaaaggcattgaatgtagaatgggatacggaccaacaaaaaacaaattatattaatgagaacatggaacagaatgaacagaaagagcagaagtcaagtgaggtgaggagcacacagaaacatgagacccagatttcccatcatttagcatatgccaggaaagtgcccacataggagaacctgggactcccaggccatagcttgtcttggccatgtaactttggccatgacagtgatctcccactttgctcatgtagacagtgaaatagattagggcacaaga

SEQ ID NO: 301499 - DNA, 786 bp, Homo sapiens
cttactctgtgtgactggggcatacagctatggactgagtatgaaagatgatcaaagatatttcatgatcaaagcagtctcttcttttctgacagctgaagaagcatctgtagggaatccagaaggagcattcatgaagatgttacaagcccggaagcagcacatgagcactgagctgactattgagtcggaggcgccctcagacagcagtggcatcaacttgtcaggctttgggagtgagcagctagacaccaatgacgagagtgatgttagcagcgcactaagttacatcttgccttatctctcactgagaaatctaggtgcagaatcaatattgttaccgttcactgaacagctattttcaaatgtacaagatggagataggctcctgagtattttgaaaaacaatagaaagagcccctcacagtccagccttctaggtaacaaatttaaaaacaaaatatttgaaaaaaaaattagaaactgcgcaaccacaggaaaaccgcctggcaaagattcaaagtgtaggcaaaaacctgcagagagtgaacagagtcctcatgggcccaaggagcatccaggaaaggcacttcaaaaaggtgggaaagcacagcactaggaaagaacaggatgcccaggcatttgtggacaatgctgccaaaggaaaaaggcttgagggtccagccccaagggagctggaacagcctcacatagtgcaggggcctgagaaggtagtgggaaacaccatctacaccaagccttcattcacccaagagcataaggcag

SEQ ID NO: 301500 - DNA, 413 bp, Homo sapiens
atttaattagcaatactttagactaaaactttgacctcttaatgtcattgaaatagagctaggattctactgacatcattatgttattatattatctttttgcatgagttgatgccatgttactaattggctgtgatagagcctttacgtacttgcaggtatatccacagacaagtacagtaatgcttctccctgcactgcttgtctgcaggaggtgaagtgaaatctgcaagagtcctgctcgttcaaggcctgcatacaggaaagaagcaggggaaaagcgttagaaacagcttttgttctacagcattttaaaatataataggtaggtcaaatttttggtctgtcagccttgacactatcccttgaaagtaggtcatgtcattgaaatgtatttaaaatgtgactgtgat

SEQ ID NO: 301501 - DNA, 2155 bp, Homo sapiens
gccgctcagagaaaatacaagcccgttttccctagctgtgccatttggtgctctgccaggctgccgtgcaagggaataccgacgagacgagctgcactgtctctgatttggagccctcaccggagcttgtctttaaaaatgagcaggaagctcatgtatgtttgcatttcagtgagccgggtcctgacctgccgccacccatcacggtcagcgtggtgcatcttaccgaggaggcgcaggcctggattcttttgagtggtgctactgcctaggaagtaacacgtggagaatttccatcttgggaccatgcacacagtgccttggggagtagattttgccctaatagcgatgaagaattttatcagtcagtggagttcctttttcagatcagggatgggaaagagccaaactgggtacctcccacgtgtgccccgtgaacagccctttgcagctgggctgtggggcttggctgctgccctgtcccatctggcagttaacgccttctccctgctctgccccccactccccaaaaccagttgcagcctcaacccacatggggatgtagaaagccgtaaagtccacgctactgttgaaaatgtttacatctccgctctcaacctgccttgggttcgtgttaaatggtgttaaattctgcaaatggaggggaaaaaaatcaaattctaaatttcaaagtagaatttaaagcaaatttgtaaaaaaattatcctaccaccccttttggtccacttaagatatgccacgctgaagcaaggtatttcctactggattttgctttcactggtgtttagaaaataaacttgatttctctaggagcactcctttggttagagggatgcaagaaggagaggtgaaggtggcgtgtggtggctcatgcctgtaatcccagcactttggggaggccgaggcaggcggatcacttgaggccagcagtttgagaccagcctggccaacatgatgaaaccccatctctactaaaaatacaaaaaattagctgggcatggtggcaggcacctgtaatcccagttacttgggaggctgaggcaggagaattgcttgaacccaggaggtggaggttgcagtgagctgagattgtgccactgcacttcagcctgggcgacagagtgactctgtcaaaaaggaaaggcaaaaaccggaccctggagctctgtgggccctgattgcaggcccctccctgtgtgatgagggatgagtcagcttggggagccacttggccagcctgcatgcctggtcatcaggaggttgagaaaagccttgaaagttgtgaagcactgagcagatacaagtgtttgttaattttgtagaaattaactttcccatctggcctttatctccaaagttggtattgttgctccacgcagactgcagtccggtttcttattgtgactttgacaatgcaaagtgcaaaataggaagaggcctccccaccccactatcccaccctggtgaccaattcagtgtaaccattgcacgtactcagtcattggtgtctttggagtgacatctgcagccagttagtgccacctgagtacagcactcgtacttttacatgatgtgtgtgtgagtagctcttctgtccaaaccatgatttgaggttcaactacctgtagatcaaagctttattttagaacgataaactgattttttccaaatgggtgaaatcttctccccatgactatgttttcttaactttgcattgaatctatttactgggttacattctatgtgtagtttgctttcttcatttttttttcttttaaaatgctcatgtcttattccaagcaccttcctccaaagtccccataaagctgcatctccaacacattgttatgccaataaggttttatttaactttatttaaggatgattgtgtctttgaatgacaaatgtactgctgcttcctacctgcaagacgcacaatgtatgtttcaagggtgagcaagtgttatttcttaaatttctcaaatgcctgtagtaactattgtttctgcctctcaattgttgccagctctttgaagaaggggagaattgtgtgtttttgtgtggggatgtttctgatatgctgctacagttgcaaaacactggagctagagaaaataaagtactgatcttcgaa

SEQ ID NO: 301502 - DNA, 482 bp, Homo sapiens
tgaggaggaacaagaggccccatatctgaatgaccgttcccgaggaggcgggccctgcaagcagcagtgccgagactgggttacattctatgtgtagtttgctttcttcatttttttttcttttaaaatgctcatgtcttattccaagcaccttcctccaaagtccccataaagctgcatctccaacacattgttatgccaataaggttttatttaactttatttaaggatgattgtgtctttgaatgacaaatgtactgctgcttcctacctgcaagacgcacaatgtatgtttcaagggtgagcaagtgttatttcttaaatttctcaaatgcctgtagtaactattgtttctgcctctcaattgttgccagctctttgaagaaggggagaattgtgtgtttttgtgtggggatgtttctgatatgctgctacagttgcaaaacactggagctagagaaaataaagtactgatcttcgaa

SEQ ID NO: 301503 - DNA, 1753 bp, Homo sapiens
gtaactgaaatagcacgaaaagtaaccttgtgtgactttataaccttattaaacattttgcccatttgcctctggagtcaagatcttaatctcattcagaagactgagtggacaaggatttggtatgcatagatggaggcactggcaaccggagaggtcccagggctgcataacactaagtagctcatagtgactcaacattggaacttggtataacttgtctatgattaaagccattccagtgataccacagtgatatagtggtaccacaaagtagttttagttttgtttcactgaaaaataatgaatgtcagcatcttttcatatgattaatgaacagagtatcttcttttgtgaaatacctgttcaagtgttttgcctgtttttctactgtgttgtctaccttttccttattgatatgcgagatttcctgtcttgttgaatataaaatgtatacacagctttcttcctccttctctgtccacgtagtcatgcccgattcctctttgccttctggcatgattgttcaagatggtggataggagacagggctgacctgcagctcttaacttggatggacagaacagcatgtggagactcacactgtggacttcttgctccaggaaccaccacaggagtgtactagaaaaactgaaagaattcacagatgctttgaaagaagcagcaggctgctgcaaattctgtgagaccggcagaaatctctggtgctctctcaaaactgccaccttctggctggaggccaaccacaatattacagcaactcatgacagaatagccctgcttcaaggtaggagaaaacaatagctaattccactgcctgcaacatcctgggcaaccagtggtcctgagtctctccatgtgacaacactgctagcataaccagcatctgagaaagccagcacactaaacatatctacatccaaggactctcacagagtctacttcactcccgtaccatctccaccagaacaggtgctggtatccacagctgggagacctgaagacagattgtatcacaggactctatgcagacatttgcaagtaccagctcagagtctggtagccccacggggtggttaggcccagtagagcaataacaatcactgcagtgtggcttgctggaagccccatccctaacggggagtgcatcacatcaagggaccaccaacgtggtacaaaagaatctgaacaacagcccttgagttccagatttttccactgaaatagtctacccaaatgagaaggaatcagaaaagtaattctggtaatatgacaaggtaataaaacaaggttctataacatccccaaaagaccacactagctccccagcaatgggtccaaatcaagaagaagtctctgaattgcgaaataaataactcagaaggttgattattaagctactcagggagataccagggaaaggtgaaaaccaacttaaagaaattaaaaaaaaatacaagatatggatgaaaaatgctccagaagatatttactccagagaagtaaatatcgtagagataatgtttattctagagaataaataaatattgtattccagagaaataaatatcataaagaaaaaaagaatcacaacttctggaaatgaaaaacacacttagagaaatgcagtatgcactggaattcccacaatagactagaacaaatagaagaaagaacttcagagctcaaagataaggcttacaaattaacccaatcagacaaagacagagca

SEQ ID NO: 301504 - DNA, 1699 bp, Homo sapiens
gtaactgaaatagcacgaaaagtaaccttgtgtgactttataaccttattaaacattttgcccatttgcctctggagtcaagatcttaatctcattcagaagactgagtggacaaggatttggtatgcatagatggaggcactggcaaccggagaggtcccagggctgcataacactaagtagctcatagtgactcaacattggaacttggtataacttgtctatgattaaagccattccagtgataccacagtgatatagtggtaccacaaagtagttttagttttgtttcactgaaaaataatgaatgtcagcatcttttcatatgattaatgaacagagtatcttcttttgtgaaatacctgttcaagtgttttgcctgtttttctactgtgttgtctaccttttccttattgatatgcgagatttcctgtcttgttgaatataaaatgtatacacagctttcttcctccttctctgtccacgtagtcatgcccgattcctctttgccttctggcatgattgttcaagatggtggataggagacagggctgacctgcagctcttaacttggatggacagaacagcatgtggagactcacactgtggacttcttgctccaggaaccaccacaggagtgtactagaaaaactgaaagaattcacagatgctttgaaagaagcagcaggctgctgcaaattctgtgagaccggcagaaatctctggtgctctctcaaaactgccaccttctggctggaggccaaccacaatattacagcaactcatgacagaatagccctgcttcaaggtaggagatctctccatgtgacaacactgctagcataaccagcatctgagaaagccagcacactaaacatatctacatccaaggactctcacagagtctacttcactcccgtaccatctccaccagaacaggtgctggtatccacagctgggagacctgaagacagattgtatcacaggactctatgcagacatttgcaagtaccagctcagagtctggtagccccacggggtggttaggcccagtagagcaataacaatcactgcagtgtggcttgctggaagccccatccctaacggggagtgcatcacatcaagggaccaccaacgtggtacaaaagaatctgaacaacagcccttgagttccagatttttccactgaaatagtctacccaaatgagaaggaatcagaaaagtaattctggtaatatgacaaggtaataaaacaaggttctataacatccccaaaagaccacactagctccccagcaatgggtccaaatcaagaagaagtctctgaattgcgaaataaataactcagaaggttgattattaagctactcagggagataccagggaaaggtgaaaaccaacttaaagaaattaaaaaaaaatacaagatatggatgaaaaatgctccagaagatatttactccagagaagtaaatatcgtagagataatgtttattctagagaataaataaatattgtattccagagaaataaatatcataaagaaaaaaagaatcacaacttctggaaatgaaaaacacacttagagaaatgcagtatgcactggaattcccacaatagactagaacaaatagaagaaagaacttcagagctcaaagataaggcttacaaattaacccaatcagacaaagacagagca

SEQ ID NO: 301505 - DNA, 482 bp, Homo sapiens
ctcagcctcctgagtagctgggattacaggcacatgccaccacgtctagctaatttttgtacttttagtagagatggggtttcaccacgttggtcgaactcctgacctcaggcgatccacccgcgtcggcctcccaaagtgctgggattacaggcatgagccaccgtgcctagccaatttattttaaacccaaaaattggtgttattttaaaaccaaaaataggatcataatgtacacgttgtatgcagtttgcttttttaaaaactttgttttgtgaacatctttccaagtctgtcagcacatagacctaattgctcttggcagctgggtggtatttcatagtatgagtatacgatgattcattctcctatttatggacattttaattgtgttcagttgtttactattacagataacgctgcagtgaacattctctcacatgtctttatgcactcttgctagtgtttgtgtaagataaatt

SEQ ID NO: 301506 - DNA, 2564 bp, Homo sapiens
agatgtggtccctgccctcatggggctgacagtcctaaaatcaagtgctaggacacagtggccattgagctgggagcattcttccctctaccgcttaagccactgatggctgcgagcttgaagagagggattctgagggagagcttggtccatctggtcaccaaggctgggcgggacagagcagtcaagaaccacggtgtggcttgagaaacagtcctgcttcctgagcctctttgctctgcctcttggggcaagctccttaacctgtctgtatttttatgcctctgtctcccattcagttcctccttgaatacctctttctacagagaggcacgggctcccctgaaggattgtcgaggccagggttcgggaagtacactgccatcggtcaggggacagctgcctcccaccttgcctgggtgatggtgaatgggactcatcttttcctgccttgcttttgaggagatggttgaatttaagctaacaggaaagccaaaccagcaccctcctttgtgctctgagaggttggagacatctggtccaccccattgcccctgcccctggcaagccctgaagtcgggagaggtgaccacaggtctgaaaatcagccagtgccaacattgcttgccctgcaaggtgcaactgagcccacatagcgcattcatagtttccctgaccacagccttgggaagacggtggaaacccgaggatgtgtgggtttcccagctaacggacaagctcccctgccacacccagtgcccacgcatgctcacatacatacagcagaccacaaccctgttgccaagcagtgcttccaagggatagcgatccagattccaacattgtcttggagagggttagtccacatccaagttgcgtgagataagatgcaaagggctctgtgtggatgaggaacgcaccttagaggagtgggaaaggccaccagggttgggccctgtttaggtaattcctgttggcagcacctagagagagcatctgagctgaaggagtgggaaactttgcccaagcaatggcacgggcagcgggctctttctggcgccctgtgctggagcagggccaagtcttagggcatcacaaacagcccatttgatggagggagcagggacatagcacatttttgtctgtctttgtgaggctgctttgctaactctctgaggagaggaagcctctcgggctttccgtcggctggggctagtgccagagaatcccttctcagtggccagcaggttcctgggaggccggcacaaggcaccgctccccactcatgacaccttggtgcagagtgacctcctgcccagtcaccactccggccagccccagccaaacacacaaaagcccatggttgcggttgcatctacaccgttagttggcaaaggatcctgcttgagctctgcgtggtggccaaggagtagcatggaggagggccctgattttaaaaaggaaaaatagagaggcctcaaaacaatgaaacaaagagcttgatatgtcaagaggagaccaaggccctgggaggcataggcaagccgggcagagtcagaccagtgccctcccttgaccatctcctagcattccttaacctagacaggggctaccccatgtgagtccaagccagactttgtggctgtccccagcctgcacagcccaagcccagggaagtgtcctttctttcccttccttactaataatgggccttcctgagacacattcagagaaggatcagagagaaaggagaaccatccaggagagccacaagcgtccaccaaacagtgtctcaggcctcacctgaagctgctgttcctcctatcagcacactagtattaaatgggtgttccataatgaggagaatggaaataggtacaaggcatctagcttaggacagaatcggatttcggcatgtgaaggaatcccagagctgatctcattgaaatgatctatcgtacagacaaggatatgcaaatccacagaagtgaagggatttttgctcaagatcacatagctggtaaactaaggtaaggttagggcttgaacttgggccttctgactccttgtccagtcagtgttctttcatctcaccacagctgcctcctttgaaacagaggtattaagatctgtccttctggttcaccctctcatacctctttactgcctctcccacatcccccacatgcctcccaaaatgaaagacaaacaggattgtttctgagaccaagatcagtctgtctgtgatcagcctgtgtgtggttcacccagtcatgcaattaagggcagatctgggccagtggaataggatagctgattggtgtttgttactgtgaaccctagaccgtaccccgtagaatggtgtctcttgctttgtaacacatcgggccttcagtgtgctgtattcctcagaagtgagggcatctcggtccattctgcccatggccacagggtgcagagaggcagcagggcccatgcaagctgccaccctgggatttgctgggctggagttcaacagatgtaaagacttcagtgaagcaataaacacaaaactctgggagaag

SEQ ID NO: 301507 - DNA, 3272 bp, Homo sapiens
agatgtggtccctgccctcatggggctgacagtcctaaaatcaagtgctaggacacagtggccattgagctgggagcattcttccctctaccgcttaagccactgatggctgcgagcttgaagagagggattctgagggagagcttggtccatctggtcaccaaggctgggcgggacagagcagtcaagaaccacggtgtggcttgagaaacagtcctgcttcctgagcctctttgctctgcctcttggggcaagctccttaacctgtctgtatttttatgcctctgtctcccattcagttcctccttgaatacctctttctacagagaggcacgggctcccctgaaggattgtcgaggccagggttcgggaagtacactgccatcggtcaggggacagctgcctcccaccttgcctgggtgatggtgaatgggactcatcttttcctgccttgcttttgaggagatggttgaatttaagctaacaggaaagccaaaccagcaccctcctttgtgctctgagaggttggagacatctggtccaccccattgcccctgcccctggcaagccctgaagtcgggagaggtgaccacaggtctgaaaatcagccagtgccaacattgcttgccctgcaaggtgcaactgagcccacatagcgcattcatagtttccctgaccacagccttgggaagacggtggaaacccgaggatgtgtgggtttcccagctaacggacaagctcccctgccacacccagtgcccacgcatgctcacatacatacagcagaccacaaccctgttgccaagcagtgcttccaagggatagcgatccagattccaacattgtcttggagagggttagtccacatccaagttgcgtgagataagatgcaaagggctctgtgtggatgaggaacgcaccttagaggagtgggaaaggccaccagggttgggccctgtttaggtaattcctgttggcagcacctagagagagcatctgagctgaaggagtgggaaactttgcccaagcaatggcacgggcagcgggctctttctggcgccctgtgctggagcagggccaagtcttagggcatcacaaacagcccatttgatggagggagcagggacatagcacatttttgtctgtctttgtgaggctgctttgctaactctctgaggagaggaagcctctcgggctttccgtcggctggggctagtgccagagaatcccttctcagtggccagcaggttcctgggaggccggcacaaggcaccgctccccactcatgacaccttggtgcagagtgacctcctgcccagtcaccactccggccagccccagccaaacacacaaaagcccatggttgcggttgcatctacaccgttagttggcaaaggatcctgcttgagctctgcgtggtggccaaggagtagcatggaggagggccctgattttaaaaaggaaaaatagagaggcctcaaaacaatgaaacaaagagcttgatatgtcaagaggagaccaaggccctgggaggcataggcaagccgggcagagtcagaccagtgccctcccttgaccatctcctagcattccttaacctagacaggggctaccccatgtgagtccaagccagactttgtggctgtccccagcctgcacagcccaagcccagggaagtgtcctttctttcccttccttactaataatgggccttcctgagacacattcagagaaggatcagagagaaaggagaaccatccaggagagccacaagcgtccaccaaacagtgtctcaggcctcacctgaagctgctgttcctcctatcagcacactagtattaaatgggtgttccataatgaggagaatggaaataggtacaaggcatctagcttaggacagaatcggatttcggcatgtgaaggaatcccagagctgatctcattgaaatgatctatcgtacagacaaggatatgcaaatccacagaagtgaagggatttttgctcaagatcacatagctggtaaactaaggtaaggttagggcttgaacttgggccttctgactccttgtccagtcagtgttctttcatctcaccacagctgcctcctttgaaacagaggtattaagatctgtccttctggttcaccctctcatacctctttactgcctctcccacatcccccacatgcctcccaaaatgaaagacaaacaggattgtttctgagaccaagatcagtctgtctgtgatcagcctgtgtgtggttcacccagtcatgcaattaagggcagatctgggccagtggaataggatagctgattggtgtttgttactgtgaaccctagaccgtaccccgtagaatggtgtctcttgctttgtaacacatcgggccttcagtgtgctgtattcctcagaagtgagggcatctcggtccattctgcccatggccacagggtgcagagaggcagcagggcccatgcaagctgccaccctgggatttgctgggctggagttcaacagatgtaaagacttcagtgaagcaataaacacaaaactctgggagaagatatccagaattttgtacattactctgtttctttttcaaaaatgaggcagatcagatgcccctgagctgcccctttttttctgattcccaactgcaatgtcctcagtcagtgttgtccctctgcccggctccccagctctttgccaacctcttcacactccccttgagctgagcatcagtcgcctgtgacgtggccaccttctgtcctgctcccactcccgacccatgctggaccccggaggacctcctgccccgcccccaccacacacccatatcccccaccattccaatttgttctttcccgtggggaattttttttcccagcgtctccatcccttcgtacatatccacacacacacaaattggtctgatcttttttccattggttaaacatttaactccatgccagaccttgttttaacccctctcacatcatgttctttccttttttgcgagttattttgcattaaccaactttgtcagtgacagatgcgtatctgagggtgtcacacacgaccttcagcagggaagacttctgggccatggagggccgtctaatacatggacttataaactgactgcatgagcaatgaaaaggccaaattattctgaattttttttgaatcactgtaaaaaaactgatttcttttgtatagagaacactaaacgtataataaaagttgttcaaaatggactcttgccatgtga

SEQ ID NO: 301508 - DNA, 1857 bp, Homo sapiens
gtctgtggcaaaattactgtaattcaaattggaaaaaaaaatgtttccagactttgtccaacatttattcctatggcaaaggaaattactatgtaatactaattatttcttatgctggtatgttttaagctactctatgaagtatgtgaaacatcaatatttatggattaatagatggcctgatgtctttcaaatgggagaggagtaaattttagtgttaccaactcatgacacttgtaatacaataaatcttaaaatttttattttccacttacaggtatactttactaaataattaccttaaatggcagtgcatattaggattttttagcacatactactaaaattatatagtaacttttaacttgtgctgatatttcccaaccaaaaaagacatcattcacttcatcataaccaaaataagtagtactgtaatatttatcttcatttatttagacatgattaagataccgtaagactcctctaatttacctggaatttttagccattgattcaaggacttgaatgctgtttacttggtactacctaatgaaaggatttggtaataaaggttataatcacgattttaaagaaaaatgtttcatcttgaaggcaaatttttaagctttttatttagaggtgtttacttaagaatagtaatttaaaagcattcttatttgtcattaagacaagtacccaaaagaattgtaataagtaatacttggccaatgcaaatttgtacatttgaaatcatacacttgaaagaaaaaaatgaaggcttgtgagtgcttaaactgcatatctttttaaaaattcaaattttagacatatcagtttaaattatccttaataaggttttactatgtcagtgatgtatattacaaaatgtctacctatgttatgttaatgatatctctatactgcatcatattcggcatggttatggtatattttgtacttttgattgtggactattgataggattgatatagcaataaatctgattcagacttaatattttttaaaacgctagataccatactgtatcataatcctattatatttgacttgaatgcccaaaattttcatagttctatattttatgttaaaaatttagtattacatgttagggatttatttttgtctgctattttcacatacattcttttagaactgagtctgtttctatttagatcatagacgtctaaagaagtattattaattcatgaactgctttgtggaaaaatttaaataaagtatgaaatgactagattaccccaaattgtttatttttttttttggttaatgaccaggttacaattctcagacaaatgaaattggcttgataactgattgaatatagtagataatggaaagtttgactctttaagggcttccaagtgttaaatacattctcaattctgaattacttcatagtaactacttaaataatggtaagccaattctcctttttctttttgagatatttaacacaatttgcgtcttctgatcccattcccttcttccccaaaaaccatgctagaatttaaaattggaagagtttaatttgtcatctacattttagtttttttattctatagataagtaagaagacaagtagacgttctgctgtcaagacagtccatgttattgttggccattcttttcagggataatgcttaatgttatttgtgcgttgtataaggaatgttgtttatcagtatatagacctaccattagtagaaatgatgtatggcaggctttcttgaataatatgtattgtaagtttgtttcctatagtgttattatggttcagattcttttaaataaagctagtttttaaagagaaaaaaaact

SEQ ID NO: 301509 - DNA, 1863 bp, Homo sapiens
gtctgtggcaaaattactgtaattcaaattggaaaaaaaaatgtttccagactttgtccaacatttattcctatggcaaaggaaattactatgtaatactaattatttcttatgctggtatgttttaagctactctatgaagtatgtgaaacatcaatatttatggattaatagatggcctgatgtctttcaaatgggagaggagtaaattttagtgttaccaactcatgacacttgtaatacaataaatcttaaaatttttattttccacttacaggtatactttactaaataattaccttaaatggcagtgcatattaggattttttagcacatactactaaaattatatagtaacttttaacttgtgctgatatttcccaaccaaaaaagacatcattcacttcatcataaccaaaataagtagtactgtaatatttatcttcatttatttagacatgattaagataccgtaagactcctctaatttacctggaatttttagccattgattcaaggacttgaatgctgtttacttggtactacctaatgaaaggatttggtaataaaggttataatcacgattttaaagaaaaatgtttcatcttgaaggcaaatttttaagctttttatttagaggtgtttacttaagaatagtaatttaaaagcattcttatttgtcattaagacaagtacccaaaagaattgtaataagtaatacttggccaatgcaaatttgtacatttgaaatcatacacttgaaagaaaaaaatgaaggcttgtgagtgcttaaactgcatatctttttaaaaattcaaattttagacatatcagtttaaattatccttaataaggttttactatgtcagtgatgtatattacaaaatgtctacctatgttatgttaatgatatctctatactgcatcatattcggcatggttatggtatattttgtacttttgattgtggactattgataggattgatatagcaataaatctgattcagacttaatattttttaaaacgctagataccatactgtatcataatcctattatatttgacttgaatgcccaaaattttcatagttctatattttatgttaaaaatttagtattacatgttagggatttatttttgtctgctattttcacatacattcttttagaactgagtctgtttctatttagatcatagacgtctaaagaagtattattaattcatgaactgctttgtggaaaaatttaaataaagtatgaaatgactagattaccccaaattgtttatttttttttttggttaatgaccaggttacaattctcagacaaatgaaattggcttgataactgattgaatatagtagataatggaaagtttgactctttaagggcttccaagtgttaaatacattctcaattctgaattacttcatagtaactacttaaataatggtaagccaattctcctttttctttttgagatatttaacacaatttgcgtcttctgatcccattcccttcttccccaaaaaccatgctagaatttaaaattggaagagtttaatttgtcatctacattttagtttttttattctatagataagtaagaagacaagtagacgttctgctgtcaagacagtccatgttattgttggccattcttttcagggataatgcttaatgttatttgtgcgttgtataaggaatgttgtttatcagtatatagacctaccattagtagaaatgatgtatggcaggctttcttgaataatatgtattgtaagtttgtttcctatagtgttattatggttcagattcttttaaaaactagctttatttaaaagtcgacgcggccgcgaat

SEQ ID NO: 301510 - DNA, 3020 bp, Homo sapiens
atggccctgctgccccgagccctgagcgccggcgcgggaccgagctggcggcgggcggcgcgcgccttccgaggcttcctgctgcttctgcccgagcccgcggccctcacgcgcgccctctcccgtgccatggcctgcaggcaggagccgcagccgcagggcccgccgcccgctgctggcgccgtggcctcctatgactacctggtgatcgggggcggctcgggcgggctggccagcgcgcgcagggcggccgagctgggtgccagggccgccgtggtggagagccacaagctgggtggcacttgcgtgaatgttggatgtgtacccaaaaaggtaatgtggaacacagctgtccactctgaattcatgcatgatcatgctgattatggctttccaagttgtgagggtaaattcaattggcgtgttattaaggaaaagcgggatgcctatgtgagccgcctgaatgccatctatcaaaacaatctcaccaagtcccatatagaaatcatccgtggccatgcagccttcacgagtgatcccaagcccacaatagaggtcagtgggaaaaagtacaccgccccacacatcctgatcgccacaggtggtatgccctccacccctcatgagagccagatccccggtgccagcttaggaataaccagcgatggattttttcagctggaagaattgcccggccgcagcgtcattgttggtgcaggttacattgctgtggagatggcagggatcctgtcagccctgggttctaagacatcactgatgatacggcatgataaggtacttagaagttttgattcaatgatcagcaccaactgcacggaggagctggagaacgctggcgtggaggtgctgaagttctcccaggtcaaggaggttaaaaagactttgtcgggcttggaagtcagcatggttactgcagttcccggtaggctaccagtcatgaccatgattccagatgttgactgcctgctctgggccattgggcgggtcccgaataccaaggacctgagtttaaacaaactggggattcaaaccgatgacaagggtcatatcatcgtagacgaattccagaataccaacgtcaaaggcatctatgcagttggggatgtatgtggaaaagctcttcttactccagttgcaatagctgctggccgaaaacttgcccatcgactttttgaatataaggaagattccaaattagattataacaacatcccaactgtggtcttcagccacccccctattgggacagtgggactcacggaagatgaagccattcataaatatggaatagaaaatgtgaagacctattcaacgagctttaccccgatgtatcacgcagttaccaaaaggaaaacaaaatgtgtgatgaaaatggtctgtgctaacaaggaagaaaaggtggttgggatccatatgcagggacttgggtgtgatgaaatgctgcagggttttgctgttgcagtgaagatgggagcaacgaaggcagactttgacaacacagtcgccattcaccctacctcttcagaagagctggtcacacttcgttgagaaccaggagacacgtgtggcgggcagtgggacccatagatcttctgaaatgaaacaaataatcacattgacttactgtttgagttttatgtatttctttattttaatcaggatcttctgatagtggaaatttttagtacataatagaacttatttatggagttagaaatttgtagtgttatccaggattgattttcatttgatcacatctcacagtaattaatattttcaagttttttttttattaacagctctgtgctagttttttttttctgttttagcctcatcccaaatataaagctttgtgaagtacaattaacttaatgtacttgaatgaatagaacttgctacttttttttttttttttttggagacagagtttggctctcattgcccaggctggagtgcggtggtgctatttcagctccaccacaacctctgcctcctgggttcaagcgattctcctgccttagcctcccgaatagctggaattacaggcacgcaccaccatgcctgactaattttgtatttttagtagacatggggtttctccatgttggtcaggctggtctcaaactcccaccttcaggtgatccgcccacctcggcctcctgaggtgctgagattacaggcgtgagccactgtgccagcttgctaattttcacagaagttgatggcaattcttcacatgtaaacagtgccagtgcacagaacctttatatattttttgaagccagtactgtgctctgcatataacaaagctgcttcaaggatgagacctttttctaaaagcatgtaatgtgagaagccggcctgccttattttcttttttcttttttaatgattaaaaatagtttgtggcaaggcacggtggctcaggcctgtaattctagcactttgggaggccgaggcaggaggattacttgagcctacaagtttgaggccagcatgcacagcatagcaagactgcatctctacagagagtaaaaaaaattacccgagtgtggtgatgtgcatctgtaatctcagctacttgggaggctgaggtgagaggatcacttgagcttgggtgaggtgaggctgcagtgagtcctgatcatgctgctgcactcaatcttggacaacagagcaagaccctgtctcaaaaaaaaaaaaaatatatatatatatatatattatttttatgaggtgaagtgcatcaaacttgggaaagatttgaggaggctgggaacctcctggaaaaccactccttgaagaaagatatgagagacatttagaagtgattcctgctttcagaaggaggtggattcaaatacatcaaaagtcccttcctctgctaagtgtttatagttcaatgaataatttcaatatttgtatgtgttcttgtcattttatttttttctgaaaaacttccaaaaatttgaaaataaaattacagccttttcttctta

SEQ ID NO: 301511 - DNA, 3165 bp, Homo sapiens
atggccctgctgccccgagccctgagcgccggcgcgggaccgagctggcggcgggcggcgcgcgccttccgaggcttcctgctgcttctgcccgagcccgcggccctcacgcgcgccctctcccgtgccatggcctgcaggcaggagccgcagccgcagggcccgccgcccgctgctggcgccgtggcctcctatgactacctggtgatcgggggcggctcgggcgggctggccagcgcgcgcagggcggccgagctgggtgccagggccgccgtggtggagagccacaagctgggtggcacttgcgtgaatgttggatgtgtacccaaaaaggtaatgtggaacacagctgtccactctgaattcatgcatgatcatgctgattatggctttccaagttgtgagggtaaattcaattggcgtgttattaaggaaaagcgggatgcctatgtgagccgcctgaatgccatctatcaaaacaatctcaccaagtcccatatagaaatcatccgtggccatgcagccttcacgagtgatcccaagcccacaatagaggtcagtgggaaaaagtacaccgccccacacatcctgatcgccacaggtggtatgccctccacccctcatgagagccagatccccggtgccagcttaggaataaccagcgatggattttttcagctggaagaattgcccggccgcagcgtcattgttggtgcaggttacattgctgtggagatggcagggatcctgtcagccctgggttctaagacatcactgatgatacggcatgataaggtacttagaagttttgattcaatgatcagcaccaactgcacggaggagctggagaacgctggcgtggaggtgctgaagttctcccaggtcaaggaggttaaaaagactttgtcgggcttggaagtcagcatggttactgcagttcccggtaggctaccagtcatgaccatgattccagatgttgactgcctgctctgggccattgggcgggtcccgaataccaaggacctgagtttaaacaaactggggattcaaaccgatgacaagggtcatatcatcgtagacgaattccagaataccaacgtcaaaggcatctatgcagttggggatgtatgtggaaaagctcttcttactccagttgcaatagctgctggccgaaaacttgcccatcgactttttgaatataaggaagattccaaattagattataacaacatcccaactgtggtcttcagccacccccctattgggacagtgggactcacggaagatgaagccattcataaatatggaatagaaaatgtgaagacctattcaacgagctttaccccgatgtatcacgcagttaccaaaaggaaaacaaaatgtgtgatgaaaatggtctgtgctaacaaggaagaaaaggtggttgggatccatatgcagggacttgggtgtgatgaaatgctgcagggttttgctgttgcagtgaagatgggagcaacgaaggcagactttgacaacacagtcgccattcaccctacctcttcagaagagctggtcacacttcgttgagaaccaggagacacgtgtggcgggcagtgggacccatagatcttctgaaatgaaacaaataatcacattgacttactgtttgagttttatgtatttctttattttaatcaggatcttctgatagtggaaatttttagtacataatagaacttatttatggagttagaaatttgtagtgttatccaggattgattttcatttgatcacatctcacagtaattaatattttcaagttttttttttattaacagctctgtgctagttttttttttctgttttagcctcatcccaaatataaagctttgtgaagtacaattaacttaatgtacttgaatgaatagaacttgctacttttttttttttttttttggagacagagtttggctctcattgcccaggctggagtgcggtggtgctatttcagctccaccacaacctctgcctcctgggttcaagcgattctcctgccttagcctcccgaatagctggaattacaggcacgcaccaccatgcctgactaattttgtatttttagtagacatggggtttctccatgttggtcaggctggtctcaaactcccaccttcaggtgatccgcccacctcggcctcctgaggtgctgagattacaggcgtgagccactgtgccagcttgctaattttcacagaagttgatggcaattcttcacatgtaaacagtgccagtgcacagaacctttatatattttttgaagccagtactgtgctctgcatataacaaagctgcttcaaggatgagacctttttctaaaagcatgtaatgtgagaagccggcctgccttattttcttttttcttttttaatgattaaaaatagtttgtggcaaggcacggtggctcaggcctgtaattctagcactttgggaggccgaggcaggaggattacttgagcctacaagtttgaggccagcatgcacagcatagcaagactgcatctctacagagagtaaaaaaaattacccgagtgtggtgatgtgcatctgtaatctcagctacttgggaggctgaggtgagaggatcacttgagcttgggtgaggtgaggctgcagtgagtcctgatcatgctgctgcactcaatcttggacaacagagcaagaccctgtctcaaaaaaaaaaaaaatatatatatatatatatattatttttatgaggtgaagtgcatcaaacttgggaaagatttgaggaggctgggaacctcctggaaaaccactccttgaagaaagatatgagagacatttagaagtgattcctgctttcagaaggaggtggattcaaatacatcaaaagtcccttcctctgctaagtgtttatagttcaatgaataatttcaatatttgtatgtgttcttgtcattttatttttttctgaaaaacttccaaaaatttgaaaataaaattacagccttttcttcttataaaatttgttactgtgagctttaattggtacacaggaaattggtttattttctaaggatatttcacattggagaatcagttgcctgtgcttacgggggtgaaaagagagttctcgtataaaaataaagatcgaaggtataaaag

SEQ ID NO: 301512 - DNA, 2940 bp, Homo sapiens
atggccctgctgccccgagccctgagcgccggcgcgggaccgagctggcggcgggcggcgcgcgccttccgaggcttcctgctgcttctgcccgagcccgcggccctcacgcgcgccctctcccgtgccatggcctgcaggcaggagccgcagccgcagggcccgccgcccgctgctggcgccgtggcctcctatgactacctggtgatcgggggcggctcgggcgggctggccagcgcgcgcagggcggccgagctgggtgccagggccgccgtggtggagagccacaagctgggtggcacttgcgtgaatgttggatgtgtacccaaaaaggtaatgtggaacacagctgtccactctgaattcatgcatgatcatgctgattatggctttccaagttgtgagggtaaattcaattggcgtgttattaaggaaaagcgggatgcctatgtgagccgcctgaatgccatctatcaaaacaatctcaccaagtcccatatagaaatcatccgtggccatgcagccttcacgagtgatcccaagcccacaatagaggtcagtgggaaaaagtacaccgccccacacatcctgatcgccacaggtggtatgccctccacccctcatgagagccagatccccggtgccagcttaggaataaccagcgatggattttttcagctggaagaattgcccggccgcagcgtcattgttggtgcaggttacattgctgtggagatggcagggatcctgtcagccctgggttctaagacatcactgatgatacggcatgataaggtacttagaagttttgattcaatgatcagcaccaactgcacggaggagctggagaacgctggcgtggaggtgctgaagttctcccaggtcaaggaggttaaaaagactttgtcgggcttggaagtcagcatggttactgcagttcccggtaggctaccagtcatgaccatgattccagatgttgactgcctgctctgggccattgggcgggtcccgaataccaaggacctgagtttaaacaaactggggattcaaaccgatgacaagggtcatatcatcgtagacgaattccagaataccaacgtcaaaggcatctatgcagttggggatgtatgtggaaaagctcttcttactccagttgcaatagctgctggccgaaaacttgcccatcgactttttgaatataaggaagattccaaattagattataacaacatcccaactgtggtcttcagccacccccctattgggacagtgggactcacggaagatgaagccattcataaatatggaatagaaaatgtgaagacctattcaacgagctttaccccgatgtatcacgcagttaccaaaaggaaaacaaaatgtgtgatgaaaatggtctgtgctaacaaggaagaaaaggtggttgggatccatatgcagggacttgggtgtgatgaaatgctgcagggttttgctgttgcagtgaagatgggagcaacgaaggcagactttgacaacacagtcgccattcaccctacctcttcagaagagctggtcacacttcgttgagaaccaggagacacgtgtggcgggcagtgggacccatagatcttctgaaatgaaacaaataatcacattgacttactgtttgagttttatgtatttctttattttaatcaggatcttctgatagtggaaatttttagtacataatagaacttatttatggagttagaaatttgtagtgttatccaggattgattttcatttgatcacatctcacagtaattaatattttcaagttttttttttattaacagctctgtgctagttttttttttctgttttagcctcatcccaaatataaagctttgtgaagtacaattaacttaatgtacttgaatgaatagaacttgctacttttttttttttttttttggagacagagtttggctctcattgcccaggctggagtgcggtggtgctatttcagctccaccacaacctctgcctcctgggttcaagcgattctcctgccttagcctcccgaatagctggaattacaggcacgcaccaccatgcctgactaattttgtatttttagtagacatggggtttctccatgttggtcaggctggtctcaaactcccaccttcaggtgatccgcccacctcggcctcctgaggtgctgagattacaggcgtgagccactgtgccagcttgctaattttcacagaagttgatggcaattcttcacatgtaaacagtgccagtgcacagaacctttatatattttttgaagccagtactgtgctctgcatataacaaagctgcttcaaggatgagacctttttctaaaagcatgtaatgtgagaagccggcctgccttattttcttttttcttttttaatgattaaaaatagtttgtggcaaggcacggtggctcaggcctgtaattctagcactttgggaggccgaggcaggaggattacttgagcctacaagtttgaggccagcatgcacagcatagcaagactgcatctctacagagagtaaaaaaaattacccgagtgtggtgatgtgcatctgtaatctcagctacttgggaggctgaggtgagaggatcacttgagcttgggtgaggtgaggctgcagtgagtcctgatcatgctgctgcactcaatcttggacaacagagcaagaccctgtctcaaaaaaaaaattttttttttgtttttacttacgggggaggggtcaacttggaacggcttgggggtggacccctggaacctctgaaagtttggaacttaaggtcccgctcaaaggggggcaaacaaaccccgggaggtagccgaaaacaaagggggagtatttgacaccaaggaatactttctaaaaaaaagcgccggcagcctgaataagaagcgagcgcctaattat

SEQ ID NO: 301513 - DNA, 1739 bp, Homo sapiens
atggccctgctgccccgagccctgagcgccggcgcgggaccgagctggcggcgggcggcgcgcgccttccgaggcttcctgctgcttctgcccgagcccgcggccctcacgcgcgccctctcccgtgccatggcctgcaggcaggagccgcagccgcagggcccgccgcccgctgctggcgccgtggcctcctatgactacctggtgatcgggggcggctcgggcgggctggccagcgcgcgcagggcggccgagctgggtgccagggccgccgtggtggagagccacaagctgggtggcacttgcgtgaatgttggatgtgtacccaaaaaggtaatgtggaacacagctgtccactctgaattcatgcatgatcatgctgattatggctttccaagttgtgagggtaaattcaattggcgtgttattaaggaaaagcgggatgcctatgtgagccgcctgaatgccatctatcaaaacaatctcaccaagtcccatatagaaatcatccgtggccatgcagccttcacgagtgatcccaagcccacaatagaggtcagtgggaaaaagtacaccgccccacacatcctgatcgccacaggtggtatgccctccacccctcatgagagccagatccccggtgccagcttaggaataaccagcgatggattttttcagctggaagaattgcccggccgcagcgtcattgttggtgcaggttacattgctgtggagatggcagggatcctgtcagccctgggttctaagacatcactgatgatacggcatgataaggtacttagaagttttgattcaatgatcagcaccaactgcacggaggagctggagaacgctggcgtggaggtgctgaagttctcccaggtcaaggaggttaaaaagactttgtcgggcttggaagtcagcatggttactgcagttcccggtaggctaccagtcatgaccatgattccagatgttgactgcctgctctgggccattgggcgggtcccgaataccaaggacctgagtttaaacaaactggggattcaaaccgatgacaagggtcatatcatcgtagacgaattccagaataccaacgtcaaaggcatctatgcagttggggatgtatgtggaaaagctcttcttactccagttgcaatagctgctggccgaaaacttgcccatcgactttttgaatataaggaagattccaaattagattataacaacatcccaactgtggtcttcagccacccccctattgggacagtgggactcacggaaggtaggtatttaaaaactgaaggtcatttgtggtttccttcctctttcccctgcccccaactttaaattaggtctctgtcagctgatgaaacctatctcagccccagattacattgctttttggttactctcttgtcacagttccagttttctcccctgctactactttgagtgtacagtatctttccttcacaccaccctatctctttgatcttttttttttagcttttttatttgaactaattttaaatttaaagaaaagctctaaaaataatacaaaggactcctctctaaccttaatatttttgcttttttattttttcactctacacacacacatgtctatctttcctaagaactggcccttacataaaccgagtatcattttctttttttttttctttttgagacaagcttccagcctgggagacaaagcgagactccatctcaaagca

SEQ ID NO: 301514 - DNA, 657 bp, Homo sapiens
tttttttttttttttttttggagacaaaatcttgctctgttcccaggctggagtgcagtggcacgatctcggctcactgcaacctccacctcccaggttcaagtgattctcctgcctcagcctcccaagtagctgggactataggtgcgtgccaccatgcccagctaatttttgtatttttagtagagacagggtttcaccacgttggccaggccacatagattttgaactacatagaaatttgtcttttcaggcaggaacggtgtctcacacctgtaatgagctgagccccagggttcctacctgcccttggggtgggagggtgaacagatccaacagagtctgttcatgaccactgagatcttcattcttcagagaaatgtaaaagttatttagccatcatggcttctgtttctagagagaaaataaaaatgttaactcagggaggatttggttggcagctttccaagcagagactttaacaaaacttgtcaaaacggagactatgttggctgtgaaagtgtttggtttttggcataaaatgttgtgattactttgcaagagaaagagcagtcttgtgtgatctatgttgcctttttctacataggtgccagcttaggaataaccagcgatggattttttcagctggaagaattg

SEQ ID NO: 301515 - DNA, 315 bp, Homo sapiens
taaaaagactttgtcgggcttggaagtcagcatggttactgcagttcccggtaggctaccagtcatgaccatgattccagatgttgactgcctgctctgggccattgggcgggtcccgaataccaaggacctgagtttaaacaaactggtaagctggcttggtctgcccgaaacatttgtgaatctactaggagtcttatggttttattttccccccagacacccaaaacttgggtggattccattggattcttttctctttttcccatgtattcagtttgtgatcaaatttcattgcttcttcctttgaaatta

SEQ ID NO: 301516 - DNA, 1878 bp, Homo sapiens
agcggccggccttcgcccgcccgctagcacgcagtcccttggtctcttcggtctcctgccgcccccgggaagcgcgctgcgctgccgaggcgagctaagcgcccgctcgccatggggagccccgcacatcggcccgcgctgctgctgctgctgccgcctctgctgctgctgctgctgctgcgcgtcccgcccagccgcagcttcccaggatcgggagactcaccactagaagacgatgaagtcgggtattcacaccctagatataaagataccccgtggtgctcccccatcaaggtgaagtatggggatgtgtactgcagggcccctcaaggaggatactacaaaacagccctgggaaccaggtgcgacattcgctgccagaagggctacgagctgcatggctcttccctactgatctgccagtcaaacaaacgatggtctgacaaggtcatctgcaaacaaaagcgatgtcctacccttgccatgccagcaaatggagggtttaagtgtgtagatggtgcctactttaactcccggtgtgagtattattgttcaccaggatacacgttgaaaggggagcggaccgtcacatgtatggacaacaaggcctggagcggccggccagcctcctgtgtggatatggaacctcctagaatcaagtgcccaagtgtgaaggaacgcattgcagaacccaacaaactgacagtccgggtgtcctgggagacacccgaaggaagagacacagcagatggaattcttactgatgtcattctaaaaggcctccccccaggctccaactttccagaaggagaccacaagatccagtacacagtctatgacagagctgagaataagggcacttgcaaatttcgagttaaagtaagagtcaaacgctgtggcaaactcaatgccccagagaatggttacatgaagtgctccagcgacggtgataattatggagccacctgtgagttctcctgcatcggcggctatgagctccagggtagccctgcccgagtatgtcaatccaacctggcttggtctggcacggagcccacctgtgcagccatgaacgtcaatgtgggtgtcagaacggcagctgcacttctggatcagttttatgagaaaaggagactcctcattgtgtccacacccacagcccgaaacctcctttaccggctccagctaggaatgctgcagcaagcacagtgtggccttgatcttcgacacatcaccgtggtggagctggtgggtgtgttcccgactctcattggcaggataggagcaaagattatgcctccagccctagcgctgcagctcaggctgttgctgcgaatcccactctactccttcagtatggtgctagtggataagcatggcatggacaaagagcgctatgtctccctggtgatgcctgtggccctgttcaacctgattgacacttttcccttgagaaaagaagagatggtcctacaagccgaaatgagccagacctgtaacacctgacatgatggttcctctcttggcaattcctcttcattgtctacatagtgacatgcacacgggaaagccttaaaaatatccttgatgtacagattttatttgtaattttaaaagtctattttattatgagctttctttgcacttaaaaattagcatgctgctttttgtacttggaagtgtttcaaaaaattatatgaccatatttactctttctaactttctttactccatcatggctggttgattttgtagagaaattagaacccataaccatacacaggctatcaacatgttattcaatgtgacacctaactcttttctattttgttttttaagtaagacttttattaataaaacaaaatgttttggagcaaa

SEQ ID NO: 301517 - DNA, 1913 bp, Homo sapiens
agcggccggccttcgcccgcccgctagcacgcagtcccttggtctcttcggtctcctgccgcccccgggaagcgcgctgcgctgccgaggcgagctaagcgcccgctcgccatggggagccccgcacatcggcccgcgctgctgctgctgctgccgcctctgctgctgctgctgctgctgcgcgtcccgcccagccgcagcttcccaggatcgggagactcaccactagaagacgatgaagtcgggtattcacaccctagatataaagataccccgtggtgctcccccatcaaggtgaagtatggggatgtgtactgcagggcccctcaaggaggatactacaaaacagccctgggaaccaggtgcgacattcgctgccagaagggctacgagctgcatggctcttccctactgatctgccagtcaaacaaacgatggtctgacaaggtcatctgcaaacaaaagcgatgtcctacccttgccatgccagcaaatggagggtttaagtgtgtagatggtgcctactttaactcccggtgtgagtattattgttcaccaggatacacgttgaaaggggagcggaccgtcacatgtatggacaacaaggcctggagcggccggccagcctcctgtgtggatatggaacctcctagaatcaagtgcccaagtgtgaaggaacgcattgcagaacccaacaaactgacagtccgggtgtcctgggagacacccgaaggaagagacacagcagatggaattcttactgatgtcattctaaaaggcctccccccaggctccaactttccagaaggagaccacaagatccagtacacagtctatgacagagctgagaataagggcacttgcaaatttcgagttaaagtaagagtcaaacgctgtggcaaactcaatgccccagagaatggttacatgaagtgctccagcgacggtgataattatggagccacctgtgagttctcctgcatcggcggctatgagctccagggtagccctgcccgagtatgtcaatccaacctggcttggtctggcacggagcccacctgtgcagccatgaacgtcaatgtgggtgtcagaacggcagctgcacttctggatcagttttatgagaaaaggagactcctcattgtgtccacacccacagcccgaaacctcctttaccggctccagctaggaatgctgcagcaagcacagtgtggccttgatcttcgacacatcaccgtggtggagctggtgggtgtgttcccgactctcattggcaggataggagcaaagattatgcctccagccctagcgctgcagctcaggctgttgctgcgaatcccactctactccttcagtatggtgctagtggataagcatggcatggacaaagagcgctatgtctccctggtgatgcctgtggccctgttcaacctgattgacacttttcccttgagaaaagaagagatggtcctacaagccgaaatgagccagacctgtaacacctgacatgatggttcctctcttggcaattcctcttcattgtctacatagtgacatgcacacgggaaagccttaaaaatatccttgatgtacagattttatttgtaattttaaaagtctattttattatgagctttctttgcacttaaaaattagcatgctgctttttgtacttggaagtgtttcaaaaaattatatgaccatatttactctttctaactttctttactccatcatggctggttgattttgtagagaaattagaacccataaccatacacaggctatcaacatgttattcaatgtgacacctaactcttttctattttgttttttaagtaagacttttattaataaaacaaaatgttttggagcaaaaaaaaataaaaaaaatgggcctcgttgggcctaaa

SEQ ID NO: 301518 - DNA, 1963 bp, Homo sapiens
agcggccggccttcgcccgcccgctagcacgcagtcccttggtctcttcggtctcctgccgcccccgggaagcgcgctgcgctgccgaggcgagctaagcgcccgctcgccatggggagccccgcacatcggcccgcgctgctgctgctgctgccgcctctgctgctgctgctgctgctgcgcgtcccgcccagccgcagcttcccaggatcgggagactcaccactagaagacgatgaagtcgggtattcacaccctagatataaagataccccgtggtgctcccccatcaaggtgaagtatggggatgtgtactgcagggcccctcaaggaggatactacaaaacagccctgggaaccaggtgcgacattcgctgccagaagggctacgagctgcatggctcttccctactgatctgccagtcaaacaaacgatggtctgacaaggtcatctgcaaacaaaagcgatgtcctacccttgccatgccagcaaatggagggtttaagtgtgtagatggtgcctactttaactcccggtgtgagtattattgttcaccaggatacacgttgaaaggggagcggaccgtcacatgtatggacaacaaggcctggagcggccggccagcctcctgtgtggatatggaacctcctagaatcaagtgcccaagtgtgaaggaacgcattgcagaacccaacaaactgacagtccgggtgtcctgggagacacccgaaggaagagacacagcagatggaattcttactgatgtcattctaaaaggcctccccccaggctccaactttccagaaggagaccacaagatccagtacacagtctatgacagagctgagaataagggcacttgcaaatttcgagttaaagtaagagtcaaacgctgtggcaaactcaatgccccagagaatggttacatgaagtgctccagcgacggtgataattatggagccacctgtgagttctcctgcatcggcggctatgagctccagggtagccctgcccgagtatgtcaatccaacctggcttggtctggcacggagcccacctgtgcagccatgaacgtcaatgtgggtgtcagaacggcagctgcacttctggatcagttttatgagaaaaggagactcctcattgtgtccacacccacagcccgaaacctcctttaccggctccagctaggaatgctgcagcaagcacagtgtggccttgatcttcgacacatcaccgtggtggagctggtgggtgtgttcccgactctcattggcaggataggagcaaagattatgcctccagccctagcgctgcagctcagtttcataacccttacaaagttggagccatggattttagtctctgaataatgatgtattaaagaagcagaattcaacaaccaaaaggctgttgctgcgaatcccactctactccttcagtatggtgctagtggataagcatggcatggacaaagagcgctatgtctccctggtgatgcctgtggccctgttcaacctgattgacacttttcccttgagaaaagaagagatggtcctacaagccgaaatgagccagacctgtaacacctgacatgatggttcctctcttggcaattcctcttcattgtctacatagtgacatgcacacgggaaagccttaaaaatatccttgatgtacagattttatttgtaattttaaaagtctattttattatgagctttctttgcacttaaaaattagcatgctgctttttgtacttggaagtgtttcaaaaaattatatgaccatatttactctttctaactttctttactccatcatggctggttgattttgtagagaaattagaacccataaccatacacaggctatcaacatgttattcaatgtgacacctaactcttttctattttgttttttaagtaagacttttattaataaaacaaaatgttttggagcaaa

SEQ ID NO: 301519 - DNA, 870 bp, Homo sapiens
tgactctgaggagtcttcacaggtcaactggctggctggcacggagcccacctgtgcaccatgaacgtcaatgtgggtgtcagaacggcagctgcacttctggatcagttttatgagaaaaggagactcctcattgtgtccacacccacagcccgaaacctcctttaccggctccagctaggaatgctgcagcaagcacagtgtggccttgatcttcgacacatcaccgtggtggagctggtgggtgtgttcccgactctcattggcaggataggagcaaagattatgcctccagccctagcgctgcagctcaggctgttgctgcgaatcccactctactccttcagtatggtgctagtggataagcatggcatggacaaagagcgctatgtctccctggtgatgcctgtggccctgttcaacctgattgacacttttcccttgagaaaagaagagatggtcctacaagccgaaatgagccagacctgtaacacctgacatgatggttcctctcttggcaattcctcttcattgtctacatagtgacatgcacacgggaaagccttaaaaatatccttgatgtacagattttatttgtaattttaaaagtctattttattatgagctttctttgcacttaaaaattagcatgctgctttttgtacttggaagtgtttcaaaaaattatatgaccatatttactctttctaactttctttactccatcatggctggttgattttgtagagaaattagaacccataaccatacacaggctatcaacatgttattcaatgtgacacctaactcttttctattttgttttttaagtaagacttttattaataaaacaaaatgttttggagcaaa

SEQ ID NO: 301520 - DNA, 1756 bp, Homo sapiens
agcggccggccttcgcccgcccgctagcacgcagtcccttggtctcttcggtctcctgccgcccccgggaagcgcgctgcgctgccgaggcgagctaagcgcccgctcgccatggggagccccgcacatcggcccgcgctgctgctgctgctgccgcctctgctgctgctgctgctgctgcgcgtcccgcccagccgcagcttcccaggatcgggagactcaccactagaagacgatgaagtcgggtattcacaccctagatataaagataccccgtggtgctcccccatcaaggtgaagtatggggatgtgtactgcagggcccctcaaggaggatactacaaaacagccctgggaaccaggtgcgacattcgctgccagaagggctacgagctgcatggctcttccctactgatctgccagtcaaacaaacgatggtctgacaaggtcatctgcaaacaaaagcgatgtcctacccttgccatgccagcaaatggagggtttaagtgtgtagatggtgcctactttaactcccggtgtgagtattattgttcaccaggatacacgttgaaaggggagcggaccgtcacatgtatggacaacaaggcctggagcggccggccagcctcctgtgtggatatggaacctcctagaatcaagtgcccaagtgtgaaggaacgcattgcagaacccaacaaactgacagtccgggtgtcctgggagacacccgaaggaagagacacagcagatggaattcttactgatgtcattctaaaaggcctccccccaggctccaactttccagaaggagaccacaagatccagtacacagtctatgacagagctgagaataagggcacttgcaaatttcgagttaaagtaagagtcaaacgctgtggcaaactcaatgccccagagaatggttacatgaagtgctccagcgacggtgataattatggagccacctgtgagttctcctgcatcggcggctatgagctccagggtagccctgcccgagtatgtcaatccaacctggcttggtctggcacggagcccacctgtgcagccatgaacgtcaatgtgggtgtcagaacggcagctgcacttctggatcagttttatgagaaaaggagactcctcattgtgtccacacccacagcccgaaacctcctttaccggctccagctaggaatgctgcaggctgttgctgcgaatcccactctactccttcagtatggtgctagtggataagcatggcatggacaaagagcgctatgtctccctggtgatgcctgtggccctgttcaacctgattgacacttttcccttgagaaaagaagagatggtcctacaagccgaaatgagccagacctgtaacacctgacatgatggttcctctcttggcaattcctcttcattgtctacatagtgacatgcacacgggaaagccttaaaaatatccttgatgtacagattttatttgtaattttaaaagtctattttattatgagctttctttgcacttaaaaattagcatgctgctttttgtacttggaagtgtttcaaaaaattatatgaccatatttactctttctaactttctttactccatcatggctggttgattttgtagagaaattagaacccataaccatacacaggctatcaacatgttattcaatgtgacacctaactcttttctattttgttttttaagtaagacttttattaataaaacaaaatgttttggagcaaa

SEQ ID NO: 301521 - DNA, 623 bp, Homo sapiens
gaaacgtgcacttgcaagctgcccgcaatacgttatggcgaccaaacgccttttcggggctacccggacgtgggccggctggggggcctgggagctcctaaaccccgccacttccggaagactcctggcccgggattatgccaagaaaccagttatgaagggggccaaatcgggaaaaggtgcagtgaccagcgaggccctcaaggaccccgacgtatgcacagatcctgtccagctcaccacatatgccatgggcgtcaacatctacaaggaagggcaggatgtacccctgaaaccggatgctgagtaccctgaatggctgtttgagatgaacttgggtcccccaaagaccctggaggagctggaccccgagagccgggagtactggcggcggctgcggaaacagaacatctggcgccacaaccggctgagcaagaacaagaggttgtagcatggagggcccggcatcgctgacccccacgccgagggcttgccgttttcccggaggacgtggacttttgtgagacaagaggcggctccccagcctgggtttccatgtgaccccacagtggggctggaccagggccctggaggccaataaagagctttctgggtagacccta

SEQ ID NO: 301522 - DNA, 926 bp, Homo sapiens
gaaacgtgcacttgcaagctgcccgcaatacgttatggcgaccaaacgccttttcggggctacccggacgtgggccggctggggggcctgggagctcctaaaccccgccacttccggaagactcctggcccgggattatgccaagaaaccagttatgaagggggccaaatcgggaaaaggtgcagtgaccagcgaggccctcaaggaccccgacgtatgcacagatcctgtccagctcaccacatatgccatgggcgtcaacatctacaaggaagggcaggatgtacccctgaaaccggatgctgagtaccctgaatggctgtttgagatgaacttgggtcccccaaagaccctggaggagctggaccccgagagccgggagtactggcggcggctgcggaaacagaacatctggcgccacaaccggctgagcaagaacaagaggttgtagcatggagggcccggcatcgctgacccccacgccgagggcttgccgttttcccggaggacgtggacttttgtgagacaagaggcggctccccagcctgggtttccatgtgaccccacagtggggctggaccagggccctggaggccaataaagagctttctgggtagaccctatttccccttggtattgtctggtgtcggcctggcgggaagtgggtccctcagaccccagggatcccagcctccaccccagccagtggtgggccgtctgcaggtcccctgtgcctccggcccttggtgggcttctctccccaactcctggaattcctgacactgctcacgaggcccggcccaaatctcaagttgctgggtgagggggttgtcctagctaagccactcttggttgcaagggactcaaacctaactatctcaagccatcagagtcagaaaagaggctttatgagcttcaagaaagga

SEQ ID NO: 301523 - DNA, 804 bp, Homo sapiens
gaaacgtgcacttgcaagctgcccgcaatacgttatggcgaccaaacgccttttcggggctacccggacgtgggccggctggggggcctgggagctcctaaaccccgccacttccggaagactcctggcccgggattatgccaagaaaccagttatgaagggggccaaatcgggaaaaggtgcagtgaccagcgaggccctcaaggaccccgacgtatgcacagatcctgtccagctcaccacatatgccatgggcgtcaacatctacaaggaagggcaggatgtacccctgaaaccggatgctgagtaccctgaatggctgtttgagatgaacttgggtcccccaaagaccctggaggagctggaccccgagagccgggagtactggcggcggctgcggaaacagaacatctggcgccacaaccggctgagcaagaacaagaggttgtagcatggagggcccggcatcgctgacccccacgccgagggcttgccgttttcccggaggacgtggacttttgtgagacaagaggcggctccccagcctgggtttccatgtgaccccacagtggggctggaccagggccctggaggccaataaagagctttctgggtagaccctaaaaaaaaaaacaaaaaaaactctctttctctctctctctctctctctctctctctctctctttctcattctctctcttcctctctttcgttcttttcttccttttcctattaatttccctactttttccatctccctctctcattattttcctctcttttaactcttctctgctgcctccg

SEQ ID NO: 301524 - DNA, 557 bp, Homo sapiens
gtagcgcgcagggaaggctggtcaccccaccctaatcttgttatgcaaataggcttcccacttggcaggggccgtcttgtccactcgtttctgtaaacatgggtggcaaaaagagaagatggagctgccatttagaacatgcctaatcccagcttcatcttgctgagcaaaaatgaaggagcctggacccaactttgttactgtgagaaagggtcttcattcattcaagatggcatttgttaagcacctactgctggagtgcagtggttcaatcacggatcactgcagcctccacctcccagttcaagaaattctcatgtctcagcctcctgagcagctaggattacagacaaaccttggaaatcaagaaagttctggaatgatgaagctgttcatgccaagaccgaaagtgctggcccagtatgagtccattcagttcatgccgtgacaattttcttggaactcctttttattgttagttctcacttgtttccatatttagtgaatgtacatttaattgcaaagctgtcattaataaaaattcttatagtacctca

SEQ ID NO: 301525 - DNA, 471 bp, Homo sapiens
cagaagcaagatttaataacaatgcagaacaaggaatcagcaaaacctgttgaaaacgtcagaaaacttaggggaagctggagcagagggttagagttgggagacctgagtgagggtcttggctttcactcagtgtgcagtcaggatccacctaatgtggaataaccatggggttctggaatgggctgagacagtgacatatttgcccatattagtggatccatgaatcattttctacaaagtcttcttgttttgtttttcagacaaaccttggaaatcaagaaagttctggaatgatgaagctgttcatgccaagaccgaaagtgctggcccagtatgagtccattcagttcatgccgtgacaattttcttggaactcctttttattgttagttctcacttgtttccatatttagtgaatgtacatttaattgcaaagctgtcattaataaaaattcttatagtacctca

SEQ ID NO: 301526 - DNA, 835 bp, Homo sapiens
  misc_feature (492)..(492): n is a, c, g, or t
  misc_feature (504)..(505): n is a, c, g, or t
gtagcgcgcagggaaggctggtcaccccaccctaatcttgttatgcaaataggcttcccacttggcaggggccgtcttgtccactcgtttctgtaaacatgggtggcaaaaagagaagatggagctgccatttagaacatgcctaatcccagcttcatcttgctgagcaaaaatgaaggagcctggacccaactttgttactgtgagaaagggtcttcattcattcaagatggcatttgttaagcacctactacaaaccttggaaatcaagaaagttctggaatgatgaagctgttcatgccaagaccgaaagtgctggcccagtatgagtccattcagttcatgccgtgacaattttcttggaactcctttttattgttagttctcacttgtttccatatttagtgaatgtacatttaattgcaaagctgtcattaataaaaattcttatagtacctcaaaaaaaaacaaaagaaaacaaaaaaaaaacantttggggcgctnnggcccaaaaaaggatctaaaacacaatctaggtatggcgaccagagggccacaagaatgagaaactacgaaacatgggggcaacaacgggggggcaacaaaagaaacaccggggggaataagaacattgggtggggtttatcaaccaaataataccacgccggggggaacacacgacggttcggaacaaccccacaaggagatcaggggacagaacggggcacaacacgaggtcaagagggccgagataaatagccgagacggtagagagagcagagcgcagaagagaggagaggaaacaacagagacaagaaaaaggaccgaccacgag

SEQ ID NO: 301527 - DNA, 460 bp, Homo sapiens
gtagcgcgcagggaaggctggtcaccccaccctaatcttgttatgcaaataggcttcccacttggcaggggccgtcttgtccactcgtttctgtaaacatgggtggcaaaaagagaagatggagctgccatttagaacatgcctaatcccagcttcatcttgctgagcaaaaatgaaggagcctggacccaactttgttactgtgagaaagggtcttcattcattcaagatggcatttgttaagcacctactacaaaccttggaaatcaagaaagttctggaatgatgaagctgttcatgccaagaccgaaagtgctggcccagtatgagtccattcagttcatgccgtgacaattttcttggaactcctttttattgttagttctcacttgtttccatatttagtgaatgtacatttaattgcaaagctgtcattaataaaaattcttatagtacctca

SEQ ID NO: 301528 - DNA, 766 bp, Homo sapiens
agcagcagttggaaatgatgtagaatctggggagagaccttttaaagaaaggtgatatcaaggcttgtttgtggactgagaatgatgtgtgatcttggaagtcagcttgagaatggagcagtcaagacacaaattggttggcaggtcatgatcagcatgagaggaatctctatcctgcttccaggctatccttggcactgtgatttttaataaaataatgcactgactttgcattcaaagaaattactggacagtcaaaatatacacacatatgcaaaaattgaggagcaatttcccataagatacaaaccttggaaatcaagaaagttctggaatgatgaagctgttcatgccaagaccgaaagtgctggcccagtatgagtccattcagttcatgccgtgacaattttcttggaactcctttttattgcttgtgctcctggtacatcagcccatttcatggtacgttgaagcatgcctccctgtgggattgctggattcccagcccagtgaggtaatgaccaagcagcgtcttcagaggaaggatagctgtacagcgtggtgaaggactcaatgagaaggtgcattgcccatccttcagagagctctgtgtgaatccataaaaggtgcttaaagcttttcactccatgaagcctcatctgtctcatgaaagcaataaatgcctggaggttcatccatcaagtgaggggccttaaccatgtttccaacaacagcctttccggccccatcttcctatgaaggagaa

SEQ ID NO: 301529 - DNA, 490 bp, Homo sapiens
cagaagcaagatttaataacaatgcagaacaaggaatcagcaaaacctgttgaaaacgtcagaaaacttaggggaagctggagcagagggttagagttgggagacctgagtgagggtcttggctttcactcagtgtgcagtcaggatccacctaatgtggaataaccatggggttctggaatgggctgagacagtgacatatttgcccatattagtggatccatgaatcattttctacaaagtcttcttgttttgtttttcagacaaaccttggaaatcaagaaagttctggaatgatgaagctgttcatgccaagaccgaaagtgctggcccagtatgagtccattcagttcatgccgtgacaattttcttggaactcctttttattgttagttctcacttgtttccatatttagtgaatgtacatttaattgcaaagctgtcattaataaaaattcttatagtacctcactgcacaaacatctttcct

SEQ ID NO: 301530 - DNA, 717 bp, Homo sapiens
gtagcgcgcagggaaggctggtcaccccaccctaatcttgttatgcaaataggcttcccacttggcaggggccgtcttgtccactcgtttctgtaaacatgggtggcaaaaagagaagatggagctgccatttagaacatgcctaatcccagcttcatcttgctgagcaaaaatgaaggagcctggacccaactttgttactgtgagaaagggtcttcattcattcaagatggcatttgttaagcacctactgtgagtagatgatctcctgtcaaagacagttaacaaatcctcggaatattgcttcatgtacagttattggagatgagtaacttacattctcttaattgtaatggttccttggaaagtcatcgtggaaaatgaaggctggctcatacattttcccagacaggaatttggctgccaacagggaattctaaacaactaaaaactccagatgatgaatgcacaacataatgatggttaaattaaaaaaaaaaaagagcacgacaaaccttggaaatcaagaaagttctggaatgatgaagctgttcatgccaagaccgaaagtgctggcccagtatgagtccattcagttcatgccgtgacaattttcttggaactcctttttattgttagttctcacttgtttccatatttagtgaatgtacatttaattgcaaagctgtcattaataaaaattcttatagtacctca

SEQ ID NO: 301531 - DNA, 736 bp, Homo sapiens
gtagcgcgcagggaaggctggtcaccccaccctaatcttgttatgcaaataggcttcccacttggcaggggccgtcttgtccactcgtttctgtaaacatgggtggcaaaaagagaagatggagctgccatttagaacatgcctaatcccagcttcatcttgctgagcaaaaatgaaggagcctggacccaactttgttactgtgagaaagggtcttcattcattcaagatggcatttgttaagcacctactgtgagtagatgatctcctgtcaaagacagttaacaaatcctcggaatattgcttcatgtacagttattggagatgagtaacttacattctcttaattgtaatggttccttggaaagtcatcgtggaaaatgaaggctggctcatacattttcccagacaggaatttggctgccaacagggaattctaaacaactaaaaactccagatgatgaatgcacaacataatgatggttaaattaaaaaaaaaaaagagcacgacaaaccttggaaatcaagaaagttctggaatgatgaagctgttcatgccaagaccgaaagtgctggcccagtatgagtccattcagttcatgccgtgacaattttcttggaactcctttttattgttagttctcacttgtttccatatttagtgaatgtacatttaattgcaaagctgtcattaataaaaattcttatagtacctcactgcacaaacatctttcct

SEQ ID NO: 301532 - DNA, 610 bp, Homo sapiens
gtagcgcgcagggaaggctggtcaccccaccctaatcttgttatgcaaataggcttcccacttggcaggggccgtcttgtccactcgtttctgtaaacatgggtggcaaaaagagaagatggagctgccatttagaacatgcctaatcccagcttcatcttgctgagcaaaaatgaaggagcctggacccaactttgttactgtgagaaagggtcttcattcattcaagatggcatttgttaagcacctactgctggagtgcagtggttcaatcacggatcactgcagcctccacctcccagttcaagaaattctcatgtctcagcctcctgagcagctaggattacagacaaaccttggaaatcaagaaagttctggaatgatgaagctgttcatgccaagaccgaaagtgctggcccagtatgagtccattcagttcatgccgtgacaattttcttggaactcctttttattgttagttctcacttgtttccatatttagtgaatgtacatttaattgcaaagctgtcattaataaaaattcttatagtacctcataaaacacaaaaacgcgaaaatacgaaatgaatgtggcctgagttggcctcaa

SEQ ID NO: 301533 - DNA, 608 bp, Homo sapiens
gtagcgcgcagggaaggctggtcaccccaccctaatcttgttatgcaaataggcttcccacttggcaggggccgtcttgtccactcgtttctgtaaacatgggtggcaaaaagagaagatggagctgccatttagaacatgcctaatcccagcttcatcttgctgagcaaaaatgaaggagcctggacccaactttgttactgtgagaaagggtcttcattcattcaagatggcatttgttaagcacctactgctggagtgcagtggttcaatcacggatcactgcagcctccacctcccagttcaagaaattctcatgtctcagcctcctgagcagctaggattacagacaaaccttggaaatcaagaaagttctggaatgatgaagctgttcatgccaagaccgaaagtgctggcccagtatgagtccattcagttcatgccgtgacaattttcttggaactcctttttattgttagttctcacttgtttccatatttagtgaatgtacatttaattgcaaagctgtcattaataaaaattcttatagtacctcaaaaataaaaatagaaaacataaaataaaaataatggccttcgttggcctca

SEQ ID NO: 301534 - DNA, 911 bp, Homo sapiens
ctgttcatttctgttttgtagttgatgtcagtaacacccaaacaatgcccatgtttgttttcattaatttagcatattgctgtgaggactggttaagccagaaatacttatcattagtgtgatcttggctaccatgtaaaacaatggtttttgcctacttcaagagcttttgtaattaccaaaccgtctaccttcctaacttgctatattaatgctgatgcttgaaagtaagatctttggcatttatgcttacacgttgcatgaagagtaagttgagtacaacatgttatgccatgtattaagtctattaattaaaaacaaattctaagattcaaggagcttttcagtgttccacatttctccctttagaaaaagtaaatgtgtgcagaattaacaaagtgtttaaaaatagatatttattattttactatttggatgaatgtgtagggcagtgcttccttggcactggggatatttcattgagcaaaactaaaaatatcttccctcatggagtttatgttatagtaagacatacatgtacctctataataactattacgttagaaggtataaagtattgtgaaaaatatatagagcagtagtggagtgggaagaaatgttttgaaatagagcttgagattcttgattgtcttgccctctacttgaacagtgtcttctaggaagcccagacacatggagaagttctgagtgttttggccgatagtcccagatgaggttccagcaacagctgggatcacccatgagatgtgagtgaggaaggctttgagatggtttcagccctagccaccactgacctcataagagaccacaagaatgagaatcacctggccaagcccagcagaccttcagaattcagaaataaaataattcatcttattttaaaaaaaagt

SEQ ID NO: 301535 - DNA, 915 bp, Homo sapiens
  misc_feature (495)..(495): n is a, c, g, or t
  misc_feature (607)..(607): n is a, c, g, or t
  misc_feature (615)..(615): n is a, c, g, or t
  misc_feature (628)..(628): n is a, c, g, or t
  misc_feature (630)..(630): n is a, c, g, or t
  misc_feature (634)..(634): n is a, c, g, or t
  misc_feature (636)..(636): n is a, c, g, or t
  misc_feature (644)..(644): n is a, c, g, or t
  misc_feature (654)..(654): n is a, c, g, or t
  misc_feature (912)..(912): n is a, c, g, or t
gatgagaatgaaggctgaggtgtgcgccttttttttttccttcttagtcgtgtgtacatcattgggaatggagggaaataaatgactggatggtcgctgctttttaagtttcaaattgacattccagacaagcggtgcctgagcccgtgcctgtcttcagatcttcacagcacagttcctgggaaggtggagccaccagcctctccctgacaagcaaagtggatcagcaaaggctgcagtcaccagcatcttttccaaccttaatgaactgtatcctcaaaagaacactatcagactggtaagctctgccgacttccagttctggaacaagatggttaaactcatttttccctgctctgctcctctaaatacaactaagtaccttggaaactattcagcagacaatgataaagggctctgaaagctagaagaaaaggtgtacttgcaagaaacctcaggacttgagtaacagcaacatggaaaggagaaagagancacctactgcatttctgtcactcgctgaaaaggacactctgtcagaaaatcttctagcaaacttcaaagggcaaatcaccccttgttactgataaagccagagagcttcagnagttaaantccctgacgggcncngcangntttgaccnaggtcagttnggcagacaccaaagcttcataactcagtgtctatctcccaagataggtccatactgttataatcaccttgtgcacagggttactcatcgatttcaggcaatgacttaatatcaggtgcaacgtgcgtcttgctttgggactgcaactgctgtagcttgacccgaatataacgaagagggccagacgggttccacaaacattcaaggaccggtaaacacttcgtggtcacctccttttagtttagattccctcgcaggnaaa

SEQ ID NO: 301536 - DNA, 1002 bp, Homo sapiens
  misc_feature (849)..(849): n is a, c, g, or t
gatgagaatgaaggctgaggtgtgcgccttttttttttccttcttagtcgtgtgtacatcattgggaatggagggaaataaatgactggatggtcgctgctttttaagtttcaaattgacattccagacaagcggtgcctgagcccgtgcctgtcttcagatcttcacagcacagttcctgggaaggtggagccaccagcctctccctgacaagcaaagtggatcagcaaaggctgcagtcaccagcatcttttccaaccttaatgaactataagaacaagatgggggtgacattttctttttttttttggcaacacgggggctcttgtgcctctgtgttcccccgggcttaaagttgcagcgggtgcgaactctctcgagttcacccgtgcacattctccggcctctccgcgggttcacaaggccaatattcttcgccaactctttcagacctctcgcgaaagttaacaccggggatattaacacgagggggggcgtgtgcacccacacacaaacacaccctgtgggcctatatatatcataggcgacctatatatctagagattcagacaatgtgaggggtattacaaactggtgtgtgtctgtgcgccccagagagcctgtgtgcaccctgtgaaaactctccctgtgacacccctcaggcggttacaccccccacactggtgccttctgcggggacctctcccccaagagagtgggccgtcggaaaaatacacagggcgcgtcgtaaagcccacaggtctgcccccccgcgtgccacaacaaacgtgggggcgatacaatatcgcagaggcttcccaagaaacccccacgacgtcgtgcgacacnactctctaagcgggcagtgaagaccctctcgccgacaatgtggtacacacctcttagagtgaaaagcccccctcttggcttagaaaacatcttcttcacaaagcaggcttcataactaagaaacagcgcaagcattaattatgtcctcccccc

SEQ ID NO: 301537 - DNA, 395 bp, Homo sapiens
aattagttgtctttagagcaaaaatccgtctaagagtgcagtgtggtttcctatgcacaatctggaatagtccattgcttcatgcctaccctggacatgaagggccgtgccacagtggaagtctctatgcatccacccctgtctatacctgagcaactcattcctctttgctgctctcttacaggctacagagtgcggtggcgccagcacagaactctgctcaatgtccctctgtgctttcacgatgctgatggattatgaaggtagggaagaatgtacagccaggaggccattaggagggcaactaatttataaaatcgcatttgtagaatttaatgcatccaacacctaccaggggaaaggtgggcaaaagctataccaacaccacccaagtc

SEQ ID NO: 301538 - DNA, 4650 bp, Homo sapiens
gatgagaatgaaggctgaggtgtgcgccttttttttttccttcttagtcgtgtgtacatcattgggaatggagggaaataaatgactggatggtcgctgctttttaagtttcaaattgacattccagacaagcggtgcctgagcccgtgcctgtcttcagatcttcacagcacagttcctgggaaggtggagccaccagcctctccctgacaagcaaagtggatcagcaaaggctgcagtcaccagcatcttttccaaccttaatgaactgtatcctcaaaagaacactatcagactggtaagacaagcattattgtcccacttcacagatgaagagcttgggggccctgtggatgtgtaggagagtcggccttcctttttataggccttttgctgagctcagaggacagagcagaagacaaagccgaatgcagccctaagcagacactatcccagcccaaggagctatgcagacagctcctgcctagaggagaaacaattctctccttcagccaggcatgtggcacagaggtgaacaggaaatgcttagggagacagttcacagatatatatgtacttcacagggcacaatttaatccataaatcaatcatggatcaccgctaaagaaaacaaaatatgctgccactaatttgccaccaccctgtgagcatgattggatgatgtttattttgattaggagattgctccatttataaatcttcaatacatcctgtccccctaaaacggcatctgggtcttttgagggttaaaaaaaaaaaaaagtgaaattggatgagggatgagagctggacttctgtgtgtcccggggtccctggatccacagcctggtgcctagcatcagttaagcccacgctggggtcgcatcacatcccgcaaagccacgtgctctgtgaggccaacaggagccccgccgggtggaccagctggaatctcagagagcgccgactctgaaactacccggctctgcagaagcacgctgggcccaggggcttctagactgacagctccatttatcaactacctattggttttaaaaattggagtgtcttttccgcgttgactgattttggctctaagagatgtcgctggtcatttcagagtgactgaacctcccctctaacagatcccgggaattgttttcaggaaaggtaaaaggcagccttttctgtcacaacacaacgctgagccggcagcctggctctgtcaggatctggggctcccgcgcccgagaagcccagcctcgccggcggccaagttcaccgcgaggccccgcgctgcctgcgctgcgctcccggacccgcaccgaccgcagcgcgcgccgccggtgcttctcccaccccagcctggaagctgcctccctccgcctatgcctgcaggataagaagcccgaggaggcggagcatggaactcgacagttaaaacatttaagagagaaaacctagtgtcttgctggcctgaaatcgagtacgcagcccggggtgatcagggtctcccggcccggatgtgtgagacttgcttcccctgggcaataggcgatacgatgctttaggaggaaggtgtctctccctcctaagccccggaggggagaacttccaaagacagaaaaccacaggcttctggcacagagctttccctttatcagctaaagcagaatcttttctggccttaacctggccccttcctctaactgcaggcagagaggcagacagaaaagcacttgctgaaacacaaagttttgttctgtcctcaacgaactgtctagagctgattgctgatagtcgtggtgcattatgccttcctggttttcatttaattgggcaccacgctgcctttcaagacgccttaaaggaaccaacaaccaaatccaagagagctggacagaccattgaacacacagtaggctgtgtctcgtggctttcgttgtctggtgcctcaaagaaaacaccagaaagattgtttctaagctagagccaccccagattgcttaaagtgcaaagctcactgctgttgggggtacccttgtgagacactggaaagctggttttaccgtggccctatgaagaggaagactgaaatttagacagtaatacctttactaggattggaaaagatttggttaatgacagccctgtcatttctaaaacccattatcactgtatgagagattcctttgcgctgcatcctcgacagtgcttcctaaggctctgccgacttccagttctggaacaagatggttaaactcatttttccctgctctgctcctctaaatacaactaagtaccttggaaactattcagcagacaatgataaagggctctgaaagctagaagaaaaggtgtacttgcaagaaacctcaggacttgagtaacagcaacatgtttgactttgaaggatcactttcccctgtcattgcgcccaaaaaagcaaggccttctgagactggatctgatgatgactgggaatatttactaaattcagactaccaccagagtgttgagtctcatcttttgaacagatctttatgtctgagtccttcagaagcttcacagatgaaggatgaggatttttcacagaatctcagtctggattcttctacacttctctttactcacatacctgcaatttttttcgttcttcgccttgtgtatgaggagcttaagttgaatactctaatgggagaaggaatttgttcactcttgaacttctcgttcagttggcaaggtcaaacaggatttatgcatcatccatcattttttacgtctgagccaccaagtatttatcagtgggtgagttcttgtctgaagggcgaaggaatgccgccttatccttacctccctggaatctgtgaaagaagcagacttgtagtcttgagtattgcactgtacatacttggtgatgagagctcagtttctgatgaatcctcacagtatttaaccagaataactgtagccccccagaagttgcaagcagaacaagaggaaaacaggtttagtttcaggcattctacgtctgtttctagtctagctgaaagattggttggctggatgactaatgtaggattcactttaagagatttggaaactcttccctttggaattgctcttcccatcagagatgcaatttatcactgtcgtgagcagcctgcctcagactggccagaagctgtctgtctcttgactggacgtcaggatctttccaagcaggcctgcgaaggaaacttacccaaagggaagtctgtgctctcatcagatgttccttcaggtacagaaactgaggaggaagatgacggcatgaatgacatgaatcacgaggtcatgtcattaatatggagtgaagatttacgggtgcaggatgtgcgaaggcttcttcagagtgcgcatcctgtccgtgtcaacgtagtgcagtacccagagctcagtgaccacgagttcatcgaggaaaaggaaaacagattgctccaattgtgtcagcgaactatggctcttcctgtaggacgaggaatgtttaccttgttttcgtaccatcctgttccaacagagccattgcctattcctaaattgaatctgactgggcgtgcccctcctcggaacacaacagtagaccttaatagtggaaacatcgatgtgcctcccaacatgacaagctgggccagctttcataatggtgtggctgctggcctgaagatagctcctgcctcccagatcgactcagcttggattgtttacaataagcccaagcatgctgagttggccaatgagtatgctggctttctcatggctctgggtttgaatgggcaccttaccaagctggcgactctcaatatccatgactacttgaccaagggccatgaaatgacaagcattggactgctacttggtgtttctgctgcaaaactaggcaccatggatatgtctattactcggcttcttagcattcgcattcctgctctcttacccccaacgtccacagagctggatgttcctcacaatgtccaagtggctgcagtggttggcattggccttgtatatcaagggacagctcacagacatactgcagaagtcctgttggctgagataggacggcctcctggtcctgaaatggaatactgcactgacagaaagtcatactccttagctgctggcttggccctgggcatggtctgcttggggcatggcagcaatttgataggtatgtctgatctcaatgtgcctgagcagctctatcagtacatggttggaggacataggcgctttcaaacaggaatgcatagggagaaacataaatcaccaagttatcaaatcaaagaaggagataccataaatgtggatgtgacttgtccaggtgctactctagctttggctatgatctacttaaaaaccaataacagtgtcttctaggaagcccagacacatggagaagttctgagtgttttggccgatagtcccagatgaggttccagcaacagctgggatcacccatgagatgtgagtgaggaaggctttgagatggtttcagccctagccaccactgacctcataagagaccacaagaatgagaatcacctggccaagcccagcagaccttcagaattcagaaataaaataattcatcttattttaaaaaaaagt

SEQ ID NO: 301539 - DNA, 2729 bp, Homo sapiens
gatgagaatgaaggctgaggtgtgcgccttttttttttccttcttagtcgtgtgtacatcattgggaatggagggaaataaatgactggatggtcgctgctttttaagtttcaaattgacattccagacaagcggtgcctgagcccgtgcctgtcttcagatcttcacagcacagttcctgggaaggtggagccaccagcctctccctgacaagcaaagtggatcagcaaaggctgcagtcaccagcatcttttccaaccttaatgaactgtatcctcaaaagaacactatcagactggtaagctctgccgacttccagttctggaacaagatggttaaactcatttttccctgctctgctcctctaaatacaactaagtaccttggaaactattcagcagacaatgataaagggctctgaaagctagaagaaaaggtgtacttgcaagaaacctcaggacttgagtaacagcaacatgtttgactttgaaggatcactttcccctgtcattgcgcccaaaaaagcaaggccttctgagactggatctgatgatgactgggaatatttactaaattcagactaccaccagagtgttgagtctcatcttttgaacagatctttatgtctgagtccttcagaagcttcacagatgaaggatgaggatttttcacagaatctcagtctggattcttctacacttctctttactcacatacctgcaatttttttcgttcttcgccttgtgtatgaggagcttaagttgaatactctaatgggagaaggaatttgttcactcttgaacttctcgttcagttggcaaggtcaaacaggatttatgcatcatccatcattttttacgtctgagccaccaagtatttatcagtgggtgagttcttgtctgaagggcgaaggaatgccgccttatccttacctccctggaatctgtgaaagaagcagacttgtagtcttgagtattgcactgtacatacttggtgatgagagctcagtttctgatgaatcctcacagtatttaaccagaataactgtagccccccagaagttgcaagcagaacaagaggaaaacaggtttagtttcaggcattctacgtctgtttctagtctagctgaaagattggttggctggatgactaatgtaggattcactttaagagatttggaaactcttccctttggaattgctcttcccatcagagatgcaatttatcactgtcgtgagcagcctgcctcagactggccagaagctgtctgtctcttgactggacgtcaggatctttccaagcaggcctgcgaaggaaacttacccaaagggaagtctgtgctctcatcagatgttccttcaggtacagaaactgaggaggaagatgacggcatgaatgacatgaatcacgaggtcatgtcattaatatggagtgaagatttacgggtgcaggatgtgcgaaggcttcttcagagtgcgcatcctgtccgtgtcaacgtagtgcagtacccagagctcagtgaccacgagttcatcgaggaaaaggaaaacagattgctccaattgtgtcagcgaactatggctcttcctgtaggacgaggaatgtttaccttgttttcgtaccatcctgttccaacagagccattgcctattcctaaattgaatctgactgggcgtgcccctcctcggaacacaacagtagaccttaatagtggaaacatcgatgtgcctcccaacatgacaagctgggccagctttcataatggtgtggctgctggcctgaagatagctcctgcctcccagatcgactcagcttggattgtttacaataagcccaagcatgctgagttggccaatgagtatgctggctttctcatggctctgggtttgaatgggcaccttaccaagctggcgactctcaatatccatgactacttgaccaagggccatgaaatgacaagcattggactgctacttggtgtttctgctgcaaaactaggcaccatggatatgtctattactcggcttcttagcattcgcattcctgctctcttacccccaacgtccacagagctggatgttcctcacaatgtccaagtggctgcagtggttggcattggccttgtatatcaagggacagctcacagacatactgcagaagtcctgttggctgagataggacggcctcctggtcctgaaatggaatactgcactgacagaaagtcatactccttagctgctggcttggccctgggcatggtctgcttggggcatggcagcaatttgataggtatgtctgatctcaatgtgcctgagcagctctatcagtacatggttggaggacataggcgctttcaaacaggaatgcatagggagaaacataaatcaccaagttatcaaatcaaagaaggagataccataaatgtggatgtgacttgtccaggtgctactctagctttggctatgatctacttaaaaaccaataacagtgtcttctaggaagcccagacacatggagaagttctgagtgttttggccgatagtcccagatgaggttccagcaacagctgggatcacccatgagatgtgagtgaggaaggctttgagatggtttcagccctagccaccactgacctcataagagaccacaagaatgagaatcacctggccaagcccagcagaccttcagaattcagaaataaaataattcatcttattttaaaaaaaagt

SEQ ID NO: 301540 - DNA, 3188 bp, Homo sapiens
gatgagaatgaaggctgaggtgtgcgccttttttttttccttcttagtcgtgtgtacatcattgggaatggagggaaataaatgactggatggtcgctgctttttaagtttcaaattgacattccagacaagcggtgcctgagcccgtgcctgtcttcagatcttcacagcacagttcctgggaaggtggagccaccagcctctccctgacaagcaaagtggatcagcaaaggctgcagtcaccagcatcttttccaaccttaatgaactgtatcctcaaaagaacactatcagactggtaagtcctcaacgaactgtctagagctgattgctgatagtcgtggtgcattatgccttcctggttttcatttaattgggcaccacgctgcctttcaagacgccttaaaggaaccaacaaccaaatccaagagagctggacagaccattgaacacacagtaggctgtgtctcgtggctttcgttgtctggtgcctcaaagaaaacaccagaaagattgtttctaagctagagccaccccagattgcttaaagtgcaaagctcactgctgttgggggtacccttgtgagacactggaaagctggttttaccgtggccctatgaagaggaagactgaaatttagacagtaatacctttactaggattggaaaagatttggttaatgacagccctgtcatttctaaaacccattatcactgtatgagagattcctttgcgctgcatcctcgacagtgcttcctaaggctctgccgacttccagttctggaacaagatggttaaactcatttttccctgctctgctcctctaaatacaactaagtaccttggaaactattcagcagacaatgataaagggctctgaaagctagaagaaaaggtgtacttgcaagaaacctcaggacttgagtaacagcaacatgtttgactttgaaggatcactttcccctgtcattgcgcccaaaaaagcaaggccttctgagactggatctgatgatgactgggaatatttactaaattcagactaccaccagagtgttgagtctcatcttttgaacagatctttatgtctgagtccttcagaagcttcacagatgaaggatgaggatttttcacagaatctcagtctggattcttctacacttctctttactcacatacctgcaatttttttcgttcttcgccttgtgtatgaggagcttaagttgaatactctaatgggagaaggaatttgttcactcttgaacttctcgttcagttggcaaggtcaaacaggatttatgcatcatccatcattttttacgtctgagccaccaagtatttatcagtgggtgagttcttgtctgaagggcgaaggaatgccgccttatccttacctccctggaatctgtgaaagaagcagacttgtagtcttgagtattgcactgtacatacttggtgatgagagctcagtttctgatgaatcctcacagtatttaaccagaataactgtagccccccagaagttgcaagcagaacaagaggaaaacaggtttagtttcaggcattctacgtctgtttctagtctagctgaaagattggttggctggatgactaatgtaggattcactttaagagatttggaaactcttccctttggaattgctcttcccatcagagatgcaatttatcactgtcgtgagcagcctgcctcagactggccagaagctgtctgtctcttgactggacgtcaggatctttccaagcaggcctgcgaaggaaacttacccaaagggaagtctgtgctctcatcagatgttccttcaggtacagaaactgaggaggaagatgacggcatgaatgacatgaatcacgaggtcatgtcattaatatggagtgaagatttacgggtgcaggatgtgcgaaggcttcttcagagtgcgcatcctgtccgtgtcaacgtagtgcagtacccagagctcagtgaccacgagttcatcgaggaaaaggaaaacagattgctccaattgtgtcagcgaactatggctcttcctgtaggacgaggaatgtttaccttgttttcgtaccatcctgttccaacagagccattgcctattcctaaattgaatctgactgggcgtgcccctcctcggaacacaacagtagaccttaatagtggaaacatcgatgtgcctcccaacatgacaagctgggccagctttcataatggtgtggctgctggcctgaagatagctcctgcctcccagatcgactcagcttggattgtttacaataagcccaagcatgctgagttggccaatgagtatgctggctttctcatggctctgggtttgaatgggcaccttaccaagctggcgactctcaatatccatgactacttgaccaagggccatgaaatgacaagcattggactgctacttggtgtttctgctgcaaaactaggcaccatggatatgtctattactcggcttcttagcattcgcattcctgctctcttacccccaacgtccacagagctggatgttcctcacaatgtccaagtggctgcagtggttggcattggccttgtatatcaagggacagctcacagacatactgcagaagtcctgttggctgagataggacggcctcctggtcctgaaatggaatactgcactgacagaaagtcatactccttagctgctggcttggccctgggcatggtctgcttggggcatggcagcaatttgataggtatgtctgatctcaatgtgcctgagcagctctatcagtacatggttggaggacataggcgctttcaaacaggaatgcatagggagaaacataaatcaccaagttatcaaatcaaagaaggagataccataaatgtggatgtgacttgtccaggtgctactctagctttggctatgatctacttaaaaaccaataacagtgtcttctaggaagcccagacacatggagaagttctgagtgttttggccgatagtcccagatgaggttccagcaacagctgggatcacccatgagatgtgagtgaggaaggctttgagatggtttcagccctagccaccactgacctcataagagaccacaagaatgagaatcacctggccaagcccagcagaccttcagaattcagaaataaaataattcatcttattttaaaaaaaagt

SEQ ID NO: 301541 - DNA, 4814 bp, Homo sapiens
gatgagaatgaaggctgaggtgtgcgccttttttttttccttcttagtcgtgtgtacatcattgggaatggagggaaataaatgactggatggtcgctgctttttaagtttcaaattgacattccagacaagcggtgcctgagcccgtgcctgtcttcagatcttcacagcacagttcctgggaaggtggagccaccagcctctccctgacaagcaaagtggatcagcaaaggctgcagtcaccagcatcttttccaaccttaatgaactgtatcctcaaaagaacactatcagactggtaagacaagcattattgtcccacttcacagatgaagagcttgggggccctgtggatgtgtaggagagtcggccttcctttttataggccttttgctgagctcagaggacagagcagaagacaaagccgaatgcagccctaagcagacactatcccagcccaaggagctatgcagacagctcctgcctagaggagaaacaattctctccttcagccaggcatgtggcacagaggtgaacaggaaatgcttagggagacagttcacagatatatatgtacttcacagggcacaatttaatccataaatcaatcatggatcaccgctaaagaaaacaaaatatgctgccactaatttgccaccaccctgtgagcatgattggatgatgtttattttgattaggagattgctccatttataaatcttcaatacatcctgtccccctaaaacggcatctgggtcttttgagggttaaaaaaaaaaaaaagtgaaattggatgagggatgagagctggacttctgtgtgtcccggggtccctggatccacagcctggtgcctagcatcagttaagcccacgctggggtcgcatcacatcccgcaaagccacgtgctctgtgaggccaacaggagccccgccgggtggaccagctggaatctcagagagcgccgactctgaaactacccggctctgcagaagcacgctgggcccaggggcttctagactgacagctccatttatcaactacctattggttttaaaaattggagtgtcttttccgcgttgactgattttggctctaagagatgtcgctggtcatttcagagtgactgaacctcccctctaacagatcccgggaattgttttcaggaaaggtaaaaggcagccttttctgtcacaacacaacgctgagccggcagcctggctctgtcaggatctggggctcccgcgcccgagaagcccagcctcgccggcggccaagttcaccgcgaggccccgcgctgcctgcgctgcgctcccggacccgcaccgaccgcagcgcgcgccgccggtgcttctcccaccccagcctggaagctgcctccctccgcctatgcctgcaggataagaagcccgaggaggcggagcatggaactcgacagttaaaacatttaagagagaaaacctagtgtcttgctggcctgaaatcgagtacgcagcccggggtgatcagggtctcccggcccggatgtgtgagacttgcttcccctgggcaataggcgatacgatgctttaggaggaaggtgtctctccctcctaagccccggaggggagaacttccaaagacagaaaaccacaggcttctggcacagagctttccctttatcagctaaagcagaatcttttctggccttaacctggccccttcctctaactgcaggcagagaggcagacagaaaagcacttgctgaaacacaaagttttgttctgtcctcaacgaactgtctagagctgattgctgatagtcgtggtgcattatgccttcctggttttcatttaattgggcaccacgctgcctttcaagacgccttaaaggaaccaacaaccaaatccaagagagctggacagaccattgaacacacagtaggctgtgtctcgtggctttcgttgtctggtgcctcaaagaaaacaccagaaagattgtttctaagctagagccaccccagattgcttaaagtgcaaagctcactgctgttgggggtacccttgtgagacactggaaagctggttttaccgtggccctatgaagaggaagactgaaatttagacagtaatacctttactaggattggaaaagatttggttaatgacagccctgtcatttctaaaacccattatcactgtatgagagattcctttgcgctgcatcctcgacagtgcttcctaaggctctgccgacttccagttctggaacaagatggttaaactcatttttccctgctctgctcctctaaatacaactaagtaccttggaaactattcagcagacaatgataaagggctctgaaagctagaagaaaaggtgtacttgcaagaaacctcaggacttgagtaacagcaacatgtttgactttgaaggatcactttcccctgtcattgcgcccaaaaaagcaaggccttctgagactggatctgatgatgactgggaatatttactaaattcagactaccaccagagtgttgagtctcatcttttgaacagatctttatgtctgagtccttcagaagcttcacagatgaaggatgaggatttttcacagaatctcagtctggattcttctacacttctctttactcacatacctgcaatttttttcgttcttcgccttgtgtatgaggagcttaagttgaatactctaatgggagaaggaatttgttcactcttgaacttctcgttcagttggcaaggtcaaacaggatttatgcatcatccatcattttttacgtctgagccaccaagtatttatcagtgggtgagttcttgtctgaagggcgaaggaatgccgccttatccttacctccctggaatctgtgaaagaagcagacttgtagtcttgagtattgcactgtacatacttggtgatgagagctcagtttctgatgaatcctcacagtatttaaccagaataactgtagccccccagaagttgcaagcagaacaagaggaaaacaggtttagtttcaggcattctacgtctgtttctagtctagctgaaagattggttggctggatgactaatgtaggattcactttaagagatttggaaactcttccctttggaattgctcttcccatcagagatgcaatttatcactgtcgtgagcagcctgcctcagactggccagaagctgtctgtctcttgactggacgtcaggatctttccaagcaggcctgcgaaggaaacttacccaaagggaagtctgtgctctcatcagatgttccttcaggtacagaaactgaggaggaagatgacggcatgaatgacatgaatcacgaggtcatgtcattaatatggagtgaagatttacgggtgcaggatgtgcgaaggcttcttcagagtgcgcatcctgtccgtgtcaacgtagtgcagtacccagagctcagtgaccacgagttcatcgaggaaaaggaaaacagattgctccaattgtgtcagcgaactatggctcttcctgtaggacgaggaatgtttaccttgttttcgtaccatcctgttccaacagagccattgcctattcctaaattgaatctgactgggcgtgcccctcctcggaacacaacagtagaccttaatagtggaaacatcgatgtgcctcccaacatgacaagctgggccagctttcataatggtgtggctgctggcctgaagatagctcctgcctcccagatcgactcagcttggattgtttacaataagcccaagcatgctgagttggccaatgagtatgctggctttctcatggctctgggtttgaatgggcaccttaccaagctggcgactctcaatatccatgactacttgaccaagggccatgaaatgacaagcattggactgctacttggtgtttctgctgcaaaactaggcaccatggatatgtctattactcggcttcttagcattcgcattcctgctctcttacccccaacgtccacagagctggatgttcctcacaatgtccaagtggctgcagtggttggcattggccttgtatatcaagggacagctcacagacatactgcagaagtcctgttggctgagataggacggcctcctggtcctgaaatggaatactgcactgacagaaagtcatactccttagctgctggcttggccctgggcatggtctgcttggggcatggcagcaatttgataggtatgtctgatctcaatgtgcctgagcagctctatcagtacatggttggaggacataggcgctttcaaacaggaatgcatagggagaaacataaatcaccaagttatcaaatcaaagtaagtacacagcaaagtaatagatcaaaagtctggaagctgggaagttaattggaaaatactagtgttcatcctgacattggtaaatatgttaattttaagcatacttatcagaggaattttataaaaatttagaactcttttacatgcataaactcttctttgaaggagataccataaatgtggatgtgacttgtccaggtgctactctagctttggctatgatctacttaaaaaccaataacagtgtcttctaggaagcccagacacatggagaagttctgagtgttttggccgatagtcccagatgaggttccagcaacagctgggatcacccatgagatgtgagtgaggaaggctttgagatggtttcagccctagccaccactgacctcataagagaccacaagaatgagaatcacctggccaagcccagcagaccttcagaattcagaaataaaataattcatcttattttaaaaaaaagt

SEQ ID NO: 301542 - DNA, 4515 bp, Homo sapiens
gatgagaatgaaggctgaggtgtgcgccttttttttttccttcttagtcgtgtgtacatcattgggaatggagggaaataaatgactggatggtcgctgctttttaagtttcaaattgacattccagacaagcggtgcctgagcccgtgcctgtcttcagatcttcacagcacagttcctgggaaggtggagccaccagcctctccctgacaagcaaagtggatcagcaaaggctgcagtcaccagcatcttttccaaccttaatgaactgtatcctcaaaagaacactatcagactggtaagacaagcattattgtcccacttcacagatgaagagcttgggggccctgtggatgtgtaggagagtcggccttcctttttataggccttttgctgagctcagaggacagagcagaagacaaagccgaatgcagccctaagcagacactatcccagcccaaggagctatgcagacagctcctgcctagaggagaaacaattctctccttcagccaggcatgtggcacagaggtgaacaggaaatgcttagggagacagttcacagatatatatgtacttcacagggcacaatttaatccataaatcaatcatggatcaccgctaaagaaaacaaaatatgctgccactaatttgccaccaccctgtgagcatgattggatgatgtttattttgattaggagattgctccatttataaatcttcaatacatcctgtccccctaaaacggcatctgggtcttttgagggttaaaaaaaaaaaaaagtgaaattggatgagggatgagagctggacttctgtgtgtcccggggtccctggatccacagcctggtgcctagcatcagttaagcccacgctggggtcgcatcacatcccgcaaagccacgtgctctgtgaggccaacaggagccccgccgggtggaccagctggaatctcagagagcgccgactctgaaactacccggctctgcagaagcacgctgggcccaggggcttctagactgacagctccatttatcaactacctattggttttaaaaattggagtgtcttttccgcgttgactgattttggctctaagagatgtcgctggtcatttcagagtgactgaacctcccctctaacagatcccgggaattgttttcaggaaaggtaaaaggcagccttttctgtcacaacacaacgctgagccggcagcctggctctgtcaggatctggggctcccgcgcccgagaagcccagcctcgccggcggccaagttcaccgcgaggccccgcgctgcctgcgctgcgctcccggacccgcaccgaccgcagcgcgcgccgccggtgcttctcccaccccagcctggaagctgcctccctccgcctatgcctgcaggataagaagcccgaggaggcggagcatggaactcgacagttaaaacatttaagagagaaaacctagtgtcttgctggcctgaaatcgagtacgcagcccggggtgatcagggtctcccggcccggatgtgtgagacttgcttcccctgggcaataggcgatacgatgctttaggaggaaggtgtctctccctcctaagccccggaggggagaacttccaaagacagaaaaccacaggcttctggcacagagctttccctttatcagctaaagcagaatcttttctggccttaacctggccccttcctctaactgcaggcagagaggcagacagaaaagcacttgctgaaacacaaagttttgttctgtcctcaacgaactgtctagagctgattgctgatagtcgtggtgcattatgccttcctggttttcatttaattgggcaccacgctgcctttcaagacgccttaaaggaaccaacaaccaaatccaagagagctggacagaccattgaacacacagtaggctgtgtctcgtggctttcgttgtctggtgcctcaaagaaaacaccagaaagattgtttctaagctagagccaccccagattgcttaaagtgcaaagctcactgctgttgggggtacccttgtgagacactggaaagctggttttaccgtggccctatgaagaggaagactgaaatttagacagtaatacctttactaggattggaaaagatttggttaatgacagccctgtcatttctaaaacccattatcactgtatgagagattcctttgcgctgcatcctcgacagtgcttcctaaggctctgccgacttccagttctggaacaagatggttaaactcatttttccctgctctgctcctctaaatacaactaagtaccttggaaactattcagcagacaatgataaagggctctgaaagctagaagaaaaggtgtacttgcaagaaacctcaggacttgagtaacagcaacatgtttgactttgaaggatcactttcccctgtcattgcgcccaaaaaagcaaggccttctgagactggatctgatgatgactgggaatatttactaaattcagactaccaccagagtgttgagtctcatcttttgaacagatctttatgtctgagtccttcagaagcttcacagatgaaggatgaggatttttcacagaatctcagtctggattcttctacacttctctttactcacatacctgcaatttttttcgttcttcgccttgtgtatgaggagcttaagttgaatactctaatgggagaaggaatttgttcactcttgaacttctcgttcagttggcaaggtcaaacaggatttatgcatcatccatcattttttacgtctgagccaccaagtatttatcagtgggtgagttcttgtctgaagggcgaaggaatgccgccttatccttacctccctggaatctgtgaaagaagcagacttgtagtcttgagtattgcactgtacatacttggtgatgagagctcagtttctgatgaatcctcacagtatttaaccagaataactgtagccccccagaagttgcaagcagaacaagaggaaaacaggtttagtttcaggcattctacgtctgtttctagtctagctgaaagattggttggctggatgactaatgtaggattcactttaagagatttggaaactcttccctttggaattgctcttcccatcagagatgcaatttatcactgtcgtgagcagcctgcctcagactggccagaagctgtctgtctcttgactggacgtcaggatctttccaagcaggcctgcgaaggaaacttacccaaagggaagtctgtgctctcatcagatgttccttcaggtacagaaactgaggaggaagatgacggcatgaatgacatgaatcacgaggtcatgtcattaatatggagtgaagatttacgggtgcaggatgtgcgaaggcttcttcagagtgcgcatcctgtccgtgtcaacgtagtgcagtacccagagctcagtgaccacgagttcatcgaggaaaaggaaaacagattgctccaattgtgtcagcgaactatggctcttcctgtaggacgaggaatgtttaccttgttttcgtaccatcctgttccaacagagccattgcctattcctaaattgaatctgactgggcgtgcccctcctcggaacacaacagtagaccttaatagtggaaacatcgatgtgcctcccaacatgacaagctgggccagctttcataatggtgtggctgctggcctgaagatagctcctgcctcccagatcgactcagcttggattgtttacaataagcccaagcatgctgagttggccaatgagtatgctggctttctcatggctctgggtttgaatgggcaccttaccaagctggcgactctcaatatccatgactacttgaccaagggccatgaaatgacaagcattggactgctacttggtgtttctgctgcaaaactaggcaccatggatatgtctattactcggcttcttagcattcgcattcctgctctcttacccccaacgtccacagagctggatgttcctcacaatgtccaagtggctgcagtggttggcattggccttgtatatcaagggacagctcacagacatactgcagaagtcctgttggctgagataggacggcctcctggtcctgaaatggaatactgcactgacagaaagtcatactccttagctgctggcttggccctgggcatggtctgcttgggggaaggagataccataaatgtggatgtgacttgtccaggtgctactctagctttggctatgatctacttaaaaaccaataacagtgtcttctaggaagcccagacacatggagaagttctgagtgttttggccgatagtcccagatgaggttccagcaacagctgggatcacccatgagatgtgagtgaggaaggctttgagatggtttcagccctagccaccactgacctcataagagaccacaagaatgagaatcacctggccaagcccagcagaccttcagaattcagaaataaaataattcatcttattttaaaaaaaagt

SEQ ID NO: 301543 - DNA, 4620 bp, Homo sapiens
gatgagaatgaaggctgaggtgtgcgccttttttttttccttcttagtcgtgtgtacatcattgggaatggagggaaataaatgactggatggtcgctgctttttaagtttcaaattgacattccagacaagcggtgcctgagcccgtgcctgtcttcagatcttcacagcacagttcctgggaaggtggagccaccagcctctccctgacaagcaaagtggatcagcaaaggctgcagtcaccagcatcttttccaaccttaatgaactgtatcctcaaaagaacactatcagactggtaagacaagcattattgtcccacttcacagatgaagagcttgggggccctgtggatgtgtaggagagtcggccttcctttttataggccttttgctgagctcagaggacagagcagaagacaaagccgaatgcagccctaagcagacactatcccagcccaaggagctatgcagacagctcctgcctagaggagaaacaattctctccttcagccaggcatgtggcacagaggtgaacaggaaatgcttagggagacagttcacagatatatatgtacttcacagggcacaatttaatccataaatcaatcatggatcaccgctaaagaaaacaaaatatgctgccactaatttgccaccaccctgtgagcatgattggatgatgtttattttgattaggagattgctccatttataaatcttcaatacatcctgtccccctaaaacggcatctgggtcttttgagggttaaaaaaaaaaaaaagtgaaattggatgagggatgagagctggacttctgtgtgtcccggggtccctggatccacagcctggtgcctagcatcagttaagcccacgctggggtcgcatcacatcccgcaaagccacgtgctctgtgaggccaacaggagccccgccgggtggaccagctggaatctcagagagcgccgactctgaaactacccggctctgcagaagcacgctgggcccaggggcttctagactgacagctccatttatcaactacctattggttttaaaaattggagtgtcttttccgcgttgactgattttggctctaagagatgtcgctggtcatttcagagtgactgaacctcccctctaacagatcccgggaattgttttcaggaaaggtaaaaggcagccttttctgtcacaacacaacgctgagccggcagcctggctctgtcaggatctggggctcccgcgcccgagaagcccagcctcgccggcggccaagttcaccgcgaggccccgcgctgcctgcgctgcgctcccggacccgcaccgaccgcagcgcgcgccgccggtgcttctcccaccccagcctggaagctgcctccctccgcctatgcctgcaggataagaagcccgaggaggcggagcatggaactcgacagttaaaacatttaagagagaaaacctagtgtcttgctggcctgaaatcgagtacgcagcccggggtgatcagggtctcccggcccggatgtgtgagacttgcttcccctgggcaataggcgatacgatgctttaggaggaaggtgtctctccctcctaagccccggaggggagaacttccaaagacagaaaaccacaggcttctggcacagagctttccctttatcagctaaagcagaatcttttctggccttaacctggccccttcctctaactgcaggcagagaggcagacagaaaagcacttgctgaaacacaaagttttgttctgtcctcaacgaactgtctagagctgattgctgatagtcgtggtgcattatgccttcctggttttcatttaattgggcaccacgctgcctttcaagacgccttaaaggaaccaacaaccaaatccaagagagctggacagaccattgaacacacagtaggctgtgtctcgtggctttcgttgtctggtgcctcaaagaaaacaccagaaagattgtttctaagctagagccaccccagattgcttaaagtgcaaagctcactgctgttgggggtacccttgtgagacactggaaagctggttttaccgtggccctatgaagaggaagactgaaatttagacagtaatacctttactaggattggaaaagatttggttaatgacagccctgtcatttctaaaacccattatcactgtatgagagattcctttgcgctgcatcctcgacagtgcttcctaaggctctgccgacttccagttctggaacaagatggttaaactcatttttccctgctctgctcctctaaatacaactaagtaccttggaaactattcagcagacaatgataaagggctctgaaagctagaagaaaaggtgtacttgcaagaaacctcaggacttgagtaacagcaacatgtttgactttgaaggatcactttcccctgtcattgcgcccaaaaaagcaaggccttctgagactggatctgatgatgactgggaatatttactaaattcagactaccaccagagtgttgagtctcatcttttgaacagatctttatgtctgagtccttcagaagcttcacagatgaaggatgaggatttttcacagaatctcagtctggattcttctacacttctctttactcacatacctgcaatttttttcgttcttcgccttgtgtatgaggagcttaagttgaatactctaatgggagaaggaatttgttcactcttgaacttctcgttcagttggcaaggtcaaacaggatttatgcatcatccatcattttttacgtctgagccaccaagtatttatcagtgggtgagttcttgtctgaagggcgaaggaatgccgccttatccttacctccctggaatctgtgaaagaagcagacttgtagtcttgagtattgcactgtacatacttggtgatgagagctcagtttctgatgaatcctcacagtatttaaccagaataactgtagccccccagaagttgcaagcagaacaagaggaaaacaggtttagtttcaggcattctacgtctgtttctagtctagctgaaagattggttggctggatgactaatgtaggattcactttaagagatttggaaactcttccctttggaattgctcttcccatcagagatgcaatttatcactgtcgtgagcagcctgcctcagactggccagaagctgtctgtctcttgactggacgtcaggatctttccaagcaggcctgcgaaggaaacttacccaaagggaagtctgtgctctcatcagatgttccttcaggtacagaaactgaggaggaagatgacggcatgaatgacatgaatcacgaggtcatgtcattaatatggagtgaagatttacgggtgcaggatgtgcgaaggcttcttcagagtgcgcatcctgtccgtgtcaacgtagtgcagtacccagagctcagtgaccacgagttcatcgaggaaaaggaaaacagattgctccaattgtgtcagcgaactatggctcttcctgtaggacgaggaatgtttaccttgttttcgtaccatcctgttccaacagagccattgcctattcctaaattgaatctgactgggcgtgcccctcctcggaacacaacagtagaccttaatagtggaaacatcgatgtgcctcccaacatgacaagctgggccagctttcataatggtgtggctgctggcctgaagatagctcctgcctcccagatcgactcagcttggattgtttacaataagcccaagcatgctgagttggccaatgagtatgctggctttctcatggctctgggtttgaatgggcaccttaccaagctggcgactctcaatatccatgactacttgaccaagggccatgaaatgacaagcattggactgctacttggtgtttctgctgcaaaactaggcaccatggatatgtctattactcggcttcttagcattcgcattcctgctctcttacccccaacgtccacagagctggatgttcctcacaatgtccaagtggctgcagtggttggcattggccttgtatatcaagggacagctcacagacatactgcagaagtcctgttggctgagataggacggcctcctggtcctgaaatggaatactgcactgacagaaagtcatactccttagctgctggcttggccctgggcatggtctgcttggggcatggcagcaatttgataggtatgtctgatctcaatgtgcctgagcagctctatcagtacatggttggaggacataggcgctttcaaacaggaatgcatagggagaaacataaatcaccaagttatcaaatcaaagaaggagataccataaatgtggatgtgacttgtccaggtgctactctagctttggctatgatctacttaaaaaccaataacaggctacagagtgcggtggcgccagcacagaactctgctcaatgtccctctgtgctttcacgatgctgatggattatgaaggtagggaagaatgtacagccaggaggccattaggagggcaactaatttataaaatcgcatttgtagaatttaatgcatccaacacctaccaggggaaaggtgggcaaaagctataccaacaccacccaagtc

SEQ ID NO: 301544 - DNA, 4669 bp, Homo sapiens
gatgagaatgaaggctgaggtgtgcgccttttttttttccttcttagtcgtgtgtacatcattgggaatggagggaaataaatgactggatggtcgctgctttttaagtttcaaattgacattccagacaagcggtgcctgagcccgtgcctgtcttcagatcttcacagcacagttcctgggaaggtggagccaccagcctctccctgacaagcaaagtggatcagcaaaggctgcagtcaccagcatcttttccaaccttaatgaactgtatcctcaaaagaacactatcagactggtaagacaagcattattgtcccacttcacagatgaagagcttgggggccctgtggatgtgtaggagagtcggccttcctttttataggccttttgctgagctcagaggacagagcagaagacaaagccgaatgcagccctaagcagacactatcccagcccaaggagctatgcagacagctcctgcctagaggagaaacaattctctccttcagccaggcatgtggcacagaggtgaacaggaaatgcttagggagacagttcacagatatatatgtacttcacagggcacaatttaatccataaatcaatcatggatcaccgctaaagaaaacaaaatatgctgccactaatttgccaccaccctgtgagcatgattggatgatgtttattttgattaggagattgctccatttataaatcttcaatacatcctgtccccctaaaacggcatctgggtcttttgagggttaaaaaaaaaaaaaagtgaaattggatgagggatgagagctggacttctgtgtgtcccggggtccctggatccacagcctggtgcctagcatcagttaagcccacgctggggtcgcatcacatcccgcaaagccacgtgctctgtgaggccaacaggagccccgccgggtggaccagctggaatctcagagagcgccgactctgaaactacccggctctgcagaagcacgctgggcccaggggcttctagactgacagctccatttatcaactacctattggttttaaaaattggagtgtcttttccgcgttgactgattttggctctaagagatgtcgctggtcatttcagagtgactgaacctcccctctaacagatcccgggaattgttttcaggaaaggtaaaaggcagccttttctgtcacaacacaacgctgagccggcagcctggctctgtcaggatctggggctcccgcgcccgagaagcccagcctcgccggcggccaagttcaccgcgaggccccgcgctgcctgcgctgcgctcccggacccgcaccgaccgcagcgcgcgccgccggtgcttctcccaccccagcctggaagctgcctccctccgcctatgcctgcaggataagaagcccgaggaggcggagcatggaactcgacagttaaaacatttaagagagaaaacctagtgtcttgctggcctgaaatcgagtacgcagcccggggtgatcagggtctcccggcccggatgtgtgagacttgcttcccctgggcaataggcgatacgatgctttaggaggaaggtgtctctccctcctaagccccggaggggagaacttccaaagacagaaaaccacaggcttctggcacagagctttccctttatcagctaaagcagaatcttttctggccttaacctggccccttcctctaactgcaggcagagaggcagacagaaaagcacttgctgaaacacaaagttttgttctgtcctcaacgaactgtctagagctgattgctgatagtcgtggtgcattatgccttcctggttttcatttaattgggcaccacgctgcctttcaagacgccttaaaggaaccaacaaccaaatccaagagagctggacagaccattgaacacacagtaggctgtgtctcgtggctttcgttgtctggtgcctcaaagaaaacaccagaaagattgtttctaagctagagccaccccagattgcttaaagtgcaaagctcactgctgttgggggtacccttgtgagacactggaaagctggttttaccgtggccctatgaagaggaagactgaaatttagacagtaatacctttactaggattggaaaagatttggttaatgacagccctgtcatttctaaaacccattatcactgtatgagagattcctttgcgctgcatcctcgacagtgcttcctaaggctctgccgacttccagttctggaacaagatggttaaactcatttttccctgctctgctcctctaaatacaactaagtaccttggaaactattcagcagacaatgataaagggctctgaaagctagaagaaaaggtgtacttgcaagaaacctcaggacttgagtaacagcaacatgtttgactttgaaggatcactttcccctgtcattgcgcccaaaaaagcaaggccttctgagactggatctgatgatgactgggaatatttactaaattcagactaccaccagagtgttgagtctcatcttttgaacagatctttatgtctgagtccttcagaagcttcacagatgaaggatgaggatttttcacagaatctcagtctggattcttctacacttctctttactcacatacctgcaatttttttcgttcttcgccttgtgtatgaggagcttaagttgaatactctaatgggagaaggaatttgttcactcttgaacttctcgttcagttggcaaggtcaaacaggatttatgcatcatccatcattttttacgtctgagccaccaagtatttatcagtgggtgagttcttgtctgaagggcgaaggaatgccgccttatccttacctccctggaatctgtgaaagaagcagacttgtagtcttgagtattgcactgtacatacttggtgatgagagctcagtttctgatgaatcctcacagtatttaaccagaataactgtagccccccagaagttgcaagcagaacaagaggaaaacaggtttagtttcaggcattctacgtctgtttctagtctagctgaaagattggttggctggatgactaatgtaggattcactttaagagatttggaaactcttccctttggaattgctcttcccatcagagatgcaatttatcactgtcgtgagcagcctgcctcagactggccagaagctgtctgtctcttgactggacgtcaggatctttccaagcaggcctgcgaaggaaacttacccaaagggaagtctgtgctctcatcagatgttccttcaggtacagaaactgaggaggaagatgacggcatgaatgacatgaatcacgaggtcatgtcattaatatggagtgaagatttacgggtgcaggatgtgcgaaggcttcttcagagtgcgcatcctgtccgtgtcaacgtagtgcagtacccagagctcagtgaccacgagttcatcgaggaaaaggaaaacagattgctccaattgtgtcagcgaactatggctcttcctgtaggacgaggaatgtttaccttgttttcgtaccatcctgttccaacagagccattgcctattcctaaattgaatctgactgggcgtgcccctcctcggaacacaacagtagaccttaatagtggaaacatcgatgtgcctcccaacatgacaagctgggccagctttcataatggtgtggctgctggcctgaagatagctcctgcctcccagatcgactcagcttggattgtttacaataagcccaagcatgctgagttggccaatgagtatgctggctttctcatggctctgggtttgaatgggcaccttaccaagctggcgactctcaatatccatgactacttgaccaagggccatgaaatgacaagcattggactgctacttggtgtttctgctgcaaaactaggcaccatggatatgtctattactcggcttcttagcattcgcattcctgctctcttacccccaacgtccacagagctggatgttcctcacaatgtccaagtggctgcagtggttggcattggccttgtatatcaagggacagctcacagacatactgcagaagtcctgttggctgagataggacggcctcctggtcctgaaatggaatactgcactgacagaaagtcatactccttagctgctggcttggccctgggcatggtctgcttggggcatggcagcaatttgataggtatgtctgatctcaatgtgcctgagcagctctatcagtacatggttggaggacataggcgctttcaaacaggaatgcatagggagaaacataaatcaccaagttatcaaatcaaagtaagtacacagcaaagtaatagatcaaaagtctggaagctgggaagttaattggaaaatactagtgttcatcctgacattggtaaatatgttaattttaagcatacttatcagaggaattttataaaaatttagaactcttttacatgcataaactcttctttgaaggagataccataaatgtggatgtgacttgtccaggtgctactctagctttggctatgatctacttaaaaaccaataacaggtatttctacccactcacccttcctcccacggtgatagtgtgatatcctctctgaccttggttgtaaaattcagttatctcatgtgtttctttccc

SEQ ID NO: 301545 - DNA, 2537 bp, Homo sapiens
gatgagaatgaaggctgaggtgtgcgccttttttttttccttcttagtcgtgtgtacatcattgggaatggagggaaataaatgactggatggtcgctgctttttaagtttcaaattgacattccagacaagcggtgcctgagcccgtgcctgtcttcagatcttcacagcacagttcctgggaaggtggagccaccagcctctccctgacaagcaaagtggatcagcaaaggctgcagtcaccagcatcttttccaaccttaatgaactgtatcctcaaaagaacactatcagactggtaagacaagcattattgtcccacttcacagatgaagagcttgggggccctgtggatgtgtaggagagtcggccttcctttttataggccttttgctgagctcagaggacagagcagaagacaaagccgaatgcagccctaagcagacactatcccagcccaaggagctatgcagacagctcctgcctagaggagaaacaattctctccttcagccaggcatgtggcacagaggtgaacaggaaatgcttagggagacagttcacagatatatatgtacttcacagggcacaatttaatccataaatcaatcatggatcaccgctaaagaaaacaaaatatgctgccactaatttgccaccaccctgtgagcatgattggatgatgtttattttgattaggagattgctccatttataaatcttcaatacatcctgtccccctaaaacggcatctgggtcttttgagggttaaaaaaaaaaaaaagtgaaattggatgagggatgagagctggacttctgtgtgtcccggggtccctggatccacagcctggtgcctagcatcagttaagcccacgctggggtcgcatcacatcccgcaaagccacgtgctctgtgaggccaacaggagccccgccgggtggaccagctggaatctcagagagcgccgactctgaaactacccggctctgcagaagcacgctgggcccaggggcttctagactgacagctccatttatcaactacctattggttttaaaaattggagtgtcttttccgcgttgactgattttggctctaagagatgtcgctggtcatttcagagtgactgaacctcccctctaacagatcccgggaattgttttcaggaaaggtaaaaggcagccttttctgtcacaacacaacgctgagccggcagcctggctctgtcaggatctggggctcccgcgcccgagaagcccagcctcgccggcggccaagttcaccgcgaggccccgcgctgcctgcgctgcgctcccggacccgcaccgaccgcagcgcgcgccgccggtgcttctcccaccccagcctggaagctgcctccctccgcctatgcctgcaggataagaagcccgaggaggcggagcatggaactcgacagttaaaacatttaagagagaaaacctagtgtcttgctggcctgaaatcgagtacgcagcccggggtgatcagggtctcccggcccggatgtgtgagacttgcttcccctgggcaataggcgatacgatgctttaggaggaaggtgtctctccctcctaagccccggaggggagaacttccaaagacagaaaaccacaggcttctggcacagagctttccctttatcagctaaagcagaatcttttctggccttaacctggccccttcctctaactgcaggcagagaggcagacagaaaagcacttgctgaaacacaaagttttgttctgtcctcaacgaactgtctagagctgattgctgatagtcgtggtgcattatgccttcctggttttcatttaattgggcaccacgctgcctttcaagacgccttaaaggaaccaacaaccaaatccaagagagctggacagaccattgaacacacagtaggctgtgtctcgtggctttcgttgtctggtgcctcaaagaaaacaccagaaagattgtttctaagctagagccaccccagattgcttaaagtgcaaagctcactgctgttgggggtacccttgtgagacactggaaagctggttttaccgtggccctatgaagaggaagactgaaatttagacagtaatacctttactaggattggaaaagatttggttaatgacagccctgtcatttctaaaacccattatcactgtatgagagattcctttgcgctgcatcctcgacagtgcttcctaaggctctgccgacttccagttctggaacaagatggttaaactcatttttccctgctctgctcctctaaatacaactaagtaccttggaaactattcagcagacaatgataaagggctctgaaagctagaagaaaaggtgtacttgcaagaaacctcaggacttgagtaacagcaacatggtaagttttctaagttttctttttgtctcccatatacgctgggctgtgctggaatcaccaacaggcacagaaaaaatgacaacaaaacaacaacaaaacccccaagaatatcctgttgtctttggccaaagttcagg

SEQ ID NO: 301546 - DNA, 616 bp, Homo sapiens
gatgagaatgaaggctgaggtgtgcgccttttttttttccttcttagtcgtgtgtacatcattgggaatggagggaaataaatgactggatggtcgctgctttttaagtttcaaattgacattccagacaagcggtgcctgagcccgtgcctgtcttcagatcttcacagcacagttcctgggaaggtggagccaccagcctctccctgacaagcaaagtggatcagcaaaggctgcagtcaccagcatcttttccaaccttaatgaactgtatcctcaaaagaacactatcagactggtaagctctgccgacttccagttctggaacaagatggttaaactcatttttccctgctctgctcctctaaatacaactaagtaccttggaaactattcagcagacaatgataaagggctctgaaagctagaagaaaaggtgtacttgcaagaaacctcaggacttgagtaacagcaacatggtaagttttctaagttttctttttgtctcccatatacgctgggctgtgctggaatcaccaacaggcacagaaaaaatgacaacaaaacaacaacaaaacccccaagaatatcctgttgtctttggccaaagttcagg

SEQ ID NO: 301547 - DNA, 683 bp, Homo sapiens
gtatgtatgtggagtgttactacctatctcctttttcttttaaaatttagttttaaaaagtacacctaatattaagtttttcttctgtgtatagttctgtgaatttcagtacgtgtatagattcatgtaattactacaatgaggatatagaacatttacatcaccctcaaaaatttctctcatgattttgagactcatccaagttgtttcctgtatcgacagttcattgcattctatggctaattagtagtttattgcatgaatgtgtcatagttggtttttcattcaagataattgggttgatttcagttgttagcaattgtaaatatagatgctgtcagcattcatgcttagcgttttatgtgaacataagttttgctttctctaggacaggtacctaggagtaggattgatgggtcatacagttaagtttatattttgtttttaaagaaactgtcatctgttttccagagtggctcttccattttacatttttaccagcaatatttaagagatcatttacctgcattcttgttggtatttggtattgtcactcttttttatttttgtctttctgagagatgtgtagttatacctcattgtggttttaatttgcattttcctaatggctaatgatgttttcagcgttctaggtatgaggttttgtcagatatgtggtttgc

SEQ ID NO: 301548 - DNA, 383 bp, Homo sapiens
ggctgtgtctcgtggctttcgttgtctggtgcctcaaagaaaacaccagaaagattgtttctaagctagagccaccccagattgcttaaagtgcaaagctcactgctgttgggggtacccttgtgagacactggaaagctggttttaccgtggccctatgaagaggaagactgaaatttagacagtaatacctttactaggattggaaaagatttggttaatgacagccctgtcatttctaaaacccattatcactgtatgagagattcctttgcgctgcatcctcgacagtgcttcctaaggtcagtcttttctattgtattcattttaatgggtgcatagccgtatctcgttgtgattttaatgtgcatctccctagtgac

SEQ ID NO: 301549 - DNA, 4137 bp, Homo sapiens
tcaagctcgccccgcgcagcccgagccgggctgggcgctgtcctcgggggcctggggaaccgcgcggtttggagatcggaggcacctggaacccgtggcaagcgccgagccgggagacagcccgaggaaccacgggttctggagctaggagccggaagctgggagtccggaggagagcggagcccggagcccggagcccggggcggcgcgtctgggtctggcgcttcccgactggacggcgcgcccgctggtcttcgccacgcgccctcccctgggctcgcgttcatcggtccccgcctgagacgcgcccactcctgcccggacttccagccccggaggcgccggacagagccgcggactccagcgcccaccatgcgcctcaacagctccgcgccgggaaccccgggcacgccggccgccgaccccttccagcgggcgcaggccggactggaggaggcgctgctggccccgggcttcggcaacgcttcgggcaacgcgtcggagcgcgtcctggcggcacccagcagcgagctggacgtgaacaccgacatctactccaaagtgctggtgaccgccgtgtacctggcgctcttcgtggtgggcacggtgggcaacacggtgacggcgttcacgctggcgcggaagaagtcgctgcagagcctgcagagcacggtgcattaccacctgggcagcctggcgctgtccgacctgctcaccctgctgctggccatgcccgtggagctgtacaacttcatctgggtgcaccacccctgggccttcggcgacgccggctgccgcggctactacttcctgcgcgacgcctgcacctacgccacggccctcaacgtggccagcctgagtgtggagcgctacctggccatctgccaccccttcaaggccaagaccctcatgtcccgaagccgcaccaagaagttcatcagcgccatctggctcgcctcggccctgctgacggtgcctatgctgttcaccatgggcgagcagaaccgcagcgccgacggccagcacgccggcggcctggtgtgcacccccaccatccacactgccaccgtcaaggtcgtcatacaggtcaacaccttcatgtccttcatattccccatggtggtcatctcggtcctgaacaccatcatcgccaacaagctgaccgtcatggtacgccaggcggccgagcagggccaagtgtgcacggtcgggggcgagcacagcacattcagcatggccatcgagcctggcagggtccaggccctgcggcacggcgtgcgcgtcctacgtgcagtggtcatcgcctttgtggtctgctggctgccctaccacgtgcggcgcctcatgttctgctacatctcggatgagcagtggactccgttcctctatgacttctaccactacttctacatggtgaccaacgcactcttctacgtcagctccaccatcaaccccatcctgtacaacctcgtctctgccaacttccgccacatcttcctggccacactggcctgcctctgcccggtgtggcggcgcaggaggaagaggccagccttctcgaggaaggccgacagcgtgtccagcaaccacaccctctccagcaatgccacccgcgagacgctgtactaggctgtgcgccccggaacgtgtccaggaggagcctggccatgggtccttgcccccgacagacagagcagcccccacccgggagccttgatgggggtcaggcagaggccagcctgcactggagtctgaggcctgggacccccccctcccaccccctaacccatgtttctcattagtgtctcccgggcctgtccccaactcctccccacccctcccccatctcctctttgaaagccagaacaagagagcgctcctctcccagataggaaaagggcctctaacaaggagaaattagtgtgcggcaaaaggcagttttctttgttctcagactaatggatggttccagagaaggaaatgaaatgtgctgggtggggccgggcctccggcggcccggctgctgttcccatgtccacatctctgaggcctgcaccccctctgtctagctcggggagtccagccccagtcccgcaggctccgtggctttgggcctcacgtgcagaccctgccatgcagacccatgcccccctcccccaggcagctccaagaaagctccctgactcgccccttcaggcctggcaagctgggggcccatcgccgtggggagtccctcccaccaccctcgccgcaggcagctgcagcccccagaggggaccacaagcccaaaaaggacaaaaatgggctggcctggaatggcccagaccccagcctcccctcctccctcccatcctcacccaggccaaggcccaggggctctgccaggacaccacatgggagggggctcaggcctcagcctcaagatcttcagctgtggcctctcgggctcggcagaagggacgccggatcaggggcctggtctccagcacctgcccgagtggccgtggccaggatggggtgcgcattccgtgtgctttgcttgtggctgtgcaggctgaggtctggagccaggcccagagctggcttcagggtggggccttgagaaggggaatgtgggacaggggcgatggtgcctggtctctgagtaagatgccaggtcccaggaactcaggcttcaggtgagaaggagcggtgtgtccaggcaccgctggccggcagccctgggctgaggcacagactcatttgtcaccttctggcggcggcagccctggccccggcctccaagcagttgaaaaagctggcgcctccttggtctctaggatccaggctccacagagcacatgactagccaggcccctggcttaagaaggtcgcctaagcctaagagaagacagtcccaggagaagctggccgggaccagccaggagctgggagccacaggaagcaaaagtcagccttttcttcaagggatttccctgtctcagagcagcctttgccccagggaaatgggctctgggctggctgcctgcaccggccatgtcgacccaggacccggacacctggtcttgggctgtgttcagccactttgccttctctggactcagtttccccgtctgagaaatgagagtcgaatgctacagtatctgcagtcgcttggatctggctgttgagttgacgggttccttgaaccccacaaaatccctctccaaccacaggacccttcggctcaccaagaacggggcccaggggagtcaggcctattcgctgcacttcctgccaaactttgcccccacaagcctggtcatcagccaggcagccctcccagtgcccaagggccaccaaccccagggaaacagggccagcacagaggggccttcctcccccacagagctcccatgacatagtctgctctgggcggaagagctttgctgccagccagggatgtccagaggtcggtgcagcccctatccctgctcaggagtgggctcagagtctagcaaatgctaaggcccctcaggctgggctctgaacgaggacctggactcagagccagacagggcagcctcagacccttctctggggctcctggaccttgggccataatttctgagcctcggtttccccatctaaggaacagatgtggtcgttccgccctctcagctggatgagactgtcctggaggatccaccccggaacagacagaatggtgtctctcaggatggtgctctgagagagggcagagtggatgccccactgccctagaccctcggtagacgtggggtctctggggcggggtctgtggctgtgactgaagtcggctttcccgttgatgtcttgatgctcctatctgtgcacttaccgtaggtagggacacgtgtccatgcaccacagacacacccacgacacctgatctcgtatcactagcttgcggccaggtcatgatgtggccccggaagctggccctgcgtgccatgagtgcgtcggtcatggagtccggagcccctgagccggcccctggtgacggcacagccctcacagctcaaacgcccacccccactcccaccatctgcaggtggtgaaaacaaaccccgtgtatctctcaataaaggtggccgaagggcctcgatgtggacttga

SEQ ID NO: 301550 - DNA, 4104 bp, Homo sapiens
tcaagctcgccccgcgcagcccgagccgggctgggcgctgtcctcgggggcctggggaaccgcgcggtttggagatcggaggcacctggaacccgtggcaagcgccgagccgggagacagcccgaggaaccacgggttctggagctaggagccggaagctgggagtccggaggagagcggagcccggagcccggagcccggggcggcgcgtctgggtctggcgcttcccgactggacggcgcgcccgctggtcttcgccacgcgccctcccctgggctcgcgttcatcggtccccgcctgagacgcgcccactcctgcccggacttccagccccggaggcgccggacagagccgcggactccagcgcccaccatgcgcctcaacagctccgcgccgggaaccccgggcacgccggccgccgaccccttccagcgggcgcaggccggactggaggaggcgctgctggccccgggcttcggcaacgcttcgggcaacgcgtcggagcgcgtcctggcggcacccagcagcgagctggacgtgaacaccgacatctactccaaagtgctggtgaccgccgtgtacctggcgctcttcgtggtgggcacggtgggcaacacggtgacggcgttcacgctggcgcggaagaagtcgctgcagagcctgcagagcacggtgcattaccacctgggcagcctggcgctgtccgacctgctcaccctgctgctggccatgcccgtggagctgtacaacttcatctgggtgcaccacccctgggccttcggcgacgccggctgccgcggctactacttcctgcgcgacgcctgcacctacgccacggccctcaacgtggccagcctgagtgtggagcgctacctggccatctgccaccccttcaaggccaagaccctcatgtcccgaagccgcaccaagaagttcatcagcgccatctggctcgcctcggccctgctgacggtgcctatgctgttcaccatgggcgagcagaaccgcagcgccgacggccagcacgccggcggcctggtgtgcacccccaccatccacactgccaccgtcaaggtcgtcatacaggtcaacaccttcatgtccttcatattccccatggtggtcatctcggtcctgaacaccatcatcgccaacaagctgaccgtcatggtacgccaggcggccgagcagggccaagtgtgcacggtcgggggcgagcacagcacattcagcatggccatcgagcctggcagggtccaggccctgcggcacggcgtgcgcgtcctacgtgcagtggtcatcgcctttgtggtctgctggctgccctaccacgtgcggcgcctcatgttctgctacatctcggatgagcagtggactccgttcctctatgacttctaccactacttctacatggtgaccaacgcactcttctacgtcagctccaccatcaaccccatcctgtacaacctcgtctctgccaacttccgccacatcttcctggccacactggcctgcctctgcccggtgtggcggcgcaggaggaagaggccagccttctcgaggaaggccgacagcgtgtccagcaaccacaccctctccagcaatgccacccgcgagacgctgtactaggctgtgcgccccggaacgtgtccaggaggagcctggccatgggtccttgcccccgacagacagagcagcccccacccgggagccttgatgggggtcaggcagaggccagcctgcactggagtctgaggcctgggacccccccctcccaccccctaacccatgtttctcattagtgtctcccgggcctgtccccaactcctccccacccctcccccatctcctctttgaaagccagaacaagagagcgctcctctcccagataggaaaagggcctctaacaaggagaaattagtgtgcggcaaaaggcagttttctttgttctcagactaatggatggttccagagaaggaaatgaaatgtgctgggtggggccgggcctccggcggcccggctgctgttcccatgtccacatctctgaggcctgcaccccctctgtctagctcggggagtccagccccagtcccgcaggctccgtggctttgggcctcacgtgcagaccctgccatgcagacccatgcccccctcccccaggcagctccaagaaagctccctgactcgccccttcaggcctggcaagctgggggcccatcgccgtggggagtccctcccaccaccctcgccgcaggcagctgcagcccccagaggggaccacaagcccaaaaaggacaaaaatgggctggcctggaatggcccagaccccagcctcccctcctccctcccatcctcacccaggccaaggcccaggggctctgccaggacaccacatgggagggggctcaggcctcagcctcaagatcttcagctgtggcctctcgggctcggcagaagggacgccggatcaggggcctggtctccagcacctgcccgagtggccgtggccaggatggggtgcgcattccgtgtgctttgcttgtggctgtgcaggctgaggtctggagccaggcccagagctggcttcagggtggggccttgagaaggggaatgtgggacaggggcgatggtgcctggtctctgagtaagatgccaggtcccaggaactcaggcttcaggtgagaaggagcggtgtgtccaggcaccgctggccggcagccctgggctgaggcacagactcatttgtcaccttctggcggcggcagccctggccccggcctccaagcagttgaaaaagctggcgcctccttggtctctaggatccaggctccacagagcacatgactagccaggcccctggcttaagaaggtcgcctaagcctaagagaagacagtcccaggagaagctggccgggaccagccaggagctgggagccacaggaagcaaaagtcagccttttcttcaagggatttccctgtctcagagcagcctttgccccagggaaatgggctctgggctggctgcctgcaccggccatgtcgacccaggacccggacacctggtcttgggctgtgttcagccactttgccttctctggactcagtttccccgtctgagaaatgagagtcgaatgctacagtatctgcagtcgcttggatctggctgttgagttgacgggttccttgaaccccacaaaatccctctccaaccacaggacccttcggctcaccaagaacggggcccaggggagtcaggcctattcgctgcacttcctgccaaactttgcccccacaagcctggtcatcagccaggcagccctcccagtgcccaagggccaccaaccccagggaaacagggccagcacagaggggccttcctcccccacagagctcccatgacatagtctgctctgggcggaagagctttgctgccagccagggatgtccagaggtcggtgcagcccctatccctgctcaggagtgggctcagagtctagcaaatgctaaggcccctcaggctgggctctgaacgaggacctggactcagagccagacagggcagcctcagacccttctctggggctcctggaccttgggccataatttctgagcctcggtttccccatctaaggaacagatgtggtcgttccgccctctcagctggatgagactgtcctggaggatccaccccggaacagacagaatggtgtctctcaggatggtgctctgagagagggcagagtggatgccccactgccctagaccctcggtagacgtggggtctctggggcggggtctgtggctgtgactgaagtcggctttcccgttgatgtcttgatgctcctatctgtgcacttaccgtaggtagggacacgtgtccatgcaccacagacacacccacgacacctgatctcgtatcactagcttgcggccaggtcatgatgtggccccggaagctggccctgcgtgccatgagtgcgtcggtcatggagtccggagcccctgagccggcccctggtgacggcacagcccttaaagtaaaagccaccccatccacattggggggaaaaaacccgtgttttccaaaagggcccagggaaaaaa

SEQ ID NO: 301551 - DNA, 1389 bp, Homo sapiens
taatgtttgctgttgctttgtgttaggctataagctctatgaggcaggcaggctgctttgtccactagcatgccttaaatcagtatttatggactgtgttgattcctgctcctctgcttacttgctctctcgctgtcattcatttagtcatcaaatactgatttaaggcatgctagtggacaaagcagccactgccctgccctcatagagcttatagcctaacacaaagcaacagcaaacattaggcatttgttcataaaacctttcccacaaagacttacaggcaggaaaattaggtattaatcaaatcacagaacctcccaaatgctaagtgaggattttaccctttgagcatatcccattaaaagcctcagttttctcatctgtgaaaggggacggtacctgccttttcaggtgaaacctagtgagataatgtgtatgcagctcttagcacagtgtcccccacataattggtgcataagtttccagctgatgtaagaaaaatacagaaaccccaatctaaatctatctctgaaactctaattataacttaagtttttgttatcattagggcagtgtccccttaatgttgagttcctttgttgtgtaatagtttgatatttgcaattggttttgtacagatagtaaagaaacataccagccagtagaggtttcagtttgagagcattcatcttttttcccttactggaggtaggatggaatcaaaacacacaggccttctgaccaggcctggggagcccagcatggacagaattactattcagtaaagctcctgccccagtgagctgtttttaccccagaccacagcttataggagctgcttttacccacccattatttctagttgttagtcttgttcctaatgcacttgtccacatcgtatgtcattacaagttcttccccttctttaaccagagggcatagaattggggcttagtgtgtcctaaacaagctaaaagattccacctgtagaatcataaaatgagagtctcacacagtttcatgctactttttgtctcttcagcaaggaacggttgcctgggattgtcagtgaccaggcatgtctggatagcttcacacatacacataatgcccggttcacctcagcccacacatgttctagaagtagccacttgccaagtgtcagtgttcagtctaaacagcaaatgggttaaccacatgaacagcactggcccatgtgagaatggtgtgaaggcctcctttgtaccattttccatttctctaactcacatgtgtagtctcagcactgcagaggacagatttgtttgtgccctctgagactggttggttggttggttggttagttttgttttatgaatcctaaaatttgtcttggcctgtaaaaaa

SEQ ID NO: 301552 - DNA, 3002 bp, Homo sapiens
  misc_feature (2343)..(2343): n is a, c, g, or t
  misc_feature (3002)..(3002): n is a, c, g, or t
cgccgcgggaggcggacgagatgcgagcgcggccgcggccccggccgctctgggcgactgtgctggcgctgggggcgctggcgggcgttggcgtaggagggcccaacatctgtaccacgcgaggtgtgagctcctgccagcagtgcctggctgtgagccccatgtgtgcctggtgctctgatgaggccctgcctctgggctcacctcgctgtgacctgaaggagaatctgctgaaggataactgtgccccagaatccatcgagttcccagtgagtgaggcccgagtactagaggacaggcccctcagcgacaagggctctggagacagctcccaggtcactcaagtcagtccccagaggattgcactccggctccggccagatgattcgaagaatttctccatccaagtgcggcaggtggaggattaccctgtggacatctactacttgatggacctgtcttactccatgaaggatgatctgtggagcatccagaacctgggtaccaagctggccacccagatgcgaaagctcaccagtaacctgcggattggcttcggggcatttgtggacaagcctgtgtcaccatacatgtatatctccccaccagaggccctcgaaaacccctgctatgatatgaagaccacctgcttgcccatgtttggctacaaacacgtgctgacgctaactgaccaggtgacccgcttcaatgaggaagtgaagaagcagagtgtgtcacggaaccgagatgccccagagggtggctttgatgccatcatgcaggctacagtctgtgatgaaaagattggctggaggaatgatgcatcccacttgctggtgtttaccactgatgccaagactcatatagcattggacggaaggctggcaggcattgtccagcctaatgacgggcagtgtcatgttggtagtgacaatcattactctgcctccactaccatggattatccctctttggggctgatgactgagaagctatcccagaaaaacatcaatttgatctttgcagtgactgaaaatgtagtcaatctctatcagaactatagtgagctcatcccagggaccacagttggggttctgtccatggattccagcaatgtcctccagctcattgttgatgcttatgggaaaatccgttctaaagtagagctggaagtgcgtgacctccctgaagagttgtctctatccttcaatgccacctgcctcaacaatgaggtcatccctggcctcaagtcttgtatgggactcaagattggagacacggtgagcttcagcattgaggccaaggtgcgaggctgtccccaggagaaggagaagtcctttaccataaagcccgtgggcttcaaggacagcctgatcgtccaggtcacctttgattgtgactgtgcctgccaggcccaagctgaacctaatagccatcgctgcaacaatggcaatgggacctttgagtgtggggtatgccgttgtgggcctggctggctgggatcccagtgtgagtgctcagaggaggactatcgcccttcccagcaggacgaatgcagcccccgggagggtcagcccgtctgcagccagcggggcgagtgcctctgtggtcaatgtgtctgccacagcagtgactttggcaagatcacgggcaagtactgcgagtgtgacgacttctcctgtgtccgctacaagggggagatgtgctcaggccatggccagtgcagctgtggggactgcctgtgtgactccgactggaccggctactactgcaactgtaccacgcgtactgacacctgcatgtccagcaatgggctgctgtgcagcggccgcggcaagtgtgaatgtggcagctgtgtctgtatccagccgggctcctatggggacacctgtgagaagtgccccacctgcccagatgcctgcacctttaagaaagaatgtgtggagtgtaagaagtttgaccggggagccctacatgacgaaaatacctgcaaccgttactgccgtgacgagattgagtcagtgaaagagcttaaggacactggcaaggatgcagtgaattgtacctataagaatgaggatgactgtgtcgtcagattccagtactatgaagattctagtggaaagtccatcctgtatgtggtagaagagccagagtgtcccaagggccctgacatcctggtggtcctgctctcagtgatgggggccattctgctcattggccttgccgccctgctcatctggaaactcctcatcaccatccacgaccgaaaagaattcgctaaatttgaggaagaacgcgccagagcaaaatgggacacacattatgcacaatcgctgaganaatggaatcaacctgtgtccatcgatggatgaatggataaagaaaatgtagtaaacatatgcaatggatactattcagccttaaaaaagaatttctgtcatttgtgacaacatgaatcaacatatgcaatggatactattcagccttaaaaaagaatttctgtcatttgtgacaacatgaatcaacttggaggacatactaagtgaaaaaagccaggcacagaaagacacataccacatgatctcacttatatgtggaatcttaaaaagtcaaactcatagaagtagacagtagaatagttgttagaggctggaaagggacggggcgggtaggagatgcaggatggggagatgctgttcaaagggtacaaggttcagtcagacaaaagcagcaagtttctgagatctattgcatagtgtggtgactatagctaataataatatatcgtatatctcaaaactgctaagagtaaatttcaaatgtctcaccataaaaaacgttaaacaaggtgatggatatgttaagcttgacttagtcgttccatattgtatacatatattaaaatataacattgtaccccattaaatatttacaattatgatttgtatatatatttaataataataaaaatctaaataaaatattaaagaatgcctacn

SEQ ID NO: 301553 - DNA, 5902 bp, Homo sapiens
cgccgcgggaggcggacgagatgcgagcgcggccgcggccccggccgctctgggcgactgtgctggcgctgggggcgctggcgggcgttggcgtaggagggcccaacatctgtaccacgcgaggtgtgagctcctgccagcagtgcctggctgtgagccccatgtgtgcctggtgctctgatgaggccctgcctctgggctcacctcgctgtgacctgaaggagaatctgctgaaggataactgtgccccagaatccatcgagttcccagtgagtgaggcccgagtactagaggacaggcccctcagcgacaagggctctggagacagctcccaggtcactcaagtcagtccccagaggattgcactccggctccggccagatgattcgaagaatttctccatccaagtgcggcaggtggaggattaccctgtggacatctactacttgatggacctgtcttactccatgaaggatgatctgtggagcatccagaacctgggtaccaagctggccacccagatgcgaaagctcaccagtaacctgcggattggcttcggggcatttgtggacaagcctgtgtcaccatacatgtatatctccccaccagaggccctcgaaaacccctgctatgatatgaagaccacctgcttgcccatgtttggctacaaacacgtgctgacgctaactgaccaggtgacccgcttcaatgaggaagtgaagaagcagagtgtgtcacggaaccgagatgccccagagggtggctttgatgccatcatgcaggctacagtctgtgatgaaaagattggctggaggaatgatgcatcccacttgctggtgtttaccactgatgccaagactcatatagcattggacggaaggctggcaggcattgtccagcctaatgacgggcagtgtcatgttggtagtgacaatcattactctgcctccactaccatggattatccctctttggggctgatgactgagaagctatcccagaaaaacatcaatttgatctttgcagtgactgaaaatgtagtcaatctctatcagaactatagtgagctcatcccagggaccacagttggggttctgtccatggattccagcaatgtcctccagctcattgttgatgcttatgggaaaatccgttctaaagtagagctggaagtgcgtgacctccctgaagagttgtctctatccttcaatgccacctgcctcaacaatgaggtcatccctggcctcaagtcttgtatgggactcaagattggagacacggtgagcttcagcattgaggccaaggtgcgaggctgtccccaggagaaggagaagtcctttaccataaagcccgtgggcttcaaggacagcctgatcgtccaggtcacctttgattgtgactgtgcctgccaggcccaagctgaacctaatagccatcgctgcaacaatggcaatgggacctttgagtgtggggtatgccgttgtgggcctggctggctgggatcccagtgtgagtgctcagaggaggactatcgcccttcccagcaggacgaatgcagcccccgggagggtcagcccgtctgcagccagcggggcgagtgcctctgtggtcaatgtgtctgccacagcagtgactttggcaagatcacgggcaagtactgcgagtgtgacgacttctcctgtgtccgctacaagggggagatgtgctcaggccatggccagtgcagctgtggggactgcctgtgtgactccgactggaccggctactactgcaactgtaccacgcgtactgacacctgcatgtccagcaatgggctgctgtgcagcggccgcggcaagtgtgaatgtggcagctgtgtctgtatccagccgggctcctatggggacacctgtgagaagtgccccacctgcccagatgcctgcacctttaagaaagaatgtgtggagtgtaagaagtttgaccggggagccctacatgacgaaaatacctgcaaccgttactgccgtgacgagattgagtcagtgaaagagcttaaggacactggcaaggatgcagtgaattgtacctataagaatgaggatgactgtgtcgtcagattccagtactatgaagattctagtggaaagtccatcctgtatgtggtagaagagccagagtgtcccaagggccctgacatcctggtggtcctgctctcagtgatgggggccattctgctcattggccttgccgccctgctcatctggaaactcctcatcaccatccacgaccgaaaagaattcgctaaatttgaggaagaacgcgccagagcaaaatgggacacagccaacaacccactgtataaagaggccacgtctaccttcaccaatatcacgtaccggggcacttaatgataagcagtcatcctcagatcattatcagcctgtgccacgattgcaggagtccctgccatcatgtttacagaggacagtatttgtggggagggatttggggctcagagtggggtaggttgggagaatgtcagtatgtggaagtgtgggtctgtgtgtgtgtatgtgggggtctgtgtgtttatgtgtgtgtgttgtgtgtgggagtgtgtaatttaaaattgtgatgtgtcctgataagctgagctccttagcctttgtcccagaatgcctcctgcagggattcttcctgcttagcttgagggtgactatggagctgagcaggtgttcttcattacctcagtgagaagccagctttcctcatcaggccattgtccctgaagagaagggcagggctgaggcctctcattccagaggaagggacaccaagccttggctctaccctgagttcataaatttatggttctcaggcctgactctcagcagctatggtaggaactgctgggcttggcagcccgggtcatctgtacctctgcctcctttcccctccctcaggccgaaggaggagtcagggagagctgaactattagagctgcctgtgccttttgccatcccctcaacccagctatggttctctcgcaagggaagtccttgcaagctaattctttgacctgttgggagtgaggatgtctgggccactcaggggtcattcatggcctgggggatgtaccagcatctcccagttcataatcacaacccttcagatttgccttattggcagctctactctggaggtttgtttagaagaagtgtgtcacccttaggccagcaccatctctttacctcctaattccacaccctcactgctgtagacatttgctatgagctggggatgtctctcatgaccaaatgcttttcctcaaagggagagagtgctattgtagagccagaggtctggccctatgcttccggcctcctgtccctcatccatagcacctccacatacctggccctgagccttggtgtgctgtatccatccatggggctgattgtatttaccttctacctcttggctgccttgtgaaggaattattcccatgagttggctgggaataagtgccaggatggaatgatgggtcagttgtatcagcacgtgtggcctgttcttctatgggttggacaacctcattttaactcagtctttaatctgagaggccacagtgcaattttattttatttttctcatgatgaggttttcttaacttaaaagaacatgtatataaacatgcttgcattatatttgtaaatttatgtgatggcaaagaaggagagcataggaaaccacacagacttgggcagggtacagacactcccacttggcatcattcacagcaagtcactggccagtggctggatctgtgaggggctctctcatgatagaaggctatggggatagatgtgtggacacattggacctttcctgaggaagagggactgttcttttgtcccagaaaagcagtggctccattggtgttgacatacatccaacattaaaagccacccccaaatgcccaagaaaaaaagaaagacttatcaacatttgttccatgagcagaaaactggagctctggcctcagtgttacagctaaataatctttaattaaggcaagtcactttcttcttcttaaagctgttttctagtttgagaaatgatgggattttagcagccagtcttgaaggtctctttcagtatcaacattctaagatgctgggacttactgtgtcatcaaatgtgcggttaagattctctgggatattgatactgtttgtgtttttagttgggagatctgagagacctggctttggcaagagcagatgtcattccatatcacctttctcaatgaaagtctcattctatcctctctccaaacccgttttccaacatttgttaatagttacgtctctcctgatgtagcacttaagcttcatttagttattatttctttcttcactttgcacacatttgcatccacatattagggaagaggaatccataagtagctgaaatatctattctgtattattgtgttaacattgagaataagccttggaattagatatggggcaatgactgagccctgtctcacccatggattactccttactgtagggaatggcagtatggtagagggataaatagggggcggggagggatagtcatggatccaagaagtccttagaaatagtggcagggaacaggtgtggaagctcatgcctgtaattataaccttcagctactaagacaggtgtggtggctcacgcctgtaattataatcttcagttactaagacagagtccatgagagtgttaatgggacattttctttagataagatgttttatatgaagaaactgtatcaaagggggaagaaaatgtatttaacaggtgaatcaaatcaggaatcttgtctgagctactggaatgaagttcacaggtcttgaagaccaatattatttgtcaatatgtggggataacctgtagctgcattcatgaggtagcaaatagcagttttggcctgtggggtgaacagctaaacagtgttctggcatcagataacacggcacaaagggattgtgtctagctcttttggagaaaatttatgtccagtctcaggatctgtggacaataacggaaaactttgaatattcctgacaagttgccatattaggagtcagttctttacttctctgagattcccaggtcatccatgattttttttttaatttgagacaaagcctcactcttgttgcccaagctggaatgcaatggcaagatctcagttcactgcaatctctgcctctcaggttcaagccattctcctgcctcagcctccccagtagccgggattacaggcacccgccaccacacccggctaattttgtatttttagtagagacggggtttcaccatgttggccaggctggtctcgaactcctgaccttaggcgatccaccttcctcggcctcccacagtgctgggattacaagtgtgaagcactgtgcccggccagtcatccatgattttaatggggtccaaaggcctctttttctttgttaagtattcctggttgaaatttcttttcttttttttttttttttggagacagagtcttgctctatcacccaggctggagtgcagtggcacgatctctgctcactgcaagcttcgcctcccgggttcacgccattctcctgcctcagcctcccgagtagctgggattacaggcacctgccaccacgcccggctaatttctttttgtatttttagtagagacggggtttcacggtgttagccaggaaggtctcgatctcctgacctcgtgatcctcccgcctcggcctcccaaagtgctgggattacaggcgtgagccactgcccccggctgtggttgaaatttcttaagtgccttcctcacttcctaaccaccttctctgtttgggtttgtgcaacagtaat

SEQ ID NO: 301554 - DNA, 4972 bp, Homo sapiens
  misc_feature (4942)..(4942): n is a, c, g, or t
  misc_feature (4947)..(4947): n is a, c, g, or t
cgccgcgggaggcggacgagatgcgagcgcggccgcggccccggccgctctgggcgactgtgctggcgctgggggcgctggcgggcgttggcgtaggagggcccaacatctgtaccacgcgaggtgtgagctcctgccagcagtgcctggctgtgagccccatgtgtgcctggtgctctgatgaggccctgcctctgggctcacctcgctgtgacctgaaggagaatctgctgaaggataactgtgccccagaatccatcgagttcccagtgagtgaggcccgagtactagaggacaggcccctcagcgacaagggctctggagacagctcccaggtcactcaagtcagtccccagaggattgcactccggctccggccagatgattcgaagaatttctccatccaagtgcggcaggtggaggattaccctgtggacatctactacttgatggacctgtcttactccatgaaggatgatctgtggagcatccagaacctgggtaccaagctggccacccagatgcgaaagctcaccagtaacctgcggattggcttcggggcatttgtggacaagcctgtgtcaccatacatgtatatctccccaccagaggccctcgaaaacccctgctatgatatgaagaccacctgcttgcccatgtttggctacaaacacgtgctgacgctaactgaccaggtgacccgcttcaatgaggaagtgaagaagcagagtgtgtcacggaaccgagatgccccagagggtggctttgatgccatcatgcaggctacagtctgtgatgaaaagattggctggaggaatgatgcatcccacttgctggtgtttaccactgatgccaagactcatatagcattggacggaaggctggcaggcattgtccagcctaatgacgggcagtgtcatgttggtagtgacaatcattactctgcctccactaccatggattatccctctttggggctgatgactgagaagctatcccagaaaaacatcaatttgatctttgcagtgactgaaaatgtagtcaatctctatcagaactatagtgagctcatcccagggaccacagttggggttctgtccatggattccagcaatgtcctccagctcattgttgatgcttatgggaaaatccgttctaaagtagagctggaagtgcgtgacctccctgaagagttgtctctatccttcaatgccacctgcctcaacaatgaggtcatccctggcctcaagtcttgtatgggactcaagattggagacacggtgagcttcagcattgaggccaaggtgcgaggctgtccccaggagaaggagaagtcctttaccataaagcccgtgggcttcaaggacagcctgatcgtccaggtcacctttgattgtgactgtgcctgccaggcccaagctgaacctaatagccatcgctgcaacaatggcaatgggacctttgagtgtggggtatgccgttgtgggcctggctggctgggatcccagtgtgagtgctcagaggaggactatcgcccttcccagcaggacgaatgcagcccccgggagggtcagcccgtctgcagccagcggggcgagtgcctctgtggtcaatgtgtctgccacagcagtgactttggcaagatcacgggcaagtactgcgagtgtgacgacttctcctgtgtccgctacaagggggagatgtgctcaggccatggccagtgcagctgtggggactgcctgtgtgactccgactggaccggctactactgcaactgtaccacgcgtactgacacctgcatgtccagcaatgggctgctgtgcagcggccgcggcaagtgtgaatgtggcagctgtgtctgtatccagccgggctcctatggggacacctgtgagaagtgccccacctgcccagatgcctgcacctttaagaaagaatgtgtggagtgtaagaagtttgaccggggagccctacatgacgaaaatacctgcaaccgttactgccgtgacgagattgagtcagtgaaagagcttaaggacactggcaaggatgcagtgaattgtacctataagaatgaggatgactgtgtcgtcagattccagtactatgaagattctagtggaaagtccatcctgtatgtggtagaagagccagagtgtcccaagggccctgacatcctggtggtcctgctctcagtgatgggggccattctgctcattggccttgccgccctgctcatctggaaactcctcatcaccatccacgaccgaaaagaattcgctaaatttgaggaagaacgcgccagagcaaaatgggacacagccaacaacccactgtataaagaggccacgtctaccttcaccaatatcacgtaccggggcacttaatgataagcagtcatcctcagatcattatcagcctgtgccacgattgcaggagtccctgccatcatgtttacagaggacagtatttgtggggagggatttggggctcagagtggggtaggttgggagaatgtcagtatgtggaagtgtgggtctgtgtgtgtgtatgtgggggtctgtgtgtttatgtgtgtgtgttgtgtgtgggagtgtgtaatttaaaattgtgatgtgtcctgataagctgagctccttagcctttgtcccagaatgcctcctgcagggattcttcctgcttagcttgagggtgactatggagctgagcaggtgttcttcattacctcagtgagaagccagctttcctcatcaggccattgtccctgaagagaagggcagggctgaggcctctcattccagaggaagggacaccaagccttggctctaccctgagttcataaatttatggttctcaggcctgactctcagcagctatggtaggaactgctgggcttggcagcccgggtcatctgtacctctgcctcctttcccctccctcaggccgaaggaggagtcagggagagctgaactattagagctgcctgtgccttttgccatcccctcaacccagctatggttctctcgcaagggaagtccttgcaagctaattctttgacctgttgggagtgaggatgtctgggccactcaggggtcattcatggcctgggggatgtaccagcatctcccagttcataatcacaacccttcagatttgccttattggcagctctactctggaggtttgtttagaagaagtgtgtcacccttaggccagcaccatctctttacctcctaattccacaccctcactgctgtagacatttgctatgagctggggatgtctctcatgaccaaatgcttttcctcaaagggagagagtgctattgtagagccagaggtctggccctatgcttccggcctcctgtccctcatccatagcacctccacatacctggccctgagccttggtgtgctgtatccatccatggggctgattgtatttaccttctacctcttggctgccttgtgaaggaattattcccatgagttggctgggaataagtgccaggatggaatgatgggtcagttgtatcagcacgtgtggcctgttcttctatgggttggacaacctcattttaactcagtctttaatctgagaggccacagtgcaattttattttatttttctcatgatgaggttttcttaacttaaaagaacatgtatataaacatgcttgcattatatttgtaaatttatgtgatggcaaagaaggagagcataggaaaccacacagacttgggcagggtacagacactcccacttggcatcattcacagcaagtcactggccagtggctggatctgtgaggggctctctcatgatagaaggctatggggatagatgtgtggacacattggacctttcctgaggaagagggactgttcttttgtcccagaaaagcagtggctccattggtgttgacatacatccaacattaaaagccacccccaaatgcccaagaaaaaaagaaagacttatcaacatttgttccatgagcagaaaactggagctctggcctcagtgttacagctaaataatctttaattaaggcaagtcactttcttcttcttaaagctgttttctagtttgagaaatgatgggattttagcagccagtcttgaaggtctctttcagtatcaacattctaagatgctgggacttactgtgtcatcaaatgtgcggttaagattctctgggatattgatactgtttgtgtttttagttgggagatctgagagacctggctttggcaagagcagatgtcattccatatcacctttctcaatgaaagtctcattctatcctctctccaaacccgttttccaacatttgttaatagttacgtctctcctgatgtagcacttaagcttcatttagttattatttctttcttcactttgcacacatttgcatccacatattagggaagaggaatccataagtagctgaaatatctattctgtattattgtgttaacattgagaataagccttggaattagatatggggcaatgactgagccctgtctcacccatggattactccttactgtagggaatggcagtatggtagagggataaatagggggcggggagggatagtcatggatccaagaagtccttagaaatagtggcagggaacaggtgtggaagctcatgcctgtaattataaccttcagctactaagacaggtgtggtggctcacgcctgtaattataatcttcagttactaagacagagtccatgagagtgttaatgggacattttctttagataagatgttttatatgaagaaactgtatcaaagggggaagaaaatgtatttaacaggtgaatcaaatcaggaatcttgtctgagctactggaatgaagttcacaggtcttgaagaccaatattatttgtcaatatgtggggataacctgtagctgcattcatgcgnacccngggatcctctagaacgcctgcacca

SEQ ID NO: 301555 - DNA, 5385 bp, Homo sapiens
cgccgcgggaggcggacgagatgcgagcgcggccgcggccccggccgctctgggcgactgtgctggcgctgggggcgctggcgggcgttggcgtaggagggcccaacatctgtaccacgcgaggtgtgagctcctgccagcagtgcctggctgtgagccccatgtgtgcctggtgctctgatgaggccctgcctctgggctcacctcgctgtgacctgaaggagaatctgctgaaggataactgtgccccagaatccatcgagttcccagtgagtgaggcccgagtactagaggacaggcccctcagcgacaagggctctggagacagctcccaggtcactcaagtcagtccccagaggattgcactccggctccggccagatgattcgaagaatttctccatccaagtgcggcaggtggaggattaccctgtggacatctactacttgatggacctgtcttactccatgaaggatgatctgtggagcatccagaacctgggtaccaagctggccacccagatgcgaaagctcaccagtaacctgcggattggcttcggggcatttgtggacaagcctgtgtcaccatacatgtatatctccccaccagaggccctcgaaaacccctgctatgatatgaagaccacctgcttgcccatgtttggctacaaacacgtgctgacgctaactgaccaggtgacccgcttcaatgaggaagtgaagaagcagagtgtgtcacggaaccgagatgccccagagggtggctttgatgccatcatgcaggctacagtctgtgatgaaaagattggctggaggaatgatgcatcccacttgctggtgtttaccactgatgccaagactcatatagcattggacggaaggctggcaggcattgtccagcctaatgacgggcagtgtcatgttggtagtgacaatcattactctgcctccactaccatggattatccctctttggggctgatgactgagaagctatcccagaaaaacatcaatttgatctttgcagtgactgaaaatgtagtcaatctctatcagaactatagtgagctcatcccagggaccacagttggggttctgtccatggattccagcaatgtcctccagctcattgttgatgcttatgggaaaatccgttctaaagtagagctggaagtgcgtgacctccctgaagagttgtctctatccttcaatgccacctgcctcaacaatgaggtcatccctggcctcaagtcttgtatgggactcaagattggagacacggtgagcttcagcattgaggccaaggtgcgaggctgtccccaggagaaggagaagtcctttaccataaagcccgtgggcttcaaggacagcctgatcgtccaggtcacctttgattgtgactgtgcctgccaggcccaagctgaacctaatagccatcgctgcaacaatggcaatgggacctttgagtgtggggtatgccgttgtgggcctggctggctgggatcccagtgtgagtgctcagaggaggactatcgcccttcccagcaggacgaatgcagcccccgggagggtcagcccgtctgcagccagcggggcgagtgcctctgtggtcaatgtgtctgccacagcagtgactttggcaagatcacgggcaagtactgcgagtgtgacgacttctcctgtgtccgctacaagggggagatgtgctcaggccatggccagtgcagctgtggggactgcctgtgtgactccgactggaccggctactactgcaactgtaccacgcgtactgacacctgcatgtccagcaatgggctgctgtgcagcggccgcggcaagtgtgaatgtggcagctgtgtctgtatccagccgggctcctatggggacacctgtgagaagtgccccacctgcccagatgcctgcacctttaagaaagaatgtgtggagtgtaagaagtttgaccggggagccctacatgacgaaaatacctgcaaccgttactgccgtgacgagattgagtcagtgaaagagcttaaggacactggcaaggatgcagtgaattgtacctataagaatgaggatgactgtgtcgtcagattccagtactatgaagattctagtggaaagtccatcctgtatgtggtagaagagccagagtgtcccaagggccctgacatcctggtggtcctgctctcagtgatgggggccattctgctcattggccttgccgccctgctcatctggaaactcctcatcaccatccacgaccgaaaagaattcgctaaatttgaggaagaacgcgccagagcaaaatgggacacagccaacaacccactgtataaagaggccacgtctaccttcaccaatatcacgtaccggggcacttaatgataagcagtcatcctcagatcattatcagcctgtgccacgattgcaggagtccctgccatcatgtttacagaggacagtatttgtggggagggatttggggctcagagtggggtaggttgggagaatgtcagtatgtggaagtgtgggtctgtgtgtgtgtatgtgggggtctgggccactcaggggtcattcatggcctgggggatgtaccagcatctcccagttcataatcacaacccttcagatttgccttattggcagctctactctggaggtttgtttagaagaagtgtgtcacccttaggccagcaccatctctttacctcctaattccacaccctcactgctgtagacatttgctatgagctggggatgtctctcatgaccaaatgcttttcctcaaagggagagagtgctattgtagagccagaggtctggccctatgcttccggcctcctgtccctcatccatagcacctccacatacctggccctgagccttggtgtgctgtatccatccatggggctgattgtatttaccttctacctcttggctgccttgtgaaggaattattcccatgagttggctgggaataagtgccaggatggaatgatgggtcagttgtatcagcacgtgtggcctgttcttctatgggttggacaacctcattttaactcagtctttaatctgagaggccacagtgcaattttattttatttttctcatgatgaggttttcttaacttaaaagaacatgtatataaacatgcttgcattatatttgtaaatttatgtgatggcaaagaaggagagcataggaaaccacacagacttgggcagggtacagacactcccacttggcatcattcacagcaagtcactggccagtggctggatctgtgaggggctctctcatgatagaaggctatggggatagatgtgtggacacattggacctttcctgaggaagagggactgttcttttgtcccagaaaagcagtggctccattggtgttgacatacatccaacattaaaagccacccccaaatgcccaagaaaaaaagaaagacttatcaacatttgttccatgagcagaaaactggagctctggcctcagtgttacagctaaataatctttaattaaggcaagtcactttcttcttcttaaagctgttttctagtttgagaaatgatgggattttagcagccagtcttgaaggtctctttcagtatcaacattctaagatgctgggacttactgtgtcatcaaatgtgcggttaagattctctgggatattgatactgtttgtgtttttagttgggagatctgagagacctggctttggcaagagcagatgtcattccatatcacctttctcaatgaaagtctcattctatcctctctccaaacccgttttccaacatttgttaatagttacgtctctcctgatgtagcacttaagcttcatttagttattatttctttcttcactttgcacacatttgcatccacatattagggaagaggaatccataagtagctgaaatatctattctgtattattgtgttaacattgagaataagccttggaattagatatggggcaatgactgagccctgtctcacccatggattactccttactgtagggaatggcagtatggtagagggataaatagggggcggggagggatagtcatggatccaagaagtccttagaaatagtggcagggaacaggtgtggaagctcatgcctgtaattataaccttcagctactaagacaggtgtggtggctcacgcctgtaattataatcttcagttactaagacagagtccatgagagtgttaatgggacattttctttagataagatgttttatatgaagaaactgtatcaaagggggaagaaaatgtatttaacaggtgaatcaaatcaggaatcttgtctgagctactggaatgaagttcacaggtcttgaagaccaatattatttgtcaatatgtggggataacctgtagctgcattcatgaggtagcaaatagcagttttggcctgtggggtgaacagctaaacagtgttctggcatcagataacacggcacaaagggattgtgtctagctcttttggagaaaatttatgtccagtctcaggatctgtggacaataacggaaaactttgaatattcctgacaagttgccatattaggagtcagttctttacttctctgagattcccaggtcatccatgattttttttttaatttgagacaaagcctcactcttgttgcccaagctggaatgcaatggcaagatctcagttcactgcaatctctgcctctcaggttcaagccattctcctgcctcagcctccccagtagccgggattacaggcacccgccaccacacccggctaattttgtatttttagtagagacggggtttcaccatgttggccaggctggtctcgaactcctgaccttaggcgatccaccttcctcggcctcccacagtgctgggattacaagtgtgaagcactgtgcccggccagtcatccatgattttaatggggtccaaaggcctctttttctttgttaagtattcctggttgaaatttcttttcttttttttttttttttggagacagagtcttgctctatcacccaggctggagtgcagtggcacgatctctgctcactgcaagcttcgcctcccgggttcacgccattctcctgcctcagcctcccgagtagctgggattacaggcacctgccaccacgcccggctaatttctttttgtatttttagtagagacggggtttcacggtgttagccaggaaggtctcgatctcctgacctcgtgatcctcccgcctcggcctcccaaagtgctgggattacaggcgtgagccactgcccccggctgtggttgaaatttcttaagtgccttcctcacttcctaaccaccttctctgtttgggtttgtgcaacagtaat

SEQ ID NO: 301556 - DNA, 6241 bp, Homo sapiens
cgccgcgggaggcggacgagatgcgagcgcggccgcggccccggccgctctgggcgactgtgctggcgctgggggcgctggcgggcgttggcgtaggagggcccaacatctgtaccacgcgaggtgtgagctcctgccagcagtgcctggctgtgagccccatgtgtgcctggtgctctgatgaggccctgcctctgggctcacctcgctgtgacctgaaggagaatctgctgaaggataactgtgccccagaatccatcgagttcccagtgagtgaggcccgagtactagaggacaggcccctcagcgacaagggctctggagacagctcccaggtcactcaagtcagtccccagaggattgcactccggctccggccagatgattcgaagaatttctccatccaagtgcggcaggtggaggattaccctgtggacatctactacttgatggacctgtcttactccatgaaggatgatctgtggagcatccagaacctgggtaccaagctggccacccagatgcgaaagctcaccagtaacctgcggattggcttcggggcatttgtggacaagcctgtgtcaccatacatgtatatctccccaccagaggccctcgaaaacccctgctatgatatgaagaccacctgcttgcccatgtttggctacaaacacgtgctgacgctaactgaccaggtgacccgcttcaatgaggaagtgaagaagcagagtgtgtcacggaaccgagatgccccagagggtggctttgatgccatcatgcaggctacagtctgtgatgaaaagattggctggaggaatgatgcatcccacttgctggtgtttaccactgatgccaagactcatatagcattggacggaaggctggcaggcattgtccagcctaatgacgggcagtgtcatgttggtagtgacaatcattactctgcctccactaccatggattatccctctttggggctgatgactgagaagctatcccagaaaaacatcaatttgatctttgcagtgactgaaaatgtagtcaatctctatcagaactatagtgagctcatcccagggaccacagttggggttctgtccatggattccagcaatgtcctccagctcattgttgatgcttatgggaaaatccgttctaaagtagagctggaagtgcgtgacctccctgaagagttgtctctatccttcaatgccacctgcctcaacaatgaggtcatccctggcctcaagtcttgtatgggactcaagattggagacacggtgaggtgggctgggcagggcctttgtcctggagcatctgtgggcacccaaccccctttcttccttttgtagtgactaaaaatggcccccttccaccagaaaaaaaatatgggcaagaaaaatacgtttcctgaaagtcattctaagttagatgtaatggatccaccaatcttttcctctgaggcttctgttgcgtaagccatttctgttacgtgaacttcactctcaggaatttgaaaaacttacaatttggttacctttgtttgtgtatgcacagttgattgcaaaggaaaatatttctttaccttcagtccctcaccagtcgccagcctttccaaggtgagcttcagcattgaggccaaggtgcgaggctgtccccaggagaaggagaagtcctttaccataaagcccgtgggcttcaaggacagcctgatcgtccaggtcacctttgattgtgactgtgcctgccaggcccaagctgaacctaatagccatcgctgcaacaatggcaatgggacctttgagtgtggggtatgccgttgtgggcctggctggctgggatcccagtgtgagtgctcagaggaggactatcgcccttcccagcaggacgaatgcagcccccgggagggtcagcccgtctgcagccagcggggcgagtgcctctgtggtcaatgtgtctgccacagcagtgactttggcaagatcacgggcaagtactgcgagtgtgacgacttctcctgtgtccgctacaagggggagatgtgctcaggccatggccagtgcagctgtggggactgcctgtgtgactccgactggaccggctactactgcaactgtaccacgcgtactgacacctgcatgtccagcaatgggctgctgtgcagcggccgcggcaagtgtgaatgtggcagctgtgtctgtatccagccgggctcctatggggacacctgtgagaagtgccccacctgcccagatgcctgcacctttaagaaagaatgtgtggagtgtaagaagtttgaccggggagccctacatgacgaaaatacctgcaaccgttactgccgtgacgagattgagtcagtgaaagagcttaaggacactggcaaggatgcagtgaattgtacctataagaatgaggatgactgtgtcgtcagattccagtactatgaagattctagtggaaagtccatcctgtatgtggtagaagagccagagtgtcccaagggccctgacatcctggtggtcctgctctcagtgatgggggccattctgctcattggccttgccgccctgctcatctggaaactcctcatcaccatccacgaccgaaaagaattcgctaaatttgaggaagaacgcgccagagcaaaatgggacacagccaacaacccactgtataaagaggccacgtctaccttcaccaatatcacgtaccggggcacttaatgataagcagtcatcctcagatcattatcagcctgtgccacgattgcaggagtccctgccatcatgtttacagaggacagtatttgtggggagggatttggggctcagagtggggtaggttgggagaatgtcagtatgtggaagtgtgggtctgtgtgtgtgtatgtgggggtctgtgtgtttatgtgtgtgtgttgtgtgtgggagtgtgtaatttaaaattgtgatgtgtcctgataagctgagctccttagcctttgtcccagaatgcctcctgcagggattcttcctgcttagcttgagggtgactatggagctgagcaggtgttcttcattacctcagtgagaagccagctttcctcatcaggccattgtccctgaagagaagggcagggctgaggcctctcattccagaggaagggacaccaagccttggctctaccctgagttcataaatttatggttctcaggcctgactctcagcagctatggtaggaactgctgggcttggcagcccgggtcatctgtacctctgcctcctttcccctccctcaggccgaaggaggagtcagggagagctgaactattagagctgcctgtgccttttgccatcccctcaacccagctatggttctctcgcaagggaagtccttgcaagctaattctttgacctgttgggagtgaggatgtctgggccactcaggggtcattcatggcctgggggatgtaccagcatctcccagttcataatcacaacccttcagatttgccttattggcagctctactctggaggtttgtttagaagaagtgtgtcacccttaggccagcaccatctctttacctcctaattccacaccctcactgctgtagacatttgctatgagctggggatgtctctcatgaccaaatgcttttcctcaaagggagagagtgctattgtagagccagaggtctggccctatgcttccggcctcctgtccctcatccatagcacctccacatacctggccctgagccttggtgtgctgtatccatccatggggctgattgtatttaccttctacctcttggctgccttgtgaaggaattattcccatgagttggctgggaataagtgccaggatggaatgatgggtcagttgtatcagcacgtgtggcctgttcttctatgggttggacaacctcattttaactcagtctttaatctgagaggccacagtgcaattttattttatttttctcatgatgaggttttcttaacttaaaagaacatgtatataaacatgcttgcattatatttgtaaatttatgtgatggcaaagaaggagagcataggaaaccacacagacttgggcagggtacagacactcccacttggcatcattcacagcaagtcactggccagtggctggatctgtgaggggctctctcatgatagaaggctatggggatagatgtgtggacacattggacctttcctgaggaagagggactgttcttttgtcccagaaaagcagtggctccattggtgttgacatacatccaacattaaaagccacccccaaatgcccaagaaaaaaagaaagacttatcaacatttgttccatgagcagaaaactggagctctggcctcagtgttacagctaaataatctttaattaaggcaagtcactttcttcttcttaaagctgttttctagtttgagaaatgatgggattttagcagccagtcttgaaggtctctttcagtatcaacattctaagatgctgggacttactgtgtcatcaaatgtgcggttaagattctctgggatattgatactgtttgtgtttttagttgggagatctgagagacctggctttggcaagagcagatgtcattccatatcacctttctcaatgaaagtctcattctatcctctctccaaacccgttttccaacatttgttaatagttacgtctctcctgatgtagcacttaagcttcatttagttattatttctttcttcactttgcacacatttgcatccacatattagggaagaggaatccataagtagctgaaatatctattctgtattattgtgttaacattgagaataagccttggaattagatatggggcaatgactgagccctgtctcacccatggattactccttactgtagggaatggcagtatggtagagggataaatagggggcggggagggatagtcatggatccaagaagtccttagaaatagtggcagggaacaggtgtggaagctcatgcctgtaattataaccttcagctactaagacaggtgtggtggctcacgcctgtaattataatcttcagttactaagacagagtccatgagagtgttaatgggacattttctttagataagatgttttatatgaagaaactgtatcaaagggggaagaaaatgtatttaacaggtgaatcaaatcaggaatcttgtctgagctactggaatgaagttcacaggtcttgaagaccaatattatttgtcaatatgtggggataacctgtagctgcattcatgaggtagcaaatagcagttttggcctgtggggtgaacagctaaacagtgttctggcatcagataacacggcacaaagggattgtgtctagctcttttggagaaaatttatgtccagtctcaggatctgtggacaataacggaaaactttgaatattcctgacaagttgccatattaggagtcagttctttacttctctgagattcccaggtcatccatgattttttttttaatttgagacaaagcctcactcttgttgcccaagctggaatgcaatggcaagatctcagttcactgcaatctctgcctctcaggttcaagccattctcctgcctcagcctccccagtagccgggattacaggcacccgccaccacacccggctaattttgtatttttagtagagacggggtttcaccatgttggccaggctggtctcgaactcctgaccttaggcgatccaccttcctcggcctcccacagtgctgggattacaagtgtgaagcactgtgcccggccagtcatccatgattttaatggggtccaaaggcctctttttctttgttaagtattcctggttgaaatttcttttcttttttttttttttttggagacagagtcttgctctatcacccaggctggagtgcagtggcacgatctctgctcactgcaagcttcgcctcccgggttcacgccattctcctgcctcagcctcccgagtagctgggattacaggcacctgccaccacgcccggctaatttctttttgtatttttagtagagacggggtttcacggtgttagccaggaaggtctcgatctcctgacctcgtgatcctcccgcctcggcctcccaaagtgctgggattacaggcgtgagccactgcccccggctgtggttgaaatttcttaagtgccttcctcacttcctaaccaccttctctgtttgggtttgtgcaacagtaat

SEQ ID NO: 301557 - DNA, 2900 bp, Homo sapiens
cgccgcgggaggcggacgagatgcgagcgcggccgcggccccggccgctctgggcgactgtgctggcgctgggggcgctggcgggcgttggcgtaggagggcccaacatctgtaccacgcgaggtgtgagctcctgccagcagtgcctggctgtgagccccatgtgtgcctggtgctctgatgaggccctgcctctgggctcacctcgctgtgacctgaaggagaatctgctgaaggataactgtgccccagaatccatcgagttcccagtgagtgaggcccgagtactagaggacaggcccctcagcgacaagggctctggagacagctcccaggtcactcaagtcagtccccagaggattgcactccggctccggccagatgattcgaagaatttctccatccaagtgcggcaggtggaggattaccctgtggacatctactacttgatggacctgtcttactccatgaaggatgatctgtggagcatccagaacctgggtaccaagctggccacccagatgcgaaagctcaccagtaacctgcggattggcttcggggcatttgtggacaagcctgtgtcaccatacatgtatatctccccaccagaggccctcgaaaacccctgctatgatatgaagaccacctgcttgcccatgtttggctacaaacacgtgctgacgctaactgaccaggtgacccgcttcaatgaggaagtgaagaagcagagtgtgtcacggaaccgagatgccccagagggtggctttgatgccatcatgcaggctacagtctgtgatgaaaagattggctggaggaatgatgcatcccacttgctggtgtttaccactgatgccaagactcatatagcattggacggaaggctggcaggcattgtccagcctaatgacgggcagtgtcatgttggtagtgacaatcattactctgcctccactaccatggattatccctctttggggctgatgactgagaagctatcccagaaaaacatcaatttgatctttgcagtgactgaaaatgtagtcaatctctatcagaactatagtgagctcatcccagggaccacagttggggttctgtccatggattccagcaatgtcctccagctcattgttgatgcttatgggaaaatccgttctaaagtagagctggaagtgcgtgacctccctgaagagttgtctctatccttcaatgccacctgcctcaacaatgaggtcatccctggcctcaagtcttgtatgggactcaagattggagacacggtgagcttcagcattgaggccaaggtgcgaggctgtccccaggagaaggagaagtcctttaccataaagcccgtgggcttcaaggacagcctgatcgtccaggtcacctttgattgtgactgtgcctgccaggcccaagctgaacctaatagccatcgctgcaacaatggcaatgggacctttgagtgtggggtatgccgttgtgggcctggctggctgggatcccagtgtgagtgctcagaggaggactatcgcccttcccagcaggacgaatgcagcccccgggagggtcagcccgtctgcagccagcggggcgagtgcctctgtggtcaatgtgtctgccacagcagtgactttggcaagatcacgggcaagtactgcgagtgtgacgacttctcctgtgtccgctacaagggggagatgtgctcaggccatggccagtgcagctgtggggactgcctgtgtgactccgactggaccggctactactgcaactgtaccacgcgtactgacacctgcatgtccagcaatgggctgctgtgcagcggccgcggcaagtgtgaatgtggcagctgtgtctgtatccagccgggctcctatggggacacctgtgagaagtgccccacctgcccagatgcctgcacctttaagaaagaatgtgtggagtgtaagaagtttgaccggggagccctacatgacgaaaatacctgcaaccgttactgccgtgacgagattgagtcagtgaaagagcttaaggacactggcaaggatgcagtgaattgtacctataagaatgaggatgactgtgtcgtcagattccagtactatgaagattctagtggaaagtccatcctgtatgtggtagaagagccagagtgtcccaagggccctgacatcctggtggtcctgctctcagtgatgggggccattctgctcattggccttgccgccctgctcatctggaaactcctcatcaccatccacgaccgaaaagaattcgctaaatttgaggaagaacgcgccagagcaaaatgggacacagtaagagacggggctgggcgttttctaaagtcattggtctgagactcttaagtggaagcagcagatgctttgggtggtcatgttcagccagtaccatcgtctttccattatcctctgttctggaaactgggagagatggtctcactatccccttgtccttcagcttccttcagcctcttagaaatagtggcaggatgtcattccatctcattctcttctttctcctcaaataaatggttacttccaggctgggcctggtggcgcgtgcctgtaatcccagcactttgagaggccaaggtgggcagatcacttgagctcaagagttcgagaccagcctgggcaacatggtgaaaccccgtctctattaataatataaaaattagccgggtgtggtggtgcatgcctgtaatcccagctattcgggaggctgaagcaggaggattgcttgaacccagtaggtagaggttgtagtgagctgagattgcaccctgctctgggtgacagagcaggactcggtctcaaaaataataataataataataataataataaaataaaataaaaggttacttccaaatc

SEQ ID NO: 301558 - DNA, 1684 bp, Homo sapiens
cgccgcgggaggcggacgagatgcgagcgcggccgcggccccggccgctctgggcgactgtgctggcgctgggggcgctggcgggcgttggcgtaggagggcccaacatctgtaccacgcgaggtgtgagctcctgccagcagtgcctggctgtgagccccatgtgtgcctggtgctctgatgaggccctgcctctgggctcacctcgctgtgacctgaaggagaatctgctgaaggataactgtgccccagaatccatcgagttcccagtgagtgaggcccgagtactagaggacaggcccctcagcgacaagggctctggagacagctcccaggtcactcaagtcagtccccagaggattgcactccggctccggccagatgattcgaagaatttctccatccaagtgcggcaggtggaggattaccctgtggacatctactacttgatggacctgtcttactccatgaaggatgatctgtggagcatccagaacctgggtaccaagctggccacccagatgcgaaagctcaccagtaacctgcggattggcttcggggcatttgtggacaagcctgtgtcaccatacatgtatatctccccaccagaggccctcgaaaacccctgctatgatatgaagaccacctgcttgcccatgtttggctacaaacacgtgctgacgctaactgaccaggtgacccgcttcaatgaggaagtgaagaagcagagtgtgtcacggaaccgagatgccccagagggtggctttgatgccatcatgcaggctacagtctgtgatgaaaagattggctggaggaatgatgcatcccacttgctggtgtttaccactgatgccaagactcatatagcattggacggaaggctggcaggcattgtccagcctaatgacgggcagtgtcatgttggtagtgacaatcattactctgcctccactaccatggattatccctctttggggctgatgactgagaagctatcccagaaaaacatcaatttgatctttgcagtgactgaaaatgtagtcaatctctatcagaactatagtgagctcatcccagggaccacagttggggttctgtccatggattccagcaatgtcctccagctcattgttgatgcttatgggaaaatccgttctaaagtagagctggaagtgcgtgacctccctgaagagttgtctctatccttcaatgccacctgcctcaacaatgaggtcatccctggcctcaagtcttgtatgggactcaagattggagacacggtgaggtgggctgggcagggcctttgtcctggagcatctgtgggcacccaaccccctttcttccttttgtagtgactaaaaatggcccccttccaccagaaaaaaaatatgggcaagaaaaatacgtttcctgaaagtcattctaagttagatgtaatggatccaccaatcttttcctctgaggcttctgttgcgtaagccatttctgttacgtgaacttcactctcaggaatttgaaaaacttacaatttggttacctttgtttgtgtatgcacagttgattgcaaaggaaaatatttctttaccttcagtccctcaccagtcgccagcctttccaaggtaattaatacctttcttttgtaaaacgacacaagaaagtaaaatctaaaatgtaaaacactcca

SEQ ID NO: 301559 - DNA, 442 bp, Homo sapiens
gcggccgcggcaagtgtgaatgtggcagctgtgtctgtatccagccgggctcctatggggacacctgtgagaagtgccccacctgcccagatgcctgcacctttaagaagtgagtgtggagtctggagagagccgggaggctgggaggtaggagaggatcccctgactagaatccccagctctccaggtgtgtttcttgctcaccagagccttagggagaggagtccactccagccagatggctgtctctccttttgccaaaggctttgggcaagttggaatagagccaactgtgaaggagccaaagttgaacgagctggacttcgattgagaatgtcctctcctagggtgacatcctgactccctctgagctgggaggaaggctaaaccagtctgaggaacaatccagtgctaatgttctgattcagtgggagatgtgagg

SEQ ID NO: 301560 - DNA, 3667 bp, Homo sapiens
cagaaaaaactcagggcaaggttggccttggctcataagaccttttcaaactttattgagtcaatggttctagagaaagagaacacccatgaacgttccccaagttctcccaagggcgagaaggggaagagcaggctgcgccagggttcctggcgggcgtttctgaaaagcaaagatgccggaagccccaaaaagcccaccctagtgagtctgcctctaggacccgaagttctctccccagcagagactgacagccactgtgaggaacgggcggaggacaaagagggctatgtttttagcgatcactgggcaccgccacttgcctccacacctttgtcctccagtttagtttctccagaacacaggaggaaaagtgaaccgaccatcaagtgcacagccacccaggaaggcgacgctaaaccaagatgagcagaaggaagagagcagggaaggaggccagggtccgcgcggcttgggcacagtgccctggctcagggaccttcctgggagtgagaaccacatgccctgggaagaaccagcaggtgagaagcccagttgctctcacagtcagaaggcgttccacatggagcctgcccagaagccctgcttcaccactgacatggtgacatgggccctcctctgcatctctgcagagactgtgcgtggggaggctccttcacagcctaggggcatccctcaccgctcgcccgtcagtgtggatgacctgtggctggagaagacacagagaaagaagttgcagaagcaggcccacgtcgaaaggaggctgcacataggggcagtgcacaaagatggagtcaagtgctggagaaagacgatcattacctctccagagtctttgaatctccctagaagaagccatccactctcccagagtgctccaacgggactgaaccacatgggctggccagagcacacaccaggcactgccatgcctgatggagctctggacacagctgtctgcgctgacgaagtggggagcgaggaggacctgtatgatgacctgcacagctccagccaccactacagccaccctggagggggtggggagcagctggctatcaatgagctcatcagcgatggcagtgtggtctgcgctgaagcactctgggaccatgtcaccatggacgaccaggagctgggcttcaaagctggggacgtcatcgaagtgatggatgccaccaacagagagtggtggtggggccgggtcgccgatggcgagggctggtttccagccagcttcgttcggctgagggtgaatcaggacgagcccgcggatgacgacgcccctctggccgggaacagcggagcggaggacggcggggcggaggcgcagagcagcaaggaccagatgcggaccaacgtcatcaacgagatcctcagcactgagcgggactacatcaagcacctgcgcgacatctgcgagggctacgtccggcagtgccgcaagcgcgcagacatgttcagcgaggagcagctgcgtaccatcttcgggaacatcgaggacatctaccgctgccagaaggccttcgtgaaggccctggagcagaggttcaaccgcgagcgcccacacctgagcgagctgggtgcctgcttcctggagcatcaagccgacttccagatctactcggagtactgcaataaccaccccaacgcctgcgtggagctctcccggctcaccaagctcagcaagtacgtgtacttcttcgaggcctgccggctgctgcagaagatgattgacatctccctggatggcttcctgctgactccggtgcagaagatctgcaagtaccctctgcagctggccgagctgctcaaatacacgcacccccagcacagggacttcaaggatgttgaagccgccttgcatgccatgaagaacgtggcccagctcatcaacgagcggaagcggagacttgagaacatcgacaagattgctcagtggcagagctccatagaggactgggagggagaagatctcttggtcaggagctcagaactcatctactcgggggagctgactcgagttacacagcctcaagccaaaagccagcagcgaatgttctttctctttgaccaccagctcatctactgtaagaaggacctgctccgccgcgacgtgttgtactacaagggccggctggacatggacggcctggaggtggtggacctggaggacgggaaggacagagacctccatgtgagcatcaagaacgccttccggctgcaccgtggcgccacaggggacagccacctgctgtgcaccaggaagcccgagcagaagcagcgctggctcaaggcctttgccagggagagggagcaggtgcagctggaccaggagacaggcttctccatcactgaactgcagaggaagcaggccatgctgaatgccagcaagcagcaggtcacagggaagcccaaagctgttggccggccctgctacctgacgcgccagaagcacccagccctgcccagcaaccggccccagcagcaggtcctggtgctggcggagcccaggcgcaagccatctaccttctggcacagcatcagccggctggcacccttccgcaagtgaactggtccctgcctgacagcacctgctgggccttcctgccagtggcccccagtttttcttccccgaggcccactcggcctggccttcctctgcctgcaagtgagcagggatgggctggggagttgcttgtgccaccaagacgtgccaggtctgtactcctgttgtctttttccctgctcctggtgccctgaagagaccagcaagggggcagaccccgcactcgccacaccgccgctgcagcttgggccccatccgccctctggacctgtgtagggcctcactgctggagcggggaaaccgcagctcagcccaggcccagctggggagaaggcgctacctgcgtgggaccctcttctctggaaacctaatcctcctttcatttcctctgggcaggactctctggccttctgtggcctgcaatgccaggccatgtgcccctctgccctctagttctccaagtccccagcccggccagtggtgccaggcagcttgccacttgggagggcagaagccaggaattccacacccttgtgttgcgcccggagcccgcccttcgcctcccagcccctcaagacaccgctggctgctggacaccctcttcacttgtgtgtgtgtgtgtagcggaaaaggacaagacggtgcagtcggctgcatactcccagtcgggagtgtggtcagtctgcctgctgctgtgcggtagctccagaaccacctcgttcctggttttgtttggattttggcatcttgtttttctaacaacaaacaatggagaaaaagaattgattcttagtgacacagaagattgccttacgctcgtgagcgtgagaagccataagagagagaccgaattctgtggctcagcacacaggactgacccacagcccaggcagcgggtgtgtggagatggcgccctgtcctgccaaggggcgccaggagcagagccagggcctggcgagctggcgtggagcccacaggattcagcagcatggacagtcactcttgcactattccttctccaagccagaaaccacatttaatttcataaataaatttatgaaaagtaacctggctgct

SEQ ID NO: 301561 - DNA, 4258 bp, Homo sapiens
cagaaaaaactcagggcaaggttggccttggctcataagaccttttcaaactttattgagtcaatggttctagagaaagagaacacccatgaacgttccccaagttctcccaagggcgagaaggggaagagcaggctgcgccagggttcctggcgggcgtttctgaaaagcaaagatgccggaagccccaaaaagcccaccctagtgagtctgcctctaggacccgaagttctctccccagcagagactgacagccactgtgaggaacgggcggaggacaaagagggctatgtttttagcgatcactgggcaccgccacttgcctccacacctttgtcctccagtttagtttctccagaacacaggaggaaaagtgaaccgaccatcaagtgcacagccacccaggaaggcgacgctaaaccaagatgagcagaaggaagagagcagggaaggaggccagggtccgcgcggcttgggcacagtgccctggctcagggaccttcctgggagtgagaaccacatgccctgggaagaaccagcaggtgagaagcccagttgctctcacagtcagaaggcgttccacatggagcctgcccagaagccctgcttcaccactgacatggtgacatgggccctcctctgcatctctgcagagactgtgcgtggggaggctccttcacagcctaggggcatccctcaccgctcgcccgtcagtgtggatgacctgtggctggagaagacacagagaaagaagttgcagaagcaggcccacgtcgaaaggaggctgcacataggggcagtgcacaaagatggagtcaagtgctggagaaagacgatcattacctctccagagtctttgaatctccctagaagaagccatccactctcccagagtgctccaacgggactgaaccacatgggctggccagagcacacaccaggcactgccatgcctgatggagctctggacacagctgtctgcgctgacgaagtggggagcgaggaggacctgtatgatgacctgcacagctccagccaccactacagccaccctggagggggtggggagcagctggctatcaatgagctcatcagcgatggcagtgtggtctgcgctgaagcactctgggaccatgtcaccatggacgaccaggagctgggcttcaaagctggggacgtcatcgaagtgatggatgccaccaacagagagtggtggtggggccgggtcgccgatggcgagggctggtttccagccagcttcgttcggctgagggtgaatcaggacgagcccgcggatgacgacgcccctctggccgggaacagcggagcggaggacggcggggcggaggcgcagagcagcaaggaccagatgcggaccaacgtcatcaacgagatcctcagcactgagcgggactacatcaagcacctgcgcgacatctgcgagggctacgtccggcagtgccgcaagcgcgcagacatgttcagcgaggagcagctgcgtaccatcttcgggaacatcgaggacatctaccgctgccagaaggccttcgtgaaggccctggagcagaggttcaaccgcgagcgcccacacctgagcgagctgggtgcctgcttcctggagcatcaagccgacttccagatctactcggagtactgcaataaccaccccaacgcctgcgtggagctctcccggctcaccaagctcagcaagtacgtgtacttcttcgaggcctgccggctgctgcagaagatgattgacatctccctggatggcttcctgctgactccggtgcagaagatctgcaagtaccctctgcagctggccgagctgctcaaatacacgcacccccagcacagggacttcaaggatgttgaagccgccttgcatgccatgaagaacgtggcccagctcatcaacgagcggaagcggagacttgagaacatcgacaagattgctcagtggcagagctccatagaggactgggagggagaagatctcttggtcaggagctcagaactcatctactcgggggagctgactcgagttacacagcctcaagccaaaagccagcagcgaatgttctttctctttgaccaccagctcatctactgtaagaaggacctgctccgccgcgacgtgttgtactacaagggccggctggacatggacggcctggaggtggtggacctggaggacgggaaggacagagacctccatgtgagcatcaagaacgccttccggctgcaccgtggcgccacaggggacagccacctgctgtgcaccaggaagcccgagcagaagcagcgctggctcaaggcctttgccagggagagggagcaggtgcagctggaccaggagacaggcttctccatcactgaactgcagaggaagcaggccatgctgaatgccagcaagcagcaggtcacagggaagcccaaaggtaggcggacagcagccccacctcctcggctgcccggtccttaccctgctgacatcattcccttctctgaaccacaaagccaagccagctagccaccaggcctgaggggggcccactgccctttgcagctgtttgttcccaaaggttggtaataaggggccactggggaagcctgggtcagtatatggttgacattcttactctcaacaccttggctcccccagatcagggccattggtgacaatgcttgtttccccagggttccttcctgacaggcatctggggttggtgtagggatggagctgctttccccatttctacagagagccatgcccctgaaacatcacatgcctttgcacaggccacccccctcttcaggctgctgcaggaggccaggcccaggccagagaccccaggcagcctgagctcttggatgtggtcagctctccaggagcaagtcctgtgtggcaaaactgcctcctacggcggctctgaagcagagccctgggacggaccccatgctgtccccaacagctggggtggcactctgccctgggcacccatgaccctctgctgtctctccctgttcagctgttggccggccctgctacctgacgcgccagaagcacccagccctgcccagcaaccggccccagcagcaggtcctggtgctggcggagcccaggcgcaagccatctaccttctggcacagcatcagccggctggcacccttccgcaagtgaactggtccctgcctgacagcacctgctgggccttcctgccagtggcccccagtttttcttccccgaggcccactcggcctggccttcctctgcctgcaagtgagcagggatgggctggggagttgcttgtgccaccaagacgtgccaggtctgtactcctgttgtctttttccctgctcctggtgccctgaagagaccagcaagggggcagaccccgcactcgccacaccgccgctgcagcttgggccccatccgccctctggacctgtgtagggcctcactgctggagcggggaaaccgcagctcagcccaggcccagctggggagaaggcgctacctgcgtgggaccctcttctctggaaacctaatcctcctttcatttcctctgggcaggactctctggccttctgtggcctgcaatgccaggccatgtgcccctctgccctctagttctccaagtccccagcccggccagtggtgccaggcagcttgccacttgggagggcagaagccaggaattccacacccttgtgttgcgcccggagcccgcccttcgcctcccagcccctcaagacaccgctggctgctggacaccctcttcacttgtgtgtgtgtgtgtagcggaaaaggacaagacggtgcagtcggctgcatactcccagtcgggagtgtggtcagtctgcctgctgctgtgcggtagctccagaaccacctcgttcctggttttgtttggattttggcatcttgtttttctaacaacaaacaatggagaaaaagaattgattcttagtgacacagaagattgccttacgctcgtgagcgtgagaagccataagagagagaccgaattctgtggctcagcacacaggactgacccacagcccaggcagcgggtgtgtggagatggcgccctgtcctgccaaggggcgccaggagcagagccagggcctggcgagctggcgtggagcccacaggattcagcagcatggacagtcactcttgcactattccttctccaagccagaaaccacatttaatttcataaataaatttatgaaaagtaacctggctgct

SEQ ID NO: 301562 - DNA, 145 bp, Homo sapiens
gcggccgcctactactactactgctcgaattcaagcttctaacgatgtacgaggacatggacagtcactcttgcactattccttctccaagccagaaaccacatttaatttcataaataaatttatgaaaagtaacctggctgct

SEQ ID NO: 301563 - DNA, 2946 bp, Homo sapiens
tagagagaggaaatgaggccagatgggcagcaagctttggatgctgtggtaaggagttttgactgtcactctgaagcagctctcaggcagaggaatgatgtgatttattgtagtttaccaaggaccgctcagggtattgtgcagagggaagaccagctggaggttcttgtgtcactccgtgaagtgtgggggcggcggaggggcagagatgggacctgcactggagccatgcctgatggagctctggacacagctgtctgcgctgacgaagtggggagcgaggaggacctgtatgatgacctgcacagctccagccaccactacagccaccctggagggggtggggagcagctggctatcaatgagctcatcagcgatggcagtgtggtctgcgctgaagcactctgggaccatgtcaccatggacgaccaggagctgggcttcaaagctggggacgtcatcgaagtgatggatgccaccaacagagagtggtggtggggccgggtcgccgatggcgagggctggtttccagccagcttcgttcggctgagggtgaatcaggacgagcccgcggatgacgacgcccctctggccgggaacagcggagcggaggacggcggggcggaggcgcagagcagcaaggaccagatgcggaccaacgtcatcaacgagatcctcagcactgagcgggactacatcaagcacctgcgcgacatctgcgagggctacgtccggcagtgccgcaagcgcgcagacatgttcagcgaggagcagctgcgtaccatcttcgggaacatcgaggacatctaccgctgccagaaggccttcgtgaaggccctggagcagaggttcaaccgcgagcgcccacacctgagcgagctgggtgcctgcttcctggagcatcaagccgacttccagatctactcggagtactgcaataaccaccccaacgcctgcgtggagctctcccggctcaccaagctcagcaagtacgtgtacttcttcgaggcctgccggctgctgcagaagatgattgacatctccctggatggcttcctgctgactccggtgcagaagatctgcaagtaccctctgcagctggccgagctgctcaaatacacgcacccccagcacagggacttcaaggatgttgaagccgccttgcatgccatgaagaacgtggcccagctcatcaacgagcggaagcggagacttgagaacatcgacaagattgctcagtggcagagctccatagaggactgggagggagaagatctcttggtcaggagctcagaactcatctactcgggggagctgactcgagttacacagcctcaagccaaaagccagcagcgaatgttctttctctttgaccaccagctcatctactgtaagaaggacctgctccgccgcgacgtgttgtactacaagggccggctggacatggacggcctggaggtggtggacctggaggacgggaaggacagagacctccatgtgagcatcaagaacgccttccggctgcaccgtggcgccacaggggacagccacctgctgtgcaccaggaagcccgagcagaagcagcgctggctcaaggcctttgccagggagagggagcaggtgcagctggaccaggagacaggcttctccatcactgaactgcagaggaagcaggccatgctgaatgccagcaagcagcaggtcacagggaagcccaaagctgttggccggccctgctacctgacgcgccagaagcacccagccctgcccagcaaccggccccagcagcaggtcctggtgctggcggagcccaggcgcaagccatctaccttctggcacagcatcagccggctggcacccttccgcaagtgaactggtccctgcctgacagcacctgctgggccttcctgccagtggcccccagtttttcttccccgaggcccactcggcctggccttcctctgcctgcaagtgagcagggatgggctggggagttgcttgtgccaccaagacgtgccaggtctgtactcctgttgtctttttccctgctcctggtgccctgaagagaccagcaagggggcagaccccgcactcgccacaccgccgctgcagcttgggccccatccgccctctggacctgtgtagggcctcactgctggagcggggaaaccgcagctcagcccaggcccagctggggagaaggcgctacctgcgtgggaccctcttctctggaaacctaatcctcctttcatttcctctgggcaggactctctggccttctgtggcctgcaatgccaggccatgtgcccctctgccctctagttctccaagtccccagcccggccagtggtgccaggcagcttgccacttgggagggcagaagccaggaattccacacccttgtgttgcgcccggagcccgcccttcgcctcccagcccctcaagacaccgctggctgctggacaccctcttcacttgtgtgtgtgtgtgtagcggaaaaggacaagacggtgcagtcggctgcatactcccagtcgggagtgtggtcagtctgcctgctgctgtgcggtagctccagaaccacctcgttcctggttttgtttggattttggcatcttgtttttctaacaacaaacaatggagaaaaagaattgattcttagtgacacagaagattgccttacgctcgtgagcgtgagaagccataagagagagaccgaattctgtggctcagcacacaggactgacccacagcccaggcagcgggtgtgtggagatggcgccctgtcctgccaaggggcgccaggagcagagccagggcctggcgagctggcgtggagcccacaggattcagcagcatggacagtcactcttgcactattccttctccaagccagaaaccacatttaatttcataaataaatttatgaaaagtaacctggctgct

SEQ ID NO: 301564 - DNA, 3256 bp, Homo sapiens
ggcttcgcgggaggagccccaggcccgcgagcgcaggcgccccgcctctccccgggcgctgcgggccaccggctcggccctgtgcggcgggatctcggggccgcacggagcgggaggccgggcgccatggcgagggccccgcagccccggcgcggccccgcggcgcccgggaacgccctgcgcgccctgctgcgctgcaacctgccccccggcgcccagcgcgtggtggtctccgccgtgctggcgctcctggttctcatcaacgtcgtactgatcttcctgctggccttccgctgagcggccgcgcagggcgccgcgccggggtgagtggcgcgggcgacggcactccagccgttgccacccgcggcctccgcactggtcgcggagggaaggcctccttccaccccatgtgctcactaccagggcctggtccgggggtgtcgccgagcgggtgcctgaggggcgtggtggcacgtgtgtcacagggtccttctgtcctctgtgccctgtggggagtgggggctgcgggggcgaggggggaggccaaaatggcgcgtctctgcgagtaaccgaggatgcggattcagctggggctccccggctgcttgtctggaaacggagtgcatgtgaccgctgggtgagcgacccgcgcttgcatctgtgtaggttgagtcagctcatcagcgatggcagtgtggtctgcgctgaagcactctgggaccatgtcaccatggacgaccaggagctgggcttcaaagctggggacgtcatcgaagtgatggatgccaccaacagagagtggtggtggggccgggtcgccgatggcgagggctggtttccagccagcttcgttcggctgagggtgaatcaggacgagcccgcggatgacgacgcccctctggccgggaacagcggagcggaggacggcggggcggaggcgcagagcagcaaggaccagatgcggaccaacgtcatcaacgagatcctcagcactgagcgggactacatcaagcacctgcgcgacatctgcgagggctacgtccggcagtgccgcaagcgcgcagacatgttcagcgaggagcagctgcgtaccatcttcgggaacatcgaggacatctaccgctgccagaaggccttcgtgaaggccctggagcagaggttcaaccgcgagcgcccacacctgagcgagctgggtgcctgcttcctggagcatcaagccgacttccagatctactcggagtactgcaataaccaccccaacgcctgcgtggagctctcccggctcaccaagctcagcaagtacgtgtacttcttcgaggcctgccggctgctgcagaagatgattgacatctccctggatggcttcctgctgactccggtgcagaagatctgcaagtaccctctgcagctggccgagctgctcaaatacacgcacccccagcacagggacttcaaggatgttgaagccgccttgcatgccatgaagaacgtggcccagctcatcaacgagcggaagcggagacttgagaacatcgacaagattgctcagtggcagagctccatagaggactgggagggagaagatctcttggtcaggagctcagaactcatctactcgggggagctgactcgagttacacagcctcaagccaaaagccagcagcgaatgttctttctctttgaccaccagctcatctactgtaagaaggacctgctccgccgcgacgtgttgtactacaagggccggctggacatggacggcctggaggtggtggacctggaggacgggaaggacagagacctccatgtgagcatcaagaacgccttccggctgcaccgtggcgccacaggggacagccacctgctgtgcaccaggaagcccgagcagaagcagcgctggctcaaggcctttgccagggagagggagcaggtgcagctggaccaggagacaggcttctccatcactgaactgcagaggaagcaggccatgctgaatgccagcaagcagcaggtcacagggaagcccaaagctgttggccggccctgctacctgacgcgccagaagcacccagccctgcccagcaaccggccccagcagcaggtcctggtgctggcggagcccaggcgcaagccatctaccttctggcacagcatcagccggctggcacccttccgcaagtgaactggtccctgcctgacagcacctgctgggccttcctgccagtggcccccagtttttcttccccgaggcccactcggcctggccttcctctgcctgcaagtgagcagggatgggctggggagttgcttgtgccaccaagacgtgccaggtctgtactcctgttgtctttttccctgctcctggtgccctgaagagaccagcaagggggcagaccccgcactcgccacaccgccgctgcagcttgggccccatccgccctctggacctgtgtagggcctcactgctggagcggggaaaccgcagctcagcccaggcccagctggggagaaggcgctacctgcgtgggaccctcttctctggaaacctaatcctcctttcatttcctctgggcaggactctctggccttctgtggcctgcaatgccaggccatgtgcccctctgccctctagttctccaagtccccagcccggccagtggtgccaggcagcttgccacttgggagggcagaagccaggaattccacacccttgtgttgcgcccggagcccgcccttcgcctcccagcccctcaagacaccgctggctgctggacaccctcttcacttgtgtgtgtgtgtgtagcggaaaaggacaagacggtgcagtcggctgcatactcccagtcgggagtgtggtcagtctgcctgctgctgtgcggtagctccagaaccacctcgttcctggttttgtttggattttggcatcttgtttttctaacaacaaacaatggagaaaaagaattgattcttagtgacacagaagattgccttacgctcgtgagcgtgagaagccataagagagagaccgaattctgtggctcagcacacaggactgacccacagcccaggcagcgggtgtgtggagatggcgccctgtcctgccaaggggcgccaggagcagagccagggcctggcgagctggcgtggagcccacaggattcagcagcatggacagtcactcttgcactattccttctccaagccagaaaccacatttaatttcataaataaatttatgaaaagtaacctggctgct

SEQ ID NO: 301565 - DNA, 2144 bp, Homo sapiens
gcaggaggcagccacgcctctgcatgcctccagtcagccagtttgagcattagcagtgtgctgggcactgctgcagccctggggcaacacacagaaaactagccctgtcctgatgagctccttgcaatgggggaagaggatgccaacaggatattaagctctgctctgtgcttgccatttatggagaagagaggggctgtgcatctgatagtgaggatgtggtcaaagggcacagccccagaggaaagcagctccacacgtgggggctgcaggggatcctcaccctttctctgtctccagcctgcagcagccttccatctctgttctgccccagggacttcaaggatgttgaagccgccttgcatgccatgaagaacgtggcccagctcatcaacgagcggaagcggagacttgagaacatcgacaagattgctcagtggcagagctccatagaggactgggagggagaagatctcttggtcaggagctcagaactcatctactcgggggagctgactcgagttacacagcctcaagccaaaagccagcagcgaatgttctttctctttgaccaccagctcatctactgtaagaaggacctgctccgccgcgacgtgttgtactacaagggccggctggacatggacggcctggaggtggtggacctggaggacgggaaggacagagacctccatgtgagcatcaagaacgccttccggctgcaccgtggcgccacaggggacagccacctgctgtgcaccaggaagcccgagcagaagcagcgctggctcaaggcctttgccagggagagggagcaggtgcagctggaccaggagacaggcttctccatcactgaactgcagaggaagcaggccatgctgaatgccagcaagcagcaggtcacagggaagcccaaagctgttggccggccctgctacctgacgcgccagaagcacccagccctgcccagcaaccggccccagcagcaggtcctggtgctggcggagcccaggcgcaagccatctaccttctggcacagcatcagccggctggcacccttccgcaagtgaactggtccctgcctgacagcacctgctgggccttcctgccagtggcccccagtttttcttccccgaggcccactcggcctggccttcctctgcctgcaagtgagcagggatgggctggggagttgcttgtgccaccaagacgtgccaggtctgtactcctgttgtctttttccctgctcctggtgccctgaagagaccagcaagggggcagaccccgcactcgccacaccgccgctgcagcttgggccccatccgccctctggacctgtgtagggcctcactgctggagcggggaaaccgcagctcagcccaggcccagctggggagaaggcgctacctgcgtgggaccctcttctctggaaacctaatcctcctttcatttcctctgggcaggactctctggccttctgtggcctgcaatgccaggccatgtgcccctctgccctctagttctccaagtccccagcccggccagtggtgccaggcagcttgccacttgggagggcagaagccaggaattccacacccttgtgttgcgcccggagcccgcccttcgcctcccagcccctcaagacaccgctggctgctggacaccctcttcacttgtgtgtgtgtgtgtagcggaaaaggacaagacggtgcagtcggctgcatactcccagtcgggagtgtggtcagtctgcctgctgctgtgcggtagctccagaaccacctcgttcctggttttgtttggattttggcatcttgtttttctaacaacaaacaatggagaaaaagaattgattcttagtgacacagaagattgccttacgctcgtgagcgtgagaagccataagagagagaccgaattctgtggctcagcacacaggactgacccacagcccaggcagcgggtgtgtggagatggcgccctgtcctgccaaggggcgccaggagcagagccagggcctggcgagctggcgtggagcccacaggattcagcagcatggacagtcactcttgcactattccttctccaagccagaaaccacatttaatttcataaataaatttatgaaaagtaacctggctgct

SEQ ID NO: 301566 - DNA, 2111 bp, Homo sapiens
gcaggaggcagccacgcctctgcatgcctccagtcagccagtttgagcattagcagtgtgctgggcactgctgcagccctggggcaacacacagaaaactagccctgtcctgatgagctccttgcaatgggggaagaggatgccaacaggatattaagctctgctctgtgcttgccatttatggagaagagaggggctgtgcatctgatagtgaggatgtggtcaaagggcacagccccagaggaaagcagctccacacgtgggggctgcaggggatcctcaccctttctctgtctccagcctgcagcagccttccatctctgttctgccccagggacttcaaggatgttgaagccgccttgcatgccatgaagaacgtggcccagctcatcaacgagcggaagcggagacttgagaacatcgacaagattgctcagtggcagagctccatagaggactgggagggagaagatctcttggtcaggagctcagaactcatctactcgggggagctgactcgagttacacagcctcaagccaaaagccagcagcgaatgttctttctctttgaccaccagctcatctactgtaagaagggccggctggacatggacggcctggaggtggtggacctggaggacgggaaggacagagacctccatgtgagcatcaagaacgccttccggctgcaccgtggcgccacaggggacagccacctgctgtgcaccaggaagcccgagcagaagcagcgctggctcaaggcctttgccagggagagggagcaggtgcagctggaccaggagacaggcttctccatcactgaactgcagaggaagcaggccatgctgaatgccagcaagcagcaggtcacagggaagcccaaagctgttggccggccctgctacctgacgcgccagaagcacccagccctgcccagcaaccggccccagcagcaggtcctggtgctggcggagcccaggcgcaagccatctaccttctggcacagcatcagccggctggcacccttccgcaagtgaactggtccctgcctgacagcacctgctgggccttcctgccagtggcccccagtttttcttccccgaggcccactcggcctggccttcctctgcctgcaagtgagcagggatgggctggggagttgcttgtgccaccaagacgtgccaggtctgtactcctgttgtctttttccctgctcctggtgccctgaagagaccagcaagggggcagaccccgcactcgccacaccgccgctgcagcttgggccccatccgccctctggacctgtgtagggcctcactgctggagcggggaaaccgcagctcagcccaggcccagctggggagaaggcgctacctgcgtgggaccctcttctctggaaacctaatcctcctttcatttcctctgggcaggactctctggccttctgtggcctgcaatgccaggccatgtgcccctctgccctctagttctccaagtccccagcccggccagtggtgccaggcagcttgccacttgggagggcagaagccaggaattccacacccttgtgttgcgcccggagcccgcccttcgcctcccagcccctcaagacaccgctggctgctggacaccctcttcacttgtgtgtgtgtgtgtagcggaaaaggacaagacggtgcagtcggctgcatactcccagtcgggagtgtggtcagtctgcctgctgctgtgcggtagctccagaaccacctcgttcctggttttgtttggattttggcatcttgtttttctaacaacaaacaatggagaaaaagaattgattcttagtgacacagaagattgccttacgctcgtgagcgtgagaagccataagagagagaccgaattctgtggctcagcacacaggactgacccacagcccaggcagcgggtgtgtggagatggcgccctgtcctgccaaggggcgccaggagcagagccagggcctggcgagctggcgtggagcccacaggattcagcagcatggacagtcactcttgcactattccttctccaagccagaaaccacatttaatttcataaataaatttatgaaaagtaacctggctgct

SEQ ID NO: 301567 - DNA, 726 bp, Homo sapiens
ggcttcgcgggaggagccccaggcccgcgagcgcaggcgccccgcctctccccgggcgctgcgggccaccggctcggccctgtgcggcgggatctcggggccgcacggagcgggaggccgggcgccatggcgagggccccgcagccccggcgcggccccgcggcgcccgggaacgccctgcgcgccctgctgcgctgcaacctgccccccggcgcccagcgcgtggtggtctccgccgtgctggcgctcctggttctcatcaacgtcgtactgatcttcctgctggccttccgctgagcggccgcgcagggcgccgcgccggggtgagtggcgcgggcgacggcactccagccgttgccacccgcggcctccgcactggtcgcggagggaaggcctccttccaccccatgtgctcactaccagggcctggtccgggggtgtcgccgagcgggtgcctgaggggcgtggtggcacgtgtgtcacagggtccttctgtcctctgtgccctgtggggagtgggggctgcgggggcgaggggggaggccaaaatggcgcgtctctgcgagtaaccgaggatgcggattcagctggggctccccggctgcttgtctggaaacggagtgcatgtgaccgctgggtgagcgacccgcgcttgcatctgtgtaggttgagtcaggtgtgtggaagaccccgggcaccgctgcgcatgttacctgcagttgtttt

SEQ ID NO: 301568 - DNA, 2903 bp, Homo sapiens
ggcttcgcgggaggagccccaggcccgcgagcgcaggcgccccgcctctccccgggcgctgcgggccaccggctcggccctgtgcggcgggatctcggggccgcacggagcgggaggccgggcgccatggcgagggccccgcagccccggcgcggccccgcggcgcccgggaacgccctgcgcgccctgctgcgctgcaacctgccccccggcgcccagcgcgtggtggtctccgccgtgctggcgctcctggttctcatcaacgtcgtactgatcttcctgctggccttccgctgagcggccgcgcagggcgccgcgccgggctcatcagcgatggcagtgtggtctgcgctgaagcactctgggaccatgtcaccatggacgaccaggagctgggcttcaaagctggggacgtcatcgaagtgatggatgccaccaacagagagtggtggtggggccgggtcgccgatggcgagggctggtttccagccagcttcgttcggctgagggtgaatcaggacgagcccgcggatgacgacgcccctctggccgggaacagcggagcggaggacggcggggcggaggcgcagagcagcaaggaccagatgcggaccaacgtcatcaacgagatcctcagcactgagcgggactacatcaagcacctgcgcgacatctgcgagggctacgtccggcagtgccgcaagcgcgcagacatgttcagcgaggagcagctgcgtaccatcttcgggaacatcgaggacatctaccgctgccagaaggccttcgtgaaggccctggagcagaggttcaaccgcgagcgcccacacctgagcgagctgggtgcctgcttcctggagcatcaagccgacttccagatctactcggagtactgcaataaccaccccaacgcctgcgtggagctctcccggctcaccaagctcagcaagtacgtgtacttcttcgaggcctgccggctgctgcagaagatgattgacatctccctggatggcttcctgctgactccggtgcagaagatctgcaagtaccctctgcagctggccgagctgctcaaatacacgcacccccagcacagggacttcaaggatgttgaagccgccttgcatgccatgaagaacgtggcccagctcatcaacgagcggaagcggagacttgagaacatcgacaagattgctcagtggcagagctccatagaggactgggagggagaagatctcttggtcaggagctcagaactcatctactcgggggagctgactcgagttacacagcctcaagccaaaagccagcagcgaatgttctttctctttgaccaccagctcatctactgtaagaaggacctgctccgccgcgacgtgttgtactacaagggccggctggacatggacggcctggaggtggtggacctggaggacgggaaggacagagacctccatgtgagcatcaagaacgccttccggctgcaccgtggcgccacaggggacagccacctgctgtgcaccaggaagcccgagcagaagcagcgctggctcaaggcctttgccagggagagggagcaggtgcagctggaccaggagacaggcttctccatcactgaactgcagaggaagcaggccatgctgaatgccagcaagcagcaggtcacagggaagcccaaagctgttggccggccctgctacctgacgcgccagaagcacccagccctgcccagcaaccggccccagcagcaggtcctggtgctggcggagcccaggcgcaagccatctaccttctggcacagcatcagccggctggcacccttccgcaagtgaactggtccctgcctgacagcacctgctgggccttcctgccagtggcccccagtttttcttccccgaggcccactcggcctggccttcctctgcctgcaagtgagcagggatgggctggggagttgcttgtgccaccaagacgtgccaggtctgtactcctgttgtctttttccctgctcctggtgccctgaagagaccagcaagggggcagaccccgcactcgccacaccgccgctgcagcttgggccccatccgccctctggacctgtgtagggcctcactgctggagcggggaaaccgcagctcagcccaggcccagctggggagaaggcgctacctgcgtgggaccctcttctctggaaacctaatcctcctttcatttcctctgggcaggactctctggccttctgtggcctgcaatgccaggccatgtgcccctctgccctctagttctccaagtccccagcccggccagtggtgccaggcagcttgccacttgggagggcagaagccaggaattccacacccttgtgttgcgcccggagcccgcccttcgcctcccagcccctcaagacaccgctggctgctggacaccctcttcacttgtgtgtgtgtgtgtagcggaaaaggacaagacggtgcagtcggctgcatactcccagtcgggagtgtggtcagtctgcctgctgctgtgcggtagctccagaaccacctcgttcctggttttgtttggattttggcatcttgtttttctaacaacaaacaatggagaaaaagaattgattcttagtgacacagaagattgccttacgctcgtgagcgtgagaagccataagagagagaccgaattctgtggctcagcacacaggactgacccacagcccaggcagcgggtgtgtggagatggcgccctgtcctgccaaggggcgccaggagcagagccagggcctggcgagctggcgtggagcccacaggattcagcagcatggacagtcactcttgcactattccttctccaagccagaaaccacatttaatttcataaataaatttatgaaaagtaacctggctgct

SEQ ID NO: 301569 - DNA, 3250 bp, Homo sapiens
ccgcctgcccgtggctctctcggcagctcatcagcgatggcagtgtggtctgcgctgaagcactctgggaccatgtcaccatggacgaccaggagctgggcttcaaagctggggacgtcatcgaagtgatggatgccaccaacagagagtggtggtggggccgggtcgccgatggcgagggctggtttccagccagcttcgttcggccccgggagtgggaaccatgacttacacctgaagaagttgaggcacggtcaagttattagccctggagatagcagagaggggacctggattccatctaagggggtctccagtcttcaaggaaggaatccaggtgcagtctccaaaaggcctggctcagggcgtccaagctgagggccgtccggcggggaggtcccaggccctggtgttcagatgctcctcctgccccagatcccctgggaaactgtccactccgcaccctaagcctttccccaagttgcatgttagccagcgggcgcgccacccatccccctgcttctgcccgctggggctggcaggagcaggcactggttcaggaactgcagcaagcgctccagcctctgtgccgggcacaagcagggtctaggaaggaggccaaatcggtattcggatcacactgacggcggctgcgggcgtcggagtcgtcattcctcggtccaggacttgcgtgggtggcgtggtggggggagctggccggccagtcctcagccctgcgccccgtacaccctgcggggcctccgaggcccggttcccgccgctgcggcgcagggcgcggggcgttgctccgagggatgcggggcactgaccggccacgcatggcctgcagctgagggtgaatcaggacgagcccgcggatgacgacgcccctctggccgggaacagcggagcggaggacggcggggcggaggcgcagagcagcaaggaccagatgcggaccaacgtcatcaacgagatcctcagcactgagcgggactacatcaagcacctgcgcgacatctgcgagggctacgtccggcagtgccgcaagcgcgcagacatgttcagcgaggagcagctgcgtaccatcttcgggaacatcgaggacatctaccgctgccagaaggccttcgtgaaggccctggagcagaggttcaaccgcgagcgcccacacctgagcgagctgggtgcctgcttcctggagcatcaagccgacttccagatctactcggagtactgcaataaccaccccaacgcctgcgtggagctctcccggctcaccaagctcagcaagtacgtgtacttcttcgaggcctgccggctgctgcagaagatgattgacatctccctggatggcttcctgctgactccggtgcagaagatctgcaagtaccctctgcagctggccgagctgctcaaatacacgcacccccagcacagggacttcaaggatgttgaagccgccttgcatgccatgaagaacgtggcccagctcatcaacgagcggaagcggagacttgagaacatcgacaagattgctcagtggcagagctccatagaggactgggagggagaagatctcttggtcaggagctcagaactcatctactcgggggagctgactcgagttacacagcctcaagccaaaagccagcagcgaatgttctttctctttgaccaccagctcatctactgtaagaaggacctgctccgccgcgacgtgttgtactacaagggccggctggacatggacggcctggaggtggtggacctggaggacgggaaggacagagacctccatgtgagcatcaagaacgccttccggctgcaccgtggcgccacaggggacagccacctgctgtgcaccaggaagcccgagcagaagcagcgctggctcaaggcctttgccagggagagggagcaggtgcagctggaccaggagacaggcttctccatcactgaactgcagaggaagcaggccatgctgaatgccagcaagcagcaggtcacagggaagcccaaagctgttggccggccctgctacctgacgcgccagaagcacccagccctgcccagcaaccggccccagcagcaggtcctggtgctggcggagcccaggcgcaagccatctaccttctggcacagcatcagccggctggcacccttccgcaagtgaactggtccctgcctgacagcacctgctgggccttcctgccagtggcccccagtttttcttccccgaggcccactcggcctggccttcctctgcctgcaagtgagcagggatgggctggggagttgcttgtgccaccaagacgtgccaggtctgtactcctgttgtctttttccctgctcctggtgccctgaagagaccagcaagggggcagaccccgcactcgccacaccgccgctgcagcttgggccccatccgccctctggacctgtgtagggcctcactgctggagcggggaaaccgcagctcagcccaggcccagctggggagaaggcgctacctgcgtgggaccctcttctctggaaacctaatcctcctttcatttcctctgggcaggactctctggccttctgtggcctgcaatgccaggccatgtgcccctctgccctctagttctccaagtccccagcccggccagtggtgccaggcagcttgccacttgggagggcagaagccaggaattccacacccttgtgttgcgcccggagcccgcccttcgcctcccagcccctcaagacaccgctggctgctggacaccctcttcacttgtgtgtgtgtgtgtagcggaaaaggacaagacggtgcagtcggctgcatactcccagtcgggagtgtggtcagtctgcctgctgctgtgcggtagctccagaaccacctcgttcctggttttgtttggattttggcatcttgtttttctaacaacaaacaatggagaaaaagaattgattcttagtgacacagaagattgccttacgctcgtgagcgtgagaagccataagagagagaccgaattctgtggctcagcacacaggactgacccacagcccaggcagcgggtgtgtggagatggcgccctgtcctgccaaggggcgccaggagcagagccagggcctggcgagctggcgtggagcccacaggattcagcagcatggacagtcactcttgcactattccttctccaagccagaaaccacatttaatttcataaataaatttatgaaaagtaacctggctgct

SEQ ID NO: 301570 - DNA, 1443 bp, Homo sapiens
ggcttcgcgggaggagccccaggcccgcgagcgcaggcgccccgcctctccccgggcgctgcgggccaccggctcggccctgtgcggcgggatctcggggccgcacggagcgggaggccgggcgccatggcgagggccccgcagccccggcgcggccccgcggcgcccgggaacgccctgcgcgccctgctgcgctgcaacctgccccccggcgcccagcgcgtggtggtctccgccgtgctggcgctcctggttctcatcaacgtcgtactgatcttcctgctggccttccgctgagcggccgcgcagggcgccgcgccgggctcatcagcgatggcagtgtggtctgcgctgaagcactctgggaccatgtcaccatggacgaccaggagctgggcttcaaagctggggacgtcatcgaagtgatggatgccaccaacagagagtggtggtggggccgggtcgccgatggcgagggctggtttccagccagcttcgttcggctgagggtgaatcaggacgagcccgcggatgacgacgcccctctggccgggaacagcggagcggaggacggcggggcggaggcgcagagcagcaaggaccagatgcggaccaacgtcatcaacgagatcctcagcactgagcgggactacatcaagcacctgcgcgacatctgcgagggctacgtccggcagtgccgcaagcgcgcagacatgttcagcgaggagcagctgcgtaccatcttcgggaacatcgaggacatctaccgctgccagaaggccttcgtgaaggccctggagcagaggttcaaccgcgagcgcccacacctgagcgagctgggtgcctgcttcctggagcatcaagccgacttccagatctactcggagtactgcaataaccaccccaacgcctgcgtggagctctcccggctcaccaagctcagcaagtacgtgtacttcttcgaggcctgccggctgctgcagaagatgattgacatctccctggatggcttcctgctgactccggtgcagaagatctgcaagtaccctctgcagctggccgagctgctcaaatacacgcacccccagcacagggacttcaaggatgttgaagccgccttgcatgccatgaagaacgtggcccagctcatcaacgagcggaagcggagacttgagaacatcgacaagattgctcagtggcagagctccatagaggactgggagggagaagatctcttggtcaggagctcagaactcatctactcgggggagctgactcgagttacacagcctcaagccaaaagccagcagcgaatgttctttctctttgaccaccagctcatctactgtaagaaggtaccagagctgctctgccctgctgccccaagttgagcaagtggagggaggggagctgagggctgggagcagctgcccagaagacagg

SEQ ID NO: 301571 - DNA, 510 bp, Homo sapiens
cctggcctggcggcgacacctgggttccagcttccttacggaagagatgagctgcggctgctgttagggttagggccaggcctgttctcagtccgcgcacccgctccttgtccggagtagccgaagcctggggcttgcgggcccagcctgaggggagctgagggtgcccgcgggaaggcatctgggtcgcggcgaggaccctttcaggcgggcccaacactgccgggcgtttaatggggtttccccaattttctgctaggtagggccacccaggtttcaagtgagtagcaggctccgttccagaggtcttggaacaggtccaggttactcactcggatgtgcggcgtctggttggaaatggttgaatcccagaatggcagtgcaggatgggaagcacatttattgtgtgccatgtaccagttgctgtgccaagcgaattttctattacggaaaacaagccagctggcccgttttgcagaaaacttaagaaacaaagagagttgaagcgtc

SEQ ID NO: 301572 - DNA, 2850 bp, Homo sapiens
agcgggtcgccggaagtggggcgggactctattgtggcggtgaggaacaggaagccctgaagggtcaaaagaaatacaaaagcaaaggctattttctttttttttttctttctttcattccttccttcctctgtttctttctttcttcctttcatttttttttcttttttaagagcgagcggctctgcggtggcggtttggggtgggcgccgccgaggtgaggtcgtctcgcctcccgcgcgccggtagattggttgtttcattatggatggaggggatgatggtaaccttattatcaaaaagaggtttgtgtctgaggcagaactagatgaacggcgcaaaaggaggcaagaagaatgggagaaagttcgaaaacctgaagatccagaagaatgtccagaggaggtttatgaccctcgatctctatatgaaaggctacaggaacagaaggacaggaagcagcaggagtacgaggaacagttcaaattcaaaaacatggtaagaggcttagatgaagatgagaccaacttccttgatgaggtttctcgacagcaggaactaatagaaaagcaacgaagagaagaagaactgaaagaactgaaggaatacagaaataacctcaagaaggttggaatttctcaagagaacaagaaggaagtggaaaagaaactgactgtgaagcctatagaaaccaagaacaagttctcccaggcgaagctgttggcaggagctgtgaagcataagagctcagagagtggcaacagtgtgaaaagactgaaaccggaccctgagccagatgacaagaatcaagagccctcatcctgcaagtctctcggaaacacctccctgagtggcccctccatccactgcccctctgctgcagtatgtatcggcatcctcccaggcctgggtgcctactctgggagcagcgactccgagtccagctcagacagcgaaggcaccatcaatgccaccggaaagattgtctcctccatcttccgaaccaacaccttcctcgaggccccctagtttctccgtccctacacagggagctcctccccaagggtagatcggaccgttcatgctgcctataggcattatgtccctcaaaaaaaaactcctttgcctgcatcctgtgtacaacatgacatttttaaccaatccaatctaaaaatgtgccagaatccacctgtggcccgaatcgtgtttggttcctctttctactccactgcagatgaccaaacctgtcccgctgccactttcctcactgatattgggaggagggcaaggcccagccgaagttccactaaaaatgccccaggagaataggcaccggctggcttgccaaagggtttgggttttattgctttctgttttttcttttcccgacagcacaaagaagtaagggcagttattggacaggtgttatttaaacattctattgtaaatgaatgtgttgtttggttctactgcattgtggagcatgcgggggaagagaactgacccaggtaatgaaatggagcccttccctggaactaaccagtccttgatgttgtgtgactaagtaaagatgataaaccccatctgctgggggtgtcacttcacactcggcatgcattgtgaaagctttccatacccttggccattccctctctcctctctctccaaccccatttatgcaggaagggactgctaacaagaacgcttccatctcaaaccttttctctgcctgggaaattattttatgtttgtttttgaaataaaggatttagtttaagattctaaattttagagaaacaaacgtaggccttgtttactaatagccagacatcagaactgcaggtaggtatgttaatgagatgacttatttctggcagctcctggaatcctaatattgtaaatgagtgggacacacttgcatattgtgaccattctattgaggcccttctctgtttaatgcatattatacttgtgcttttaactgtggaatctatttctaacctaaaggtgctgccctagtacttttctttgctgcctctgctgctctttttcctttccaaacagcaactctgaggccatgagcagccaaaaactagaggtactgctccacctcgtctcataaagggaaacgggctcatcccttggattctggaggagggagagggagatggtgtggaggcctcgaggacagagatagacatgagctttgacaacaatctgtaggctctcctgctttagaataagcatgtaccattctttatccattccccttattcctacatcaattgtttttactttcttgggtgtgagactgagtgagacacacacaaaatgtgttgacactgtgatgccggcaggcagagcagctactgactttgaacatgggcagagaggcccctggatctcatccagcccactccttttccccttccagtacagtgacactctggtgcccattggcagatggcgacttccctgcacccataactgatgctttgtgaattcttcctccttttcagaactactctgtgctaattgttctgccagtatgggcgcatcagctccatcctgacaaacaagacatttaggtaaaactttgtaggcaccttctgcttctctgcttcattgttcctgtgatagtcctgttgttattacagcatgtacccaaaacagcctcacattgttacaggaggcaggccaggacatcaaagtcatcatctttatgtggcatgactcttaagaggccattactgtatctcatggcctcttgatgtggaaagaagttgacagagggttgcagggtttaaaaacatccattaacatgaaagctaataaacctgtcagagaaca

SEQ ID NO: 301573 - DNA, 2729 bp, Homo sapiens
agcgggtcgccggaagtggggcgggactctattgtggcggtgaggaacaggaagccctgaagggtcaaaagaaatacaaaagcaaaggctattttctttttttttttctttctttcattccttccttcctctgtttctttctttcttcctttcatttttttttcttttttaagagcgagcggctctgcggtggcggtttggggtgggcgccgccgaggtgaggtcgtctcgcctcccgcgcgccggtagattggttgtttcattatggatggaggggatgatggtaaccttattatcaaaaagaggtttgtgtctgaggcagaactagatgaacggcgcaaaaggaggcaagaagaatgggagaaagttcgaaaacctgaagatccagaagaatgtccagaggaggtttatgaccctcgatctctatatgaaaggctacaggaacagaaggacaggaagcagcaggagtacgaggaacagttcaaattcaaaaacatggtaagaggcttagatgaagatgagaccaacttccttgatgaggtttctcgacagcaggaactaatagaaaagcaacgaagagaagaagaactgaaagaactgaaggaatacagaaataacctcaagaaggttggaatttctcaagagaacaagaaggaagtggaaaagaaactgactgtgaagcctatagaaaccaagaacaagttctcccaggcgaagctgttggcaggagctgtgaagcataagagctcagagagtggcaacagtgtgaaaagactgaaaccggaccctgagccagatgacaagaatcaagagccctcatcctgcaagtctctcggaaacacctccctgagtggcccctccatccactgcccctctgctgcagtatgtatcggcatcctcccaggcctgggtgcctactctgggagcagcgactccgagtccagctcagacagcgaaggcaccatcaatgccaccggaaagattgtctcctccatcttccgaaccaacaccttcctcgaggccccctagtttctccgtccctacacagggagctcctccccaagggtagatcggaccgttcatgctgcctataggcattatgtccctcaaaaaaaaactcctttgcctgcatcctgtgtacaacatgacatttttaaccaatccaatctaaaaatgtgccagaatccacctgtggcccgaatcgtgtttggttcctctttctactccactgcagatgaccaaacctgtcccgctgccactttcctcactgatattgggaggagggcaaggcccagccgaagttccactaaaaatgccccaggagaataggcaccggctggcttgccaaagggtttgggttttattgctttctgttttttcttttcccgacagcacaaagaagtaagggcagttattggacaggtgttatttaaacattctattgtaaatgaatgtgttgtttggttctactgcattgtggagcatgcgggggaagagaactgacccaggtaatgaaatggagcccttccctggaactaaccagtccttgatgttgtgtgactaagtaaagatgataaaccccatctgctgggggtgtcacttcacactcggcatgcattgtgaaagctttccatacccttggccattccctctctcctctctctccaaccccatttatgcaggaagggactgctaacaagaacgcttccatctcaaaccttttctctgcctgggaaattattttatgtttgtttttgaaataaaggatttagtttaagattctaaattttagagaaacaaacgtaggccttgtttactaatagccagacatcagaactgcaggtaggtatgttaatgagatgacttatttctggcagctcctggaatcctaatattgtaaatgagtgggacacacttgcatattgtgaccattctattgaggcccttctctgtttaatgcatattatacttgtgcttttaactgtggaatctatttctaacctaaaggtgctgccctagtacttttctttgctgcctctgctgctctttttcctttccaaacagcaactctgaggccatgagcagccaaaaactagaggtactgctccacctcgtctcataaagggaaacgggctcatcccttggattctggaggagggagagggagatggtgtggaggcctcgaggacagagatagacatgagctttgacaacaatctgtaggctctcctgctttagaataagcatgtaccattctttatccattccccttattcctacatcaattgtttttactttcttgggtgtgagactgagtgagacactctggtgcccattggcagatggcgacttccctgcacccataactgatgctttgtgaattcttcctccttttcagaactactctgtgctaattgttctgccagtatgggcgcatcagctccatcctgacaaacaagacatttaggtaaaactttgtaggcaccttctgcttctctgcttcattgttcctgtgatagtcctgttgttattacagcatgtacccaaaacagcctcacattgttacaggaggcaggccaggacatcaaagtcatcatctttatgtggcatgactcttaagaggccattactgtatctcatggcctcttgatgtggaaagaagttgacagagggttgcagggtttaaaaacatccattaacatgaaagctaataaacctgtcagagaaca

SEQ ID NO: 301574 - DNA, 2126 bp, Homo sapiens
agcgggtcgccggaagtggggcgggactctattgtggcggtgaggaacaggaagccctgaagggtcaaaagaaatacaaaagcaaaggctattttctttttttttttctttctttcattccttccttcctctgtttctttctttcttcctttcatttttttttcttttttaagagcgagcggctctgcggtggcggtttggggtgggcgccgccgaggtgaggtcgtctcgcctcccgcgcgccggtagattggttgtttcattatggatggaggggatgatggtaaccttattatcaaaaagaggtttgtgtctgaggcagaactagatgaacggcgcaaaaggaggcaagaagaatgggagaaagttcgaaaacctgaagatccagaagaatgtccagaggaggtttatgaccctcgatctctatatgaaaggctacaggaacagaaggacaggaagcagcaggagtacgaggaacagttcaaattcaaaaacatggtaagaggcttagatgaagatgagaccaacttccttgatgaggtttctcgacagcaggaactaatagaaaagcaacgaagagaagaagaactgaaagaactgaaggaatacagaaataacctcaagaaggttggaatttctcaagagaacaagaaggaagtggaaaagaaactgactgtgaagcctatagaaaccaagaacaagttctcccaggcgaagctgttggcaggagctgtgaagcataagagctcagagagtggcaacagtgtgaaaagactgaaaccggaccctgagccagatgacaagaatcaagagccctcatcctgcaagtctctcggaaacacctccctgagtggcccctccatccactgcccctctgctgcagtatgtatcggcatcctcccaggcctgggtgcctactctgggagcagcgactccgagtccagctcagacagcgaaggcaccatcaatgccaccggaaagattgtctcctccatcttccgaaccaacaccttcctcgaggccccctagtttctccgtccctacacagggagctcctccccaagggtagatcggaccgttcatgctgcctataggcattatgtccctcaaaaaaaaactcctttgcctgcatcctgtgtacaacatgacatttttaaccaatccaatctaaaaatgtgccagaatccacctgtggcccgaatcgtgtttggttcctctttctactccactgcagatgaccaaacctgtcccgctgccactttcctcactgatattgggaggagggcaaggcccagccgaagttccactaaaaatgccccaggagaataggcaccggctggcttgccaaagggtttgggttttattgctttctgttttttcttttcccgacagcacaaagaagtaagggcagttattggacaggtgttatttaaacattctattgtaaatgaatgtgttgtttggttctactgcattgtggagcatgcgggggaagagaactgacccaggtaatgaaatggagcccttccctggaactaaccagtccttgatgttgtgtgactaagtaaagatgataaaccccatctgctgggggtgtcacttcacactcggcatgcatttgtgatgccggcaggcagagcagctactgactttgaacatgggcagagaggcccctggatctcatccagcccactccttttccccttccagtacagtgacactctggtgcccattggcagatggcgacttccctgcacccataactgatgctttgtgaattcttcctccttttcagaactactctgtgctaattgttctgccagtatgggcgcatcagctccatcctgacaaacaagacatttaggtaaaactttgtaggcaccttctgcttctctgcttcattgttcctgtgatagtcctgttgttattacagcatgtacccaaaacagcctcacattgttacaggaggcaggccaggacatcaaagtcatcatctttatgtggcatgactcttaagaggccattactgtatctcatggcctcttgatgtggaaagaagttgacagagggttgcagggtttaaaaacatccattaacatgaaagctaataaacctgtcagagaaca

SEQ ID NO: 301575 - DNA, 1784 bp, Homo sapiens
agcgggtcgccggaagtggggcgggactctattgtggcggtgaggaacaggaagccctgaagggtcaaaagaaatacaaaagcaaaggctattttctttttttttttctttctttcattccttccttcctctgtttctttctttcttcctttcatttttttttcttttttaagagcgagcggctctgcggtggcggtttggggtgggcgccgccgaggtgaggtcgtctcgcctcccgcgcgccggtagattggttgtttcattatggatggaggggatgatggtaaccttattatcaaaaagaggtttgtgtctgaggcagaactagatgaacggcgcaaaaggaggcaagaagaatgggagaaagttcgaaaacctgaagatccagaagaatgtccagaggaggtttatgaccctcgatctctatatgaaaggctacaggaacagaaggacaggaagcagcaggagtacgaggaacagttcaaattcaaaaacatggtaagaggcttagatgaagatgagaccaacttccttgatgaggtttctcgacagcaggaactaatagaaaagcaacgaagagaagaagaactgaaagaactgaaggaatacagaaataacctcaagaaggttggaatttctcaagagaacaagaaggaagtggaaaagaaactgactgtgaagcctatagaaaccaagaacaagttctcccaggcgaagctgttggcaggagctgtgaagcataagagctcagagagtggcaacagtgtgaaaagactgaaaccggaccctgagccagatgacaagaatcaagagccctcatcctgcaagtctctcggaaacacctccctgagtggcccctccatccactgcccctctgctgcagtatgtatcggcatcctcccaggcctgggtgcctactctgggagcagcgactccgagtccagctcagacagcgaaggcaccatcaatgccaccggaaagattgtctcctccatcttccgaaccaacaccttcctcgaggccccctagtttctccgtccctacacagggagctcctccccaagggtagatcggaccgttcatgctgcctataggcattatgtccctcaaaaaaaaactcctttgcctgcatcctgtgtacaacatgacatttttaaccaatccaatctaaaaatgtgccagaatccacctgtggcccgaatcgtgtttggttcctctttctactccactgcagatgaccaaacctgtcccgctgccactttcctcactgatattgggaggagggcaaggcccagccgaagttccactaaaaatgccccaggagaataggcaccggctggcttgccaaagggtttgggttttattgctttctgttttttcttttcccgacagcacaaagaagtaagggcagttattggacaggtgttatttaaacattctattgtaaatgaatgtgttgtttggttctactgcattgtggagcatgcgggggaagagaactgacccaggtaatgaaatggagcccttccctggaactaaccagtccttgatgttgtgtgactaagtaaagatgataaaccccatctgctgggggtgtcacttcacactcggcatgcattgtgaaagctttccatacccttggccattccctctctcctctctctccaaccccatttatgcaggaagggactgctaacaagaacgcttccatctcaaaccttttctctgcctgggaaattattttatgtttgtttttgaaataaaggatttagtttaagattcta

SEQ ID NO: 301576 - DNA, 2640 bp, Homo sapiens
agcgggtcgccggaagtggggcgggactctattgtggcgattggttgtttcattatggatggaggggatgatggtaaccttattatcaaaaagaggtttgtgtctgaggcagaactagatgaacggcgcaaaaggaggcaagaagaatgggagaaagttcgaaaacctgaagatccagaagaatgtccagaggaggtttatgaccctcgatctctatatgaaaggctacaggaacagaaggacaggaagcagcaggagtacgaggaacagttcaaattcaaaaacatggtaagaggcttagatgaagatgagaccaacttccttgatgaggtttctcgacagcaggaactaatagaaaagcaacgaagagaagaagaactgaaagaactgaaggaatacagaaataacctcaagaaggttggaatttctcaagagaacaagaaggaagtggaaaagaaactgactgtgaagcctatagaaaccaagaacaagttctcccaggcgaagctgttggcaggagctgtgaagcataagagctcagagagtggcaacagtgtgaaaagactgaaaccggaccctgagccagatgacaagaatcaagagccctcatcctgcaagtctctcggaaacacctccctgagtggcccctccatccactgcccctctgctgcagtatgtatcggcatcctcccaggcctgggtgcctactctgggagcagcgactccgagtccagctcagacagcgaaggcaccatcaatgccaccggaaagattgtctcctccatcttccgaaccaacaccttcctcgaggccccctagtttctccgtccctacacagggagctcctccccaagggtagatcggaccgttcatgctgcctataggcattatgtccctcaaaaaaaaactcctttgcctgcatcctgtgtacaacatgacatttttaaccaatccaatctaaaaatgtgccagaatccacctgtggcccgaatcgtgtttggttcctctttctactccactgcagatgaccaaacctgtcccgctgccactttcctcactgatattgggaggagggcaaggcccagccgaagttccactaaaaatgccccaggagaataggcaccggctggcttgccaaagggtttgggttttattgctttctgttttttcttttcccgacagcacaaagaagtaagggcagttattggacaggtgttatttaaacattctattgtaaatgaatgtgttgtttggttctactgcattgtggagcatgcgggggaagagaactgacccaggtaatgaaatggagcccttccctggaactaaccagtccttgatgttgtgtgactaagtaaagatgataaaccccatctgctgggggtgtcacttcacactcggcatgcattgtgaaagctttccatacccttggccattccctctctcctctctctccaaccccatttatgcaggaagggactgctaacaagaacgcttccatctcaaaccttttctctgcctgggaaattattttatgtttgtttttgaaataaaggatttagtttaagattctaaattttagagaaacaaacgtaggccttgtttactaatagccagacatcagaactgcaggtaggtatgttaatgagatgacttatttctggcagctcctggaatcctaatattgtaaatgagtgggacacacttgcatattgtgaccattctattgaggcccttctctgtttaatgcatattatacttgtgcttttaactgtggaatctatttctaacctaaaggtgctgccctagtacttttctttgctgcctctgctgctctttttcctttccaaacagcaactctgaggccatgagcagccaaaaactagaggtactgctccacctcgtctcataaagggaaacgggctcatcccttggattctggaggagggagagggagatggtgtggaggcctcgaggacagagatagacatgagctttgacaacaatctgtaggctctcctgctttagaataagcatgtaccattctttatccattccccttattcctacatcaattgtttttactttcttgggtgtgagactgagtgagacacacacaaaatgtgttgacactgtgatgccggcaggcagagcagctactgactttgaacatgggcagagaggcccctggatctcatccagcccactccttttccccttccagtacagtgacactctggtgcccattggcagatggcgacttccctgcacccataactgatgctttgtgaattcttcctccttttcagaactactctgtgctaattgttctgccagtatgggcgcatcagctccatcctgacaaacaagacatttaggtaaaactttgtaggcaccttctgcttctctgcttcattgttcctgtgatagtcctgttgttattacagcatgtacccaaaacagcctcacattgttacaggaggcaggccaggacatcaaagtcatcatctttatgtggcatgactcttaagaggccattactgtatctcatggcctcttgatgtggaaagaagttgacagagggttgcagggtttaaaaacatccattaacatgaaagctaataaacctgtcagagaaca

SEQ ID NO: 301577 - DNA, 3484 bp, Homo sapiens
aatataagactttgtttttcttgacggtcaggcagatttgaaaaccacgttctttatttgtgccaatttggactctaagtttggtggacaaagtgaattttgaaatggttttagttttccatgaattccctatttgaagaaattgaataaatcctttaaaaaataatgtaatgtttagtttgataattaaacttgagtcgctttggaaaacgtgagtaaaggaaagctgacagcatttgtttactctttctaaagtggaacacagtaaggacaaagtaagcattcctaatgtaagtcctctgcattcctacagggctcttcacagttagagcccgtatccctgatatccctgggctgtttgtcttttgatttgtttttaattaccctagcaaacaaaagggaaaaagaagagacttgtgaaaatttacctagacaataggaattagaagtcaacacaatctaattttctagcttctttgtctacttccagcaggtcagtaagttacaggtacttatcacctctttcttgcagaataaacagccattggactcttcaaacaaaaacgctgtctccatcaagtactgctttcgcaggataagtgaccatttttaatcagttgaaattaacggaaagtagcagttatttttgaaagatgacatcaattatataatatagtaaagagatttaatttttagtcctttgtttcttactgcacaaattgtatggcgtttgaatagaattcccatgatactgacacttcagcaaatacttgcttgatggctaccaatctctataacttacattgcacagtacctaggaatattcatgtgagttcattcctccctgctcagattcttcagctcctcgtggttggtttattcaattggttgtttcattatggatggaggggatgatggtaaccttattatcaaaaagaggtttgtgtctgaggcagaactagatgaacggcgcaaaaggaggcaagaagaatgggagaaagttcgaaaacctgaagatccagaagaatgtccagaggaggtttatgaccctcgatctctatatgaaaggctacaggaacagaaggacaggaagcagcaggagtacgaggaacagttcaaattcaaaaacatggtaagaggcttagatgaagatgagaccaacttccttgatgaggtttctcgacagcaggaactaatagaaaagcaacgaagagaagaagaactgaaagaactgaaggaatacagaaataacctcaagaaggttggaatttctcaagagaacaagaaggaagtggaaaagaaactgactgtgaagcctatagaaaccaagaacaagttctcccaggcgaagctgttggcaggagctgtgaagcataagagctcagagagtggcaacagtgtgaaaagactgaaaccggaccctgagccagatgacaagaatcaagagccctcatcctgcaagtctctcggaaacacctccctgagtggcccctccatccactgcccctctgctgcagtatgtatcggcatcctcccaggcctgggtgcctactctgggagcagcgactccgagtccagctcagacagcgaaggcaccatcaatgccaccggaaagattgtctcctccatcttccgaaccaacaccttcctcgaggccccctagtttctccgtccctacacagggagctcctccccaagggtagatcggaccgttcatgctgcctataggcattatgtccctcaaaaaaaaactcctttgcctgcatcctgtgtacaacatgacatttttaaccaatccaatctaaaaatgtgccagaatccacctgtggcccgaatcgtgtttggttcctctttctactccactgcagatgaccaaacctgtcccgctgccactttcctcactgatattgggaggagggcaaggcccagccgaagttccactaaaaatgccccaggagaataggcaccggctggcttgccaaagggtttgggttttattgctttctgttttttcttttcccgacagcacaaagaagtaagggcagttattggacaggtgttatttaaacattctattgtaaatgaatgtgttgtttggttctactgcattgtggagcatgcgggggaagagaactgacccaggtaatgaaatggagcccttccctggaactaaccagtccttgatgttgtgtgactaagtaaagatgataaaccccatctgctgggggtgtcacttcacactcggcatgcattgtgaaagctttccatacccttggccattccctctctcctctctctccaaccccatttatgcaggaagggactgctaacaagaacgcttccatctcaaaccttttctctgcctgggaaattattttatgtttgtttttgaaataaaggatttagtttaagattctaaattttagagaaacaaacgtaggccttgtttactaatagccagacatcagaactgcaggtaggtatgttaatgagatgacttatttctggcagctcctggaatcctaatattgtaaatgagtgggacacacttgcatattgtgaccattctattgaggcccttctctgtttaatgcatattatacttgtgcttttaactgtggaatctatttctaacctaaaggtgctgccctagtacttttctttgctgcctctgctgctctttttcctttccaaacagcaactctgaggccatgagcagccaaaaactagaggtactgctccacctcgtctcataaagggaaacgggctcatcccttggattctggaggagggagagggagatggtgtggaggcctcgaggacagagatagacatgagctttgacaacaatctgtaggctctcctgctttagaataagcatgtaccattctttatccattccccttattcctacatcaattgtttttactttcttgggtgtgagactgagtgagacacacacaaaatgtgttgacactgtgatgccggcaggcagagcagctactgactttgaacatgggcagagaggcccctggatctcatccagcccactccttttccccttccagtacagtgacactctggtgcccattggcagatggcgacttccctgcacccataactgatgctttgtgaattcttcctccttttcagaactactctgtgctaattgttctgccagtatgggcgcatcagctccatcctgacaaacaagacatttaggtaaaactttgtaggcaccttctgcttctctgcttcattgttcctgtgatagtcctgttgttattacagcatgtacccaaaacagcctcacattgttacaggaggcaggccaggacatcaaagtcatcatctttatgtggcatgactcttaagaggccattactgtatctcatggcctcttgatgtggaaagaagttgacagagggttgcagggtttaaaaacatccattaacatgaaagctaataaacctgtcagagaaca

SEQ ID NO: 301578 - DNA, 2978 bp, Homo sapiens
cctggcctggcggcgacacctgggttccagcttccttacggaagagatgagctgcggctgctgttagggttagggccaggcctgttctcagtccgcgcacccgctccttgtccggagtagccgaagcctggggcttgcgggcccagcctgaggggagctgagggtgcccgcgggaaggcatctgggtcgcggcgaggaccctttcaggcgggcccaacactgccgggcgtttaatggggtttccccaattttctgctagaatcttgccctgtcgctcaagctggggtgcagcggtgtgatcttggctcactgcaacctccgcctcccaggttcaagcgattctcctgcctcagcctcctgagtagctgggattacagattggttgtttcattatggatggaggggatgatggtaaccttattatcaaaaagaggtttgtgtctgaggcagaactagatgaacggcgcaaaaggaggcaagaagaatgggagaaagttcgaaaacctgaagatccagaagaatgtccagaggaggtttatgaccctcgatctctatatgaaaggctacaggaacagaaggacaggaagcagcaggagtacgaggaacagttcaaattcaaaaacatggtaagaggcttagatgaagatgagaccaacttccttgatgaggtttctcgacagcaggaactaatagaaaagcaacgaagagaagaagaactgaaagaactgaaggaatacagaaataacctcaagaaggttggaatttctcaagagaacaagaaggaagtggaaaagaaactgactgtgaagcctatagaaaccaagaacaagttctcccaggcgaagctgttggcaggagctgtgaagcataagagctcagagagtggcaacagtgtgaaaagactgaaaccggaccctgagccagatgacaagaatcaagagccctcatcctgcaagtctctcggaaacacctccctgagtggcccctccatccactgcccctctgctgcagtatgtatcggcatcctcccaggcctgggtgcctactctgggagcagcgactccgagtccagctcagacagcgaaggcaccatcaatgccaccggaaagattgtctcctccatcttccgaaccaacaccttcctcgaggccccctagtttctccgtccctacacagggagctcctccccaagggtagatcggaccgttcatgctgcctataggcattatgtccctcaaaaaaaaactcctttgcctgcatcctgtgtacaacatgacatttttaaccaatccaatctaaaaatgtgccagaatccacctgtggcccgaatcgtgtttggttcctctttctactccactgcagatgaccaaacctgtcccgctgccactttcctcactgatattgggaggagggcaaggcccagccgaagttccactaaaaatgccccaggagaataggcaccggctggcttgccaaagggtttgggttttattgctttctgttttttcttttcccgacagcacaaagaagtaagggcagttattggacaggtgttatttaaacattctattgtaaatgaatgtgttgtttggttctactgcattgtggagcatgcgggggaagagaactgacccaggtaatgaaatggagcccttccctggaactaaccagtccttgatgttgtgtgactaagtaaagatgataaaccccatctgctgggggtgtcacttcacactcggcatgcattgtgaaagctttccatacccttggccattccctctctcctctctctccaaccccatttatgcaggaagggactgctaacaagaacgcttccatctcaaaccttttctctgcctgggaaattattttatgtttgtttttgaaataaaggatttagtttaagattctaaattttagagaaacaaacgtaggccttgtttactaatagccagacatcagaactgcaggtaggtatgttaatgagatgacttatttctggcagctcctggaatcctaatattgtaaatgagtgggacacacttgcatattgtgaccattctattgaggcccttctctgtttaatgcatattatacttgtgcttttaactgtggaatctatttctaacctaaaggtgctgccctagtacttttctttgctgcctctgctgctctttttcctttccaaacagcaactctgaggccatgagcagccaaaaactagaggtactgctccacctcgtctcataaagggaaacgggctcatcccttggattctggaggagggagagggagatggtgtggaggcctcgaggacagagatagacatgagctttgacaacaatctgtaggctctcctgctttagaataagcatgtaccattctttatccattccccttattcctacatcaattgtttttactttcttgggtgtgagactgagtgagacacacacaaaatgtgttgacactgtgatgccggcaggcagagcagctactgactttgaacatgggcagagaggcccctggatctcatccagcccactccttttccccttccagtacagtgacactctggtgcccattggcagatggcgacttccctgcacccataactgatgctttgtgaattcttcctccttttcagaactactctgtgctaattgttctgccagtatgggcgcatcagctccatcctgacaaacaagacatttaggtaaaactttgtaggcaccttctgcttctctgcttcattgttcctgtgatagtcctgttgttattacagcatgtacccaaaacagcctcacattgttacaggaggcaggccaggacatcaaagtcatcatctttatgtggcatgactcttaagaggccattactgtatctcatggcctcttgatgtggaaagaagttgacagagggttgcagggtttaaaaacatccattaacatgaaagctaataaacctgtcagagaaca

SEQ ID NO: 301579 - DNA, 2968 bp, Homo sapiens
agcgggtcgccggaagtggggcgggactctattgtggcggtgaggaacaggaagccctgaagggtcaaaagaaatacaaaagcaaaggctattttctttttttttttctttctttcattccttccttcctctgtttctttctttcttcctttcatttttttttcttttttaagagcgagcggctctgcggtggcggtttggggtgggcgccgccgaggtgaggtcgtctcgcctcccgcgcgccggtagaatcttgccctgtcgctcaagctggggtgcagcggtgtgatcttggctcactgcaacctccgcctcccaggttcaagcgattctcctgcctcagcctcctgagtagctgggattacagattggttgtttcattatggatggaggggatgatggtaaccttattatcaaaaagaggtttgtgtctgaggcagaactagatgaacggcgcaaaaggaggcaagaagaatgggagaaagttcgaaaacctgaagatccagaagaatgtccagaggaggtttatgaccctcgatctctatatgaaaggctacaggaacagaaggacaggaagcagcaggagtacgaggaacagttcaaattcaaaaacatggtaagaggcttagatgaagatgagaccaacttccttgatgaggtttctcgacagcaggaactaatagaaaagcaacgaagagaagaagaactgaaagaactgaaggaatacagaaataacctcaagaaggttggaatttctcaagagaacaagaaggaagtggaaaagaaactgactgtgaagcctatagaaaccaagaacaagttctcccaggcgaagctgttggcaggagctgtgaagcataagagctcagagagtggcaacagtgtgaaaagactgaaaccggaccctgagccagatgacaagaatcaagagccctcatcctgcaagtctctcggaaacacctccctgagtggcccctccatccactgcccctctgctgcagtatgtatcggcatcctcccaggcctgggtgcctactctgggagcagcgactccgagtccagctcagacagcgaaggcaccatcaatgccaccggaaagattgtctcctccatcttccgaaccaacaccttcctcgaggccccctagtttctccgtccctacacagggagctcctccccaagggtagatcggaccgttcatgctgcctataggcattatgtccctcaaaaaaaaactcctttgcctgcatcctgtgtacaacatgacatttttaaccaatccaatctaaaaatgtgccagaatccacctgtggcccgaatcgtgtttggttcctctttctactccactgcagatgaccaaacctgtcccgctgccactttcctcactgatattgggaggagggcaaggcccagccgaagttccactaaaaatgccccaggagaataggcaccggctggcttgccaaagggtttgggttttattgctttctgttttttcttttcccgacagcacaaagaagtaagggcagttattggacaggtgttatttaaacattctattgtaaatgaatgtgttgtttggttctactgcattgtggagcatgcgggggaagagaactgacccaggtaatgaaatggagcccttccctggaactaaccagtccttgatgttgtgtgactaagtaaagatgataaaccccatctgctgggggtgtcacttcacactcggcatgcattgtgaaagctttccatacccttggccattccctctctcctctctctccaaccccatttatgcaggaagggactgctaacaagaacgcttccatctcaaaccttttctctgcctgggaaattattttatgtttgtttttgaaataaaggatttagtttaagattctaaattttagagaaacaaacgtaggccttgtttactaatagccagacatcagaactgcaggtaggtatgttaatgagatgacttatttctggcagctcctggaatcctaatattgtaaatgagtgggacacacttgcatattgtgaccattctattgaggcccttctctgtttaatgcatattatacttgtgcttttaactgtggaatctatttctaacctaaaggtgctgccctagtacttttctttgctgcctctgctgctctttttcctttccaaacagcaactctgaggccatgagcagccaaaaactagaggtactgctccacctcgtctcataaagggaaacgggctcatcccttggattctggaggagggagagggagatggtgtggaggcctcgaggacagagatagacatgagctttgacaacaatctgtaggctctcctgctttagaataagcatgtaccattctttatccattccccttattcctacatcaattgtttttactttcttgggtgtgagactgagtgagacacacacaaaatgtgttgacactgtgatgccggcaggcagagcagctactgactttgaacatgggcagagaggcccctggatctcatccagcccactccttttccccttccagtacagtgacactctggtgcccattggcagatggcgacttccctgcacccataactgatgctttgtgaattcttcctccttttcagaactactctgtgctaattgttctgccagtatgggcgcatcagctccatcctgacaaacaagacatttaggtaaaactttgtaggcaccttctgcttctctgcttcattgttcctgtgatagtcctgttgttattacagcatgtacccaaaacagcctcacattgttacaggaggcaggccaggacatcaaagtcatcatctttatgtggcatgactcttaagaggccattactgtatctcatggcctcttgatgtggaaagaagttgacagagggttgcagggtttaaaaacatccattaacatgaaagctaataaacctgtcagagaaca

SEQ ID NO: 301580 - DNA, 2881 bp, Homo sapiens
agcgggtcgccggaagtggggcgggactctattgtggcggtgaggaacaggaagccctgaagggtcaaaagaaatacaaaagcaaaggctattttctttttttttttctttctttcattccttccttcctctgtttctttctttcttcctttcatttttttttcttttttaagagcgagcggctctgcggtggcggtttggggtgggcgccgccgaggtgaggtcgtctcgcctcccgcgcgccggtagattcttcagctcctcgtggttggtttattcaattggttgtttcattatggatggaggggatgatggtaaccttattatcaaaaagaggtttgtgtctgaggcagaactagatgaacggcgcaaaaggaggcaagaagaatgggagaaagttcgaaaacctgaagatccagaagaatgtccagaggaggtttatgaccctcgatctctatatgaaaggctacaggaacagaaggacaggaagcagcaggagtacgaggaacagttcaaattcaaaaacatggtaagaggcttagatgaagatgagaccaacttccttgatgaggtttctcgacagcaggaactaatagaaaagcaacgaagagaagaagaactgaaagaactgaaggaatacagaaataacctcaagaaggttggaatttctcaagagaacaagaaggaagtggaaaagaaactgactgtgaagcctatagaaaccaagaacaagttctcccaggcgaagctgttggcaggagctgtgaagcataagagctcagagagtggcaacagtgtgaaaagactgaaaccggaccctgagccagatgacaagaatcaagagccctcatcctgcaagtctctcggaaacacctccctgagtggcccctccatccactgcccctctgctgcagtatgtatcggcatcctcccaggcctgggtgcctactctgggagcagcgactccgagtccagctcagacagcgaaggcaccatcaatgccaccggaaagattgtctcctccatcttccgaaccaacaccttcctcgaggccccctagtttctccgtccctacacagggagctcctccccaagggtagatcggaccgttcatgctgcctataggcattatgtccctcaaaaaaaaactcctttgcctgcatcctgtgtacaacatgacatttttaaccaatccaatctaaaaatgtgccagaatccacctgtggcccgaatcgtgtttggttcctctttctactccactgcagatgaccaaacctgtcccgctgccactttcctcactgatattgggaggagggcaaggcccagccgaagttccactaaaaatgccccaggagaataggcaccggctggcttgccaaagggtttgggttttattgctttctgttttttcttttcccgacagcacaaagaagtaagggcagttattggacaggtgttatttaaacattctattgtaaatgaatgtgttgtttggttctactgcattgtggagcatgcgggggaagagaactgacccaggtaatgaaatggagcccttccctggaactaaccagtccttgatgttgtgtgactaagtaaagatgataaaccccatctgctgggggtgtcacttcacactcggcatgcattgtgaaagctttccatacccttggccattccctctctcctctctctccaaccccatttatgcaggaagggactgctaacaagaacgcttccatctcaaaccttttctctgcctgggaaattattttatgtttgtttttgaaataaaggatttagtttaagattctaaattttagagaaacaaacgtaggccttgtttactaatagccagacatcagaactgcaggtaggtatgttaatgagatgacttatttctggcagctcctggaatcctaatattgtaaatgagtgggacacacttgcatattgtgaccattctattgaggcccttctctgtttaatgcatattatacttgtgcttttaactgtggaatctatttctaacctaaaggtgctgccctagtacttttctttgctgcctctgctgctctttttcctttccaaacagcaactctgaggccatgagcagccaaaaactagaggtactgctccacctcgtctcataaagggaaacgggctcatcccttggattctggaggagggagagggagatggtgtggaggcctcgaggacagagatagacatgagctttgacaacaatctgtaggctctcctgctttagaataagcatgtaccattctttatccattccccttattcctacatcaattgtttttactttcttgggtgtgagactgagtgagacacacacaaaatgtgttgacactgtgatgccggcaggcagagcagctactgactttgaacatgggcagagaggcccctggatctcatccagcccactccttttccccttccagtacagtgacactctggtgcccattggcagatggcgacttccctgcacccataactgatgctttgtgaattcttcctccttttcagaactactctgtgctaattgttctgccagtatgggcgcatcagctccatcctgacaaacaagacatttaggtaaaactttgtaggcaccttctgcttctctgcttcattgttcctgtgatagtcctgttgttattacagcatgtacccaaaacagcctcacattgttacaggaggcaggccaggacatcaaagtcatcatctttatgtggcatgactcttaagaggccattactgtatctcatggcctcttgatgtggaaagaagttgacagagggttgcagggtttaaaaacatccattaacatgaaagctaataaacctgtcagagaaca

SEQ ID NO: 301581 - DNA, 2991 bp, Homo sapiens
agcgggtcgccggaagtggggcgggactctattgtggcgaataaacagccattggactcttcaaacaaaaacgctgtctccatcaagtactgctttcgcaggataagtgaccatttttaatcagttgaaattaacggaaagtagcagttatttttgaaagatgacatcaattatataatatagtaaagagatttaatttttagtcctttgtttcttactgcacaaattgtatggcgtttgaatagaattcccatgatactgacacttcagcaaatacttgcttgatggctaccaatctctataacttacattgcacagtacctaggaatattcatgtgagttcattcctccctgctcagattcttcagctcctcgtggttggtttattcaattggttgtttcattatggatggaggggatgatggtaaccttattatcaaaaagaggtttgtgtctgaggcagaactagatgaacggcgcaaaaggaggcaagaagaatgggagaaagttcgaaaacctgaagatccagaagaatgtccagaggaggtttatgaccctcgatctctatatgaaaggctacaggaacagaaggacaggaagcagcaggagtacgaggaacagttcaaattcaaaaacatggtaagaggcttagatgaagatgagaccaacttccttgatgaggtttctcgacagcaggaactaatagaaaagcaacgaagagaagaagaactgaaagaactgaaggaatacagaaataacctcaagaaggttggaatttctcaagagaacaagaaggaagtggaaaagaaactgactgtgaagcctatagaaaccaagaacaagttctcccaggcgaagctgttggcaggagctgtgaagcataagagctcagagagtggcaacagtgtgaaaagactgaaaccggaccctgagccagatgacaagaatcaagagccctcatcctgcaagtctctcggaaacacctccctgagtggcccctccatccactgcccctctgctgcagtatgtatcggcatcctcccaggcctgggtgcctactctgggagcagcgactccgagtccagctcagacagcgaaggcaccatcaatgccaccggaaagattgtctcctccatcttccgaaccaacaccttcctcgaggccccctagtttctccgtccctacacagggagctcctccccaagggtagatcggaccgttcatgctgcctataggcattatgtccctcaaaaaaaaactcctttgcctgcatcctgtgtacaacatgacatttttaaccaatccaatctaaaaatgtgccagaatccacctgtggcccgaatcgtgtttggttcctctttctactccactgcagatgaccaaacctgtcccgctgccactttcctcactgatattgggaggagggcaaggcccagccgaagttccactaaaaatgccccaggagaataggcaccggctggcttgccaaagggtttgggttttattgctttctgttttttcttttcccgacagcacaaagaagtaagggcagttattggacaggtgttatttaaacattctattgtaaatgaatgtgttgtttggttctactgcattgtggagcatgcgggggaagagaactgacccaggtaatgaaatggagcccttccctggaactaaccagtccttgatgttgtgtgactaagtaaagatgataaaccccatctgctgggggtgtcacttcacactcggcatgcattgtgaaagctttccatacccttggccattccctctctcctctctctccaaccccatttatgcaggaagggactgctaacaagaacgcttccatctcaaaccttttctctgcctgggaaattattttatgtttgtttttgaaataaaggatttagtttaagattctaaattttagagaaacaaacgtaggccttgtttactaatagccagacatcagaactgcaggtaggtatgttaatgagatgacttatttctggcagctcctggaatcctaatattgtaaatgagtgggacacacttgcatattgtgaccattctattgaggcccttctctgtttaatgcatattatacttgtgcttttaactgtggaatctatttctaacctaaaggtgctgccctagtacttttctttgctgcctctgctgctctttttcctttccaaacagcaactctgaggccatgagcagccaaaaactagaggtactgctccacctcgtctcataaagggaaacgggctcatcccttggattctggaggagggagagggagatggtgtggaggcctcgaggacagagatagacatgagctttgacaacaatctgtaggctctcctgctttagaataagcatgtaccattctttatccattccccttattcctacatcaattgtttttactttcttgggtgtgagactgagtgagacacacacaaaatgtgttgacactgtgatgccggcaggcagagcagctactgactttgaacatgggcagagaggcccctggatctcatccagcccactccttttccccttccagtacagtgacactctggtgcccattggcagatggcgacttccctgcacccataactgatgctttgtgaattcttcctccttttcagaactactctgtgctaattgttctgccagtatgggcgcatcagctccatcctgacaaacaagacatttaggtaaaactttgtaggcaccttctgcttctctgcttcattgttcctgtgatagtcctgttgttattacagcatgtacccaaaacagcctcacattgttacaggaggcaggccaggacatcaaagtcatcatctttatgtggcatgactcttaagaggccattactgtatctcatggcctcttgatgtggaaagaagttgacagagggttgcagggtttaaaaacatccattaacatgaaagctaataaacctgtcagagaaca

SEQ ID NO: 301582 - DNA, 2919 bp, Homo sapiens
agcgggtcgccggaagtggggcgggactctattgtggcggtgaggaacaggaagccctgaagggtcaaaagaaatacaaaagcaaaggctattttctttttttttttctttctttcattccttccttcctctgtttctttctttcttcctttcatttttttttcttttttaagagcgagcggctctgcggtggcggtttggggtgggcgccgccgaggtgaggtcgtctcgcctcccgcgcgccggtagactggacttgaacactaagtcttcaatagctgagattctccatcttaatctacttggaggcaagagcagattggttgtttcattatggatggaggggatgatggtaaccttattatcaaaaagaggtttgtgtctgaggcagaactagatgaacggcgcaaaaggaggcaagaagaatgggagaaagttcgaaaacctgaagatccagaagaatgtccagaggaggtttatgaccctcgatctctatatgaaaggctacaggaacagaaggacaggaagcagcaggagtacgaggaacagttcaaattcaaaaacatggtaagaggcttagatgaagatgagaccaacttccttgatgaggtttctcgacagcaggaactaatagaaaagcaacgaagagaagaagaactgaaagaactgaaggaatacagaaataacctcaagaaggttggaatttctcaagagaacaagaaggaagtggaaaagaaactgactgtgaagcctatagaaaccaagaacaagttctcccaggcgaagctgttggcaggagctgtgaagcataagagctcagagagtggcaacagtgtgaaaagactgaaaccggaccctgagccagatgacaagaatcaagagccctcatcctgcaagtctctcggaaacacctccctgagtggcccctccatccactgcccctctgctgcagtatgtatcggcatcctcccaggcctgggtgcctactctgggagcagcgactccgagtccagctcagacagcgaaggcaccatcaatgccaccggaaagattgtctcctccatcttccgaaccaacaccttcctcgaggccccctagtttctccgtccctacacagggagctcctccccaagggtagatcggaccgttcatgctgcctataggcattatgtccctcaaaaaaaaactcctttgcctgcatcctgtgtacaacatgacatttttaaccaatccaatctaaaaatgtgccagaatccacctgtggcccgaatcgtgtttggttcctctttctactccactgcagatgaccaaacctgtcccgctgccactttcctcactgatattgggaggagggcaaggcccagccgaagttccactaaaaatgccccaggagaataggcaccggctggcttgccaaagggtttgggttttattgctttctgttttttcttttcccgacagcacaaagaagtaagggcagttattggacaggtgttatttaaacattctattgtaaatgaatgtgttgtttggttctactgcattgtggagcatgcgggggaagagaactgacccaggtaatgaaatggagcccttccctggaactaaccagtccttgatgttgtgtgactaagtaaagatgataaaccccatctgctgggggtgtcacttcacactcggcatgcattgtgaaagctttccatacccttggccattccctctctcctctctctccaaccccatttatgcaggaagggactgctaacaagaacgcttccatctcaaaccttttctctgcctgggaaattattttatgtttgtttttgaaataaaggatttagtttaagattctaaattttagagaaacaaacgtaggccttgtttactaatagccagacatcagaactgcaggtaggtatgttaatgagatgacttatttctggcagctcctggaatcctaatattgtaaatgagtgggacacacttgcatattgtgaccattctattgaggcccttctctgtttaatgcatattatacttgtgcttttaactgtggaatctatttctaacctaaaggtgctgccctagtacttttctttgctgcctctgctgctctttttcctttccaaacagcaactctgaggccatgagcagccaaaaactagaggtactgctccacctcgtctcataaagggaaacgggctcatcccttggattctggaggagggagagggagatggtgtggaggcctcgaggacagagatagacatgagctttgacaacaatctgtaggctctcctgctttagaataagcatgtaccattctttatccattccccttattcctacatcaattgtttttactttcttgggtgtgagactgagtgagacacacacaaaatgtgttgacactgtgatgccggcaggcagagcagctactgactttgaacatgggcagagaggcccctggatctcatccagcccactccttttccccttccagtacagtgacactctggtgcccattggcagatggcgacttccctgcacccataactgatgctttgtgaattcttcctccttttcagaactactctgtgctaattgttctgccagtatgggcgcatcagctccatcctgacaaacaagacatttaggtaaaactttgtaggcaccttctgcttctctgcttcattgttcctgtgatagtcctgttgttattacagcatgtacccaaaacagcctcacattgttacaggaggcaggccaggacatcaaagtcatcatctttatgtggcatgactcttaagaggccattactgtatctcatggcctcttgatgtggaaagaagttgacagagggttgcagggtttaaaaacatccattaacatgaaagctaataaacctgtcagagaaca

SEQ ID NO: 301583 - DNA, 3385 bp, Homo sapiens
ggaaagaaaccagatgattaatacaggatgagaaaggagacacggttaataggggataagaaagggggaaattgagggttcggaatgtctctcccaaccattagagccctagaaagttcacgttttctctgccagagacatttaagaaattgttggctctggtttcataagaggttgttctgtagaacttgaggaatttttggcattttcacagagactgaacagttctgcttcagtaatgagcctctggctggagtcattgagtgctgctaaatcagaagtgtccaggttgtgggctttaggtgggagcaacagcgtctgtcagttgatttcatttctttctagtaattttcacaattcgctcttattgttacattaaactaaacctcagcaacagtagtattcaggctgagactattctcttgttctgaacgtttgggtttgttttttcagcttccatttctagctttactaaataaaaatgttgcatgaatattctcagcactggaatttgaagtaggaagaaagctgaagtcgacatgtctttgttttcaactaagatttagtgttttctggggaggagtatggtaaagttggtaagagtatgcatttttgatatcaggcctggatttggttctcagctctaccattcaccacctgtatcaccttagacaaataatctaactcctctggacctcaacttcatctgtaaacagataatatttctcatagggtcaatgatcatgtaaattagataatatccataaaaggaatataatacatgattggttgtttcattatggatggaggggatgatggtaaccttattatcaaaaagaggtttgtgtctgaggcagaactagatgaacggcgcaaaaggaggcaagaagaatgggagaaagttcgaaaacctgaagatccagaagaatgtccagaggaggtttatgaccctcgatctctatatgaaaggctacaggaacagaaggacaggaagcagcaggagtacgaggaacagttcaaattcaaaaacatggtaagaggcttagatgaagatgagaccaacttccttgatgaggtttctcgacagcaggaactaatagaaaagcaacgaagagaagaagaactgaaagaactgaaggaatacagaaataacctcaagaaggttggaatttctcaagagaacaagaaggaagtggaaaagaaactgactgtgaagcctatagaaaccaagaacaagttctcccaggcgaagctgttggcaggagctgtgaagcataagagctcagagagtggcaacagtgtgaaaagactgaaaccggaccctgagccagatgacaagaatcaagagccctcatcctgcaagtctctcggaaacacctccctgagtggcccctccatccactgcccctctgctgcagtatgtatcggcatcctcccaggcctgggtgcctactctgggagcagcgactccgagtccagctcagacagcgaaggcaccatcaatgccaccggaaagattgtctcctccatcttccgaaccaacaccttcctcgaggccccctagtttctccgtccctacacagggagctcctccccaagggtagatcggaccgttcatgctgcctataggcattatgtccctcaaaaaaaaactcctttgcctgcatcctgtgtacaacatgacatttttaaccaatccaatctaaaaatgtgccagaatccacctgtggcccgaatcgtgtttggttcctctttctactccactgcagatgaccaaacctgtcccgctgccactttcctcactgatattgggaggagggcaaggcccagccgaagttccactaaaaatgccccaggagaataggcaccggctggcttgccaaagggtttgggttttattgctttctgttttttcttttcccgacagcacaaagaagtaagggcagttattggacaggtgttatttaaacattctattgtaaatgaatgtgttgtttggttctactgcattgtggagcatgcgggggaagagaactgacccaggtaatgaaatggagcccttccctggaactaaccagtccttgatgttgtgtgactaagtaaagatgataaaccccatctgctgggggtgtcacttcacactcggcatgcattgtgaaagctttccatacccttggccattccctctctcctctctctccaaccccatttatgcaggaagggactgctaacaagaacgcttccatctcaaaccttttctctgcctgggaaattattttatgtttgtttttgaaataaaggatttagtttaagattctaaattttagagaaacaaacgtaggccttgtttactaatagccagacatcagaactgcaggtaggtatgttaatgagatgacttatttctggcagctcctggaatcctaatattgtaaatgagtgggacacacttgcatattgtgaccattctattgaggcccttctctgtttaatgcatattatacttgtgcttttaactgtggaatctatttctaacctaaaggtgctgccctagtacttttctttgctgcctctgctgctctttttcctttccaaacagcaactctgaggccatgagcagccaaaaactagaggtactgctccacctcgtctcataaagggaaacgggctcatcccttggattctggaggagggagagggagatggtgtggaggcctcgaggacagagatagacatgagctttgacaacaatctgtaggctctcctgctttagaataagcatgtaccattctttatccattccccttattcctacatcaattgtttttactttcttgggtgtgagactgagtgagacacacacaaaatgtgttgacactgtgatgccggcaggcagagcagctactgactttgaacatgggcagagaggcccctggatctcatccagcccactccttttccccttccagtacagtgacactctggtgcccattggcagatggcgacttccctgcacccataactgatgctttgtgaattcttcctccttttcagaactactctgtgctaattgttctgccagtatgggcgcatcagctccatcctgacaaacaagacatttaggtaaaactttgtaggcaccttctgcttctctgcttcattgttcctgtgatagtcctgttgttattacagcatgtacccaaaacagcctcacattgttacaggaggcaggccaggacatcaaagtcatcatctttatgtggcatgactcttaagaggccattactgtatctcatggcctcttgatgtggaaagaagttgacagagggttgcagggtttaaaaacatccattaacatgaaagctaataaacctgtcagagaaca

SEQ ID NO: 301584 - DNA, 2663 bp, Homo sapiens
tagaattttaattgcagttctcacttgaaatgattttttttgtttttgtttttgttttgtagattggttgtttcattatggatggaggggatgatggtaaccttattatcaaaaagaggtttgtgtctgaggcagaactagatgaacggcgcaaaaggaggcaagaagaatgggagaaagttcgaaaacctgaagatccagaagaatgtccagaggaggtttatgaccctcgatctctatatgaaaggctacaggaacagaaggacaggaagcagcaggagtacgaggaacagttcaaattcaaaaacatggtaagaggcttagatgaagatgagaccaacttccttgatgaggtttctcgacagcaggaactaatagaaaagcaacgaagagaagaagaactgaaagaactgaaggaatacagaaataacctcaagaaggttggaatttctcaagagaacaagaaggaagtggaaaagaaactgactgtgaagcctatagaaaccaagaacaagttctcccaggcgaagctgttggcaggagctgtgaagcataagagctcagagagtggcaacagtgtgaaaagactgaaaccggaccctgagccagatgacaagaatcaagagccctcatcctgcaagtctctcggaaacacctccctgagtggcccctccatccactgcccctctgctgcagtatgtatcggcatcctcccaggcctgggtgcctactctgggagcagcgactccgagtccagctcagacagcgaaggcaccatcaatgccaccggaaagattgtctcctccatcttccgaaccaacaccttcctcgaggccccctagtttctccgtccctacacagggagctcctccccaagggtagatcggaccgttcatgctgcctataggcattatgtccctcaaaaaaaaactcctttgcctgcatcctgtgtacaacatgacatttttaaccaatccaatctaaaaatgtgccagaatccacctgtggcccgaatcgtgtttggttcctctttctactccactgcagatgaccaaacctgtcccgctgccactttcctcactgatattgggaggagggcaaggcccagccgaagttccactaaaaatgccccaggagaataggcaccggctggcttgccaaagggtttgggttttattgctttctgttttttcttttcccgacagcacaaagaagtaagggcagttattggacaggtgttatttaaacattctattgtaaatgaatgtgttgtttggttctactgcattgtggagcatgcgggggaagagaactgacccaggtaatgaaatggagcccttccctggaactaaccagtccttgatgttgtgtgactaagtaaagatgataaaccccatctgctgggggtgtcacttcacactcggcatgcattgtgaaagctttccatacccttggccattccctctctcctctctctccaaccccatttatgcaggaagggactgctaacaagaacgcttccatctcaaaccttttctctgcctgggaaattattttatgtttgtttttgaaataaaggatttagtttaagattctaaattttagagaaacaaacgtaggccttgtttactaatagccagacatcagaactgcaggtaggtatgttaatgagatgacttatttctggcagctcctggaatcctaatattgtaaatgagtgggacacacttgcatattgtgaccattctattgaggcccttctctgtttaatgcatattatacttgtgcttttaactgtggaatctatttctaacctaaaggtgctgccctagtacttttctttgctgcctctgctgctctttttcctttccaaacagcaactctgaggccatgagcagccaaaaactagaggtactgctccacctcgtctcataaagggaaacgggctcatcccttggattctggaggagggagagggagatggtgtggaggcctcgaggacagagatagacatgagctttgacaacaatctgtaggctctcctgctttagaataagcatgtaccattctttatccattccccttattcctacatcaattgtttttactttcttgggtgtgagactgagtgagacacacacaaaatgtgttgacactgtgatgccggcaggcagagcagctactgactttgaacatgggcagagaggcccctggatctcatccagcccactccttttccccttccagtacagtgacactctggtgcccattggcagatggcgacttccctgcacccataactgatgctttgtgaattcttcctccttttcagaactactctgtgctaattgttctgccagtatgggcgcatcagctccatcctgacaaacaagacatttaggtaaaactttgtaggcaccttctgcttctctgcttcattgttcctgtgatagtcctgttgttattacagcatgtacccaaaacagcctcacattgttacaggaggcaggccaggacatcaaagtcatcatctttatgtggcatgactcttaagaggccattactgtatctcatggcctcttgatgtggaaagaagttgacagagggttgcagggtttaaaaacatccattaacatgaaagctaataaacctgtcagagaaca

SEQ ID NO: 301585 - DNA, 2776 bp, Homo sapiens
gagtcagattagtattcaggaaagtacgtggaactgaagttgggagatctgttcttccagtctcactttctccattcatggtttgtgcaccttccctgctatacagactggacttgaacactaagtcttcaatagctgagattctccatcttaatctacttggaggcaagagcagattggttgtttcattatggatggaggggatgatggtaaccttattatcaaaaagaggtttgtgtctgaggcagaactagatgaacggcgcaaaaggaggcaagaagaatgggagaaagttcgaaaacctgaagatccagaagaatgtccagaggaggtttatgaccctcgatctctatatgaaaggctacaggaacagaaggacaggaagcagcaggagtacgaggaacagttcaaattcaaaaacatggtaagaggcttagatgaagatgagaccaacttccttgatgaggtttctcgacagcaggaactaatagaaaagcaacgaagagaagaagaactgaaagaactgaaggaatacagaaataacctcaagaaggttggaatttctcaagagaacaagaaggaagtggaaaagaaactgactgtgaagcctatagaaaccaagaacaagttctcccaggcgaagctgttggcaggagctgtgaagcataagagctcagagagtggcaacagtgtgaaaagactgaaaccggaccctgagccagatgacaagaatcaagagccctcatcctgcaagtctctcggaaacacctccctgagtggcccctccatccactgcccctctgctgcagtatgtatcggcatcctcccaggcctgggtgcctactctgggagcagcgactccgagtccagctcagacagcgaaggcaccatcaatgccaccggaaagattgtctcctccatcttccgaaccaacaccttcctcgaggccccctagtttctccgtccctacacagggagctcctccccaagggtagatcggaccgttcatgctgcctataggcattatgtccctcaaaaaaaaactcctttgcctgcatcctgtgtacaacatgacatttttaaccaatccaatctaaaaatgtgccagaatccacctgtggcccgaatcgtgtttggttcctctttctactccactgcagatgaccaaacctgtcccgctgccactttcctcactgatattgggaggagggcaaggcccagccgaagttccactaaaaatgccccaggagaataggcaccggctggcttgccaaagggtttgggttttattgctttctgttttttcttttcccgacagcacaaagaagtaagggcagttattggacaggtgttatttaaacattctattgtaaatgaatgtgttgtttggttctactgcattgtggagcatgcgggggaagagaactgacccaggtaatgaaatggagcccttccctggaactaaccagtccttgatgttgtgtgactaagtaaagatgataaaccccatctgctgggggtgtcacttcacactcggcatgcattgtgaaagctttccatacccttggccattccctctctcctctctctccaaccccatttatgcaggaagggactgctaacaagaacgcttccatctcaaaccttttctctgcctgggaaattattttatgtttgtttttgaaataaaggatttagtttaagattctaaattttagagaaacaaacgtaggccttgtttactaatagccagacatcagaactgcaggtaggtatgttaatgagatgacttatttctggcagctcctggaatcctaatattgtaaatgagtgggacacacttgcatattgtgaccattctattgaggcccttctctgtttaatgcatattatacttgtgcttttaactgtggaatctatttctaacctaaaggtgctgccctagtacttttctttgctgcctctgctgctctttttcctttccaaacagcaactctgaggccatgagcagccaaaaactagaggtactgctccacctcgtctcataaagggaaacgggctcatcccttggattctggaggagggagagggagatggtgtggaggcctcgaggacagagatagacatgagctttgacaacaatctgtaggctctcctgctttagaataagcatgtaccattctttatccattccccttattcctacatcaattgtttttactttcttgggtgtgagactgagtgagacacacacaaaatgtgttgacactgtgatgccggcaggcagagcagctactgactttgaacatgggcagagaggcccctggatctcatccagcccactccttttccccttccagtacagtgacactctggtgcccattggcagatggcgacttccctgcacccataactgatgctttgtgaattcttcctccttttcagaactactctgtgctaattgttctgccagtatgggcgcatcagctccatcctgacaaacaagacatttaggtaaaactttgtaggcaccttctgcttctctgcttcattgttcctgtgatagtcctgttgttattacagcatgtacccaaaacagcctcacattgttacaggaggcaggccaggacatcaaagtcatcatctttatgtggcatgactcttaagaggccattactgtatctcatggcctcttgatgtggaaagaagttgacagagggttgcagggtttaaaaacatccattaacatgaaagctaataaacctgtcagagaaca

SEQ ID NO: 301586 - DNA, 1802 bp, Homo sapiens
agcgggtcgccggaagtggggcgggactctattgtggcggtgaggaacaggaagccctgaagggtcaaaagaaatacaaaagcaaaggctattttctttttttttttctttctttcattccttccttcctctgtttctttctttcttcctttcatttttttttcttttttaagagcgagcggctctgcggtggcggtttggggtgggcgccgccgaggtgaggtcgtctcgcctcccgcgcgccggtagattggttgtttcattatggatggaggggatgatggtaaccttattatcaaaaagaggtttgtgtctgaggcagaactagatgaacggcgcaaaaggaggcaagaagaatgggagaaagttcgaaaacctgaagatccagaagaatgtccagaggaggtttatgaccctcgatctctatatgaaaggctacaggaacagaaggacaggaagcagcaggagtacgaggaacagttcaaattcaaaaacatggtaagaggcttagatgaagatgagaccaacttccttgatgaggtttctcgacagcaggaactaatagaaaagcaacgaagagaagaagaactgaaagaactgaaggaatacagaaataacctcaagaaggttggaatttctcaagagaacaagaaggaagtggaaaagaaactgactgtgaagcctatagaaaccaagaacaagttctcccaggcgaagctgttggcaggagctgtgaagcataagagctcagagagtggcaacagtgtgaaaagactgaaaccggaccctgagccagatgacaagaatcaagagccctcatcctgcaagtctctcggaaacacctccctgagtggcccctccatccactgcccctctgctgcagtatgtatcggcatcctcccaggcctgggtgcctactctgggagcagcgactccgagtccagctcagacagcgaaggcaccatcaatgccaccggaaagattgtctcctccatcttccgaaccaacaccttcctcgaggccccctagtttctccgtccctacacagggagctcctccccaagggtagatcggaccgttcatgctgcctataggcattatgtccctcaaaaaaaaactcctttgcctgcatcctgtgtacaacatgacatttttaaccaatccaatctaaaaatgtgccagaatccacctgtggcccgaatcgtgtttggttcctctttctactccactgcagatgaccaaacctgtcccgctgccactttcctcactgatattgggaggagggcaaggcccagccgaagttccactaaaaatgccccaggagaataggcaccggctggcttgccaaagggtttgggttttattgctttctgttttttcttttcccgacagcacaaagaagtaagggcagttattggacaggtgttatttaaacattctattgtaaatgaatgtgttgtttggttctactgcattgtggagcatgcgggggaagagaactgacccaggtaatgaaatggagcccttccctggaactaaccagtccttgatgttgtgtgactaagtaaagatgataaaccccatctgctgggggtgtcacttcacactcggcatgcattgtgaaagctttccatacccttgttatcgagctcgataaggccaaagtgctgactgacatgccgggtggaccaggagctggagtctgttatcttagcacgaatgctcatgaccttggtttagtgttaaacagtggagcaggtcctgagcgggcacggccaggcctggaggagcggccgcacaca

SEQ ID NO: 301587 - DNA, 1761 bp, Homo sapiens
agcgggtcgccggaagtggggcgggactctattgtggcggtgaggaacaggaagccctgaagggtcaaaagaaatacaaaagcaaaggctattttctttttttttttctttctttcattccttccttcctctgtttctttctttcttcctttcatttttttttcttttttaagagcgagcggctctgcggtggcggtttggggtgggcgccgccgaggtgaggtcgtctcgcctcccgcgcgccggtagattggttgtttcattatggatggaggggatgatggtaaccttattatcaaaaagaggtttgtgtctgaggcagaactagatgaacggcgcaaaaggaggcaagaagaatgggagaaagttcgaaaacctgaagatccagaagaatgtccagaggaggtttatgaccctcgatctctatatgaaaggctacaggaacagaaggacaggaagcagcaggagtacgaggaacagttcaaattcaaaaacatggtaagaggcttagatgaagatgagaccaacttccttgatgaggtttctcgacagcaggaactaatagaaaagcaacgaagagaagaagaactgaaagaactgaaggaatacagaaataacctcaagaaggttggaatttctcaagagaacaagaaggaagtggaaaagaaactgactgtgaagcctatagaaaccaagaacaagttctcccaggcgaagctgttggcaggagctgtgaagcataagagctcagagagtggcaacagtgtgaaaagactgaaaccggaccctgagccagatgacaagaatcaagagccctcatcctgcaagtctctcggaaacacctccctgagtggcccctccatccactgcccctctgctgcagtatgtatcggcatcctcccaggcctgggtgcctactctgggagcagcgactccgagtccagctcagacagcgaaggcaccatcaatgccaccggaaagattgtctcctccatcttccgaaccaacaccttcctcgaggccccctagtttctccgtccctacacagggagctcctccccaagggtagatcggaccgttcatgctgcctataggcattatgtccctcaaaaaaaaactcctttgcctgcatcctgtgtacaacatgacatttttaaccaatccaatctaaaaatgtgccagaatccacctgtggcccgaatcgtgtttggttcctctttctactccactgcagatgaccaaacctgtcccgctgccactttcctcactgatattgggaggagggcaaggcccagccgaagttccactaaaaatgccccaggagaataggcaccggctggcttgccaaagggtttgggttttattgctttctgttttttcttttcccgacagcacaaagaagtaagggcagttattggacaggtgttatttaaacattctattgtaaatgaatgtgttgtttggttctactgcattgtggagcatgcgggggaagagaactgacccaggtaatgaaatggagcccttccctggaactaaccagtccttgatgttgtgtgactaagtaaagatgataaaccccatctgctgggggtgtcacttcacactcggcatgcattgtgaaagctttccatacccttgggggagggggaggaagaagaatctcttgaacccaaaaggtggaggttgcagtgagctgagaccacaccattgcactccagcctgggttacagagactatgtcttatataatagtggttga

SEQ ID NO: 301588 - DNA, 2770 bp, Homo sapiens
agcgggtcgccggaagtggggcgggactctattgtggcggtgaggaacaggaagccctgaagggtcaaaagaaatacaaaagcaaaggctattttctttttttttttctttctttcattccttccttcctctgtttctttctttcttcctttcatttttttttcttttttaagagcgagcggctctgcggtggcggtttggggtgggcgccgccgaggtgaggtcgtctcgcctcccgcgcgccggtagtgaacggcgcaaaaggaggcaagaagaatgggagaaagttcgaaaacctgaagatccagaagaatgtccagaggaggtttatgaccctcgatctctatatgaaaggctacaggaacagaaggacaggaagcagcaggagtacgaggaacagttcaaattcaaaaacatggtaagaggcttagatgaagatgagaccaacttccttgatgaggtttctcgacagcaggaactaatagaaaagcaacgaagagaagaagaactgaaagaactgaaggaatacagaaataacctcaagaaggttggaatttctcaagagaacaagaaggaagtggaaaagaaactgactgtgaagcctatagaaaccaagaacaagttctcccaggcgaagctgttggcaggagctgtgaagcataagagctcagagagtggcaacagtgtgaaaagactgaaaccggaccctgagccagatgacaagaatcaagagccctcatcctgcaagtctctcggaaacacctccctgagtggcccctccatccactgcccctctgctgcagtatgtatcggcatcctcccaggcctgggtgcctactctgggagcagcgactccgagtccagctcagacagcgaaggcaccatcaatgccaccggaaagattgtctcctccatcttccgaaccaacaccttcctcgaggccccctagtttctccgtccctacacagggagctcctccccaagggtagatcggaccgttcatgctgcctataggcattatgtccctcaaaaaaaaactcctttgcctgcatcctgtgtacaacatgacatttttaaccaatccaatctaaaaatgtgccagaatccacctgtggcccgaatcgtgtttggttcctctttctactccactgcagatgaccaaacctgtcccgctgccactttcctcactgatattgggaggagggcaaggcccagccgaagttccactaaaaatgccccaggagaataggcaccggctggcttgccaaagggtttgggttttattgctttctgttttttcttttcccgacagcacaaagaagtaagggcagttattggacaggtgttatttaaacattctattgtaaatgaatgtgttgtttggttctactgcattgtggagcatgcgggggaagagaactgacccaggtaatgaaatggagcccttccctggaactaaccagtccttgatgttgtgtgactaagtaaagatgataaaccccatctgctgggggtgtcacttcacactcggcatgcattgtgaaagctttccatacccttggccattccctctctcctctctctccaaccccatttatgcaggaagggactgctaacaagaacgcttccatctcaaaccttttctctgcctgggaaattattttatgtttgtttttgaaataaaggatttagtttaagattctaaattttagagaaacaaacgtaggccttgtttactaatagccagacatcagaactgcaggtaggtatgttaatgagatgacttatttctggcagctcctggaatcctaatattgtaaatgagtgggacacacttgcatattgtgaccattctattgaggcccttctctgtttaatgcatattatacttgtgcttttaactgtggaatctatttctaacctaaaggtgctgccctagtacttttctttgctgcctctgctgctctttttcctttccaaacagcaactctgaggccatgagcagccaaaaactagaggtactgctccacctcgtctcataaagggaaacgggctcatcccttggattctggaggagggagagggagatggtgtggaggcctcgaggacagagatagacatgagctttgacaacaatctgtaggctctcctgctttagaataagcatgtaccattctttatccattccccttattcctacatcaattgtttttactttcttgggtgtgagactgagtgagacacacacaaaatgtgttgacactgtgatgccggcaggcagagcagctactgactttgaacatgggcagagaggcccctggatctcatccagcccactccttttccccttccagtacagtgacactctggtgcccattggcagatggcgacttccctgcacccataactgatgctttgtgaattcttcctccttttcagaactactctgtgctaattgttctgccagtatgggcgcatcagctccatcctgacaaacaagacatttaggtaaaactttgtaggcaccttctgcttctctgcttcattgttcctgtgatagtcctgttgttattacagcatgtacccaaaacagcctcacattgttacaggaggcaggccaggacatcaaagtcatcatctttatgtggcatgactcttaagaggccattactgtatctcatggcctcttgatgtggaaagaagttgacagagggttgcagggtttaaaaacatccattaacatgaaagctaataaacctgtcagagaaca

SEQ ID NO: 301589 - DNA, 1329 bp, Homo sapiens
agcgggtcgccggaagtggggcgggactctattgtggcggtgaggaacaggaagccctgaagggtcaaaagaaatacaaaagcaaaggctattttctttttttttttctttctttcattccttccttcctctgtttctttctttcttcctttcatttttttttcttttttaagagcgagcggctctgcggtggcggtttggggtgggcgccgccgaggtgaggtcgtctcgcctcccgcgcgccggtagattggttgtttcattatggatggaggggatgatggtaaccttattatcaaaaagaggtttgtgtctgaggcagaactagatgaacggcgcaaaaggaggcaagaagaatgggagaaagttcgaaaacctgaagatccagaagaatgtccagaggaggtttatgaccctcgatctctatatgaaaggctacaggaacagaaggacaggaagcagcaggagtacgaggaacagttcaaattcaaaaacatggtaagaggcttagatgaagatgagaccaacttccttgatgaggtttctcgacagcaggaactaatagaaaagcaacgaagagaagaagaactgaaagaactgaaggaatacagaaataacctcaagaaggttggaatttctcaagagaacaagaaggaagtggaaaagaaactgactgtgaagcctatagaaaccaagaacaagttctcccaggcgaagctgttggcaggagctgtgaagcataagagctcagagagtggcaacagtgtgaaaagactgaaaccggaccctgagccagatgacaagaatcaagagccctcatcctgcaagtctctcggaaacacctccctgagtggcccctccatccactgcccctctgctgcagtatgtatcggcatcctcccaggcctgggtgcctactctgggagcagcgactccgagtccagctcagacagcgaaggcaccatcaatgccaccggaaagattgtctcctccatcttccgaaccaacaccttcctcgaggccccctagtttctccgtccctacacagggagctcctccccaagggtagatcggaccgttcatgctgcctataggcattatgtccctcaaaaaaaaactcctttgcctgcatcctgtgtacaacatgacatttttaaccaatccaatctaaaaatgtgccagaatccacctgtggcccgaatcgtgtttggttcctctttctactccactgcagatgaccaaacctgtcccgctgccactttcctcactgatattgggaggagggcaaggcccagccgaagtcagctccgttctagggatcctctagat

SEQ ID NO: 301590 - DNA, 3296 bp, Homo sapiens
  misc_feature (1045)..(1045): n is a, c, g, or t
ggaaagaaaccagatgattaatacaggatgagaaaggagacacggttaataggggataagaaagggggaaattgagggttcggaatgtctctcccaaccattagagccctagaaagttcacgttttctctgccagagacatttaagaaattgttggctctggtttcataagaggttgttctgtagaacttgaggaatttttggcattttcacagagactgaacagttctgcttcagtaatgagcctctggctggagtcattgagtgctgctaaatcagaagtgtccaggttgtgggctttaggtgggagcaacagcgtctgtcagttgatttcatttctttctagtaattttcacaattcgctcttattgttacattaaactaaacctcagcaacagtagtattcaggctgagactattctcttgttctgaacgtttgggtttgttttttcagcttccatttctagctttactaaataaaaatgttgcatgaatattctcagcactggaatttgaagtaggaagaaagctgaagtcgacatgtctttgttttcaactaagatttagtgttttctggggaggagtatggtaaagttggtaagagtatgcatttttgatatcaggcctggatttggttctcagctctaccattcaccacctgtatcaccttagacaaataatctaactcctctggacctcaacttcatctgtaaacagataatatttctcatagggtcaatgatcatgtaaattagataatatccataaaaggaatataatacatgattggttgtttcattatggatggaggggatgatggtaaccttattatcaaaaagaggtttgtgtctgaggcagaactagatgaacggcgcaaaaggaggcaagaagaatgggagaaagttcgaaaacctgaagatccagaagaatgtccagaggaggtttatgaccctcgatctctatatgaaaggctacaggaacagaaggacaggaagcagcaggagtacgaggaacagttcaaattcaaaaacatgtttgacccttanactggtaactcacaataacctcaagaaggttggaatttctcaagagaacaagaaggaagtggaaaagaaactgactgtgaagcctatagaaaccaagaacaagttctcccaggcgaagctgttggcaggagctgtgaagcataagagctcagagagtggcaacagtgtgaaaagactgaaaccggaccctgagccagatgacaagaatcaagagccctcatcctgcaagtctctcggaaacacctccctgagtggcccctccatccactgcccctctgctgcagtatgtatcggcatcctcccaggcctgggtgcctactctgggagcagcgactccgagtccagctcagacagcgaaggcaccatcaatgccaccggaaagattgtctcctccatcttccgaaccaacaccttcctcgaggccccctagtttctccgtccctacacagggagctcctccccaagggtagatcggaccgttcatgctgcctataggcattatgtccctcaaaaaaaaactcctttgcctgcatcctgtgtacaacatgacatttttaaccaatccaatctaaaaatgtgccagaatccacctgtggcccgaatcgtgtttggttcctctttctactccactgcagatgaccaaacctgtcccgctgccactttcctcactgatattgggaggagggcaaggcccagccgaagttccactaaaaatgccccaggagaataggcaccggctggcttgccaaagggtttgggttttattgctttctgttttttcttttcccgacagcacaaagaagtaagggcagttattggacaggtgttatttaaacattctattgtaaatgaatgtgttgtttggttctactgcattgtggagcatgcgggggaagagaactgacccaggtaatgaaatggagcccttccctggaactaaccagtccttgatgttgtgtgactaagtaaagatgataaaccccatctgctgggggtgtcacttcacactcggcatgcattgtgaaagctttccatacccttggccattccctctctcctctctctccaaccccatttatgcaggaagggactgctaacaagaacgcttccatctcaaaccttttctctgcctgggaaattattttatgtttgtttttgaaataaaggatttagtttaagattctaaattttagagaaacaaacgtaggccttgtttactaatagccagacatcagaactgcaggtaggtatgttaatgagatgacttatttctggcagctcctggaatcctaatattgtaaatgagtgggacacacttgcatattgtgaccattctattgaggcccttctctgtttaatgcatattatacttgtgcttttaactgtggaatctatttctaacctaaaggtgctgccctagtacttttctttgctgcctctgctgctctttttcctttccaaacagcaactctgaggccatgagcagccaaaaactagaggtactgctccacctcgtctcataaagggaaacgggctcatcccttggattctggaggagggagagggagatggtgtggaggcctcgaggacagagatagacatgagctttgacaacaatctgtaggctctcctgctttagaataagcatgtaccattctttatccattccccttattcctacatcaattgtttttactttcttgggtgtgagactgagtgagacacacacaaaatgtgttgacactgtgatgccggcaggcagagcagctactgactttgaacatgggcagagaggcccctggatctcatccagcccactccttttccccttccagtacagtgacactctggtgcccattggcagatggcgacttccctgcacccataactgatgctttgtgaattcttcctccttttcagaactactctgtgctaattgttctgccagtatgggcgcatcagctccatcctgacaaacaagacatttaggtaaaactttgtaggcaccttctgcttctctgcttcattgttcctgtgatagtcctgttgttattacagcatgtacccaaaacagcctcacattgttacaggaggcaggccaggacatcaaagtcatcatctttatgtggcatgactcttaagaggccattactgtatctcatggcctcttgatgtggaaagaagttgacagagggttgcagggtttaaaaacatccattaacatgaaagctaataaacctgtcagagaaca

SEQ ID NO: 301591 - DNA, 2603 bp, Homo sapiens
  misc_feature (541)..(541): n is a, c, g, or t
agcgggtcgccggaagtggggcgggactctattgtggcgattggttgtttcattatggatggaggggatgatggtaaccttattatcaaaaagaggtttgtgtctgaggcagaactagatgaacggcgcaaaaggaggcaagaagaatgggagaaagttcgaaaacctgaagatccagaagaatgtccagaggaggtttatgaccctcgatctctatatgaaaggctacaggaacagaaggacaggaagcagcaggagtacgaggaacagttcaaattcaaaaacatggtaagaggcttagatgaagatgagaccaacttccttgatgaggtttctcgacagcaggaactaatagaaaagcaacgaagagaagaagaactgaaagaactgaaggaatacagaaataacctcaagaaggttggaatttctcaagagaacaagaaggaagtggaaaagaaactgactgtgaagcctatagaaaccaagaacaagttctcccaggcgaagctgttggcaggagctgtgaagcataagagctcanagagtggcaacagtgtgtgcaagagccctcatcctgcaagtctctcggaaacacctccctgagtggcccctccatccactgcccctctgctgcagtatgtatcggcatcctcccaggcctgggtgcctactctgggagcagcgactccgagtccagctcagacagcgaaggcaccatcaatgccaccggaaagattgtctcctccatcttccgaaccaacaccttcctcgaggccccctagtttctccgtccctacacagggagctcctccccaagggtagatcggaccgttcatgctgcctataggcattatgtccctcaaaaaaaaactcctttgcctgcatcctgtgtacaacatgacatttttaaccaatccaatctaaaaatgtgccagaatccacctgtggcccgaatcgtgtttggttcctctttctactccactgcagatgaccaaacctgtcccgctgccactttcctcactgatattgggaggagggcaaggcccagccgaagttccactaaaaatgccccaggagaataggcaccggctggcttgccaaagggtttgggttttattgctttctgttttttcttttcccgacagcacaaagaagtaagggcagttattggacaggtgttatttaaacattctattgtaaatgaatgtgttgtttggttctactgcattgtggagcatgcgggggaagagaactgacccaggtaatgaaatggagcccttccctggaactaaccagtccttgatgttgtgtgactaagtaaagatgataaaccccatctgctgggggtgtcacttcacactcggcatgcattgtgaaagctttccatacccttggccattccctctctcctctctctccaaccccatttatgcaggaagggactgctaacaagaacgcttccatctcaaaccttttctctgcctgggaaattattttatgtttgtttttgaaataaaggatttagtttaagattctaaattttagagaaacaaacgtaggccttgtttactaatagccagacatcagaactgcaggtaggtatgttaatgagatgacttatttctggcagctcctggaatcctaatattgtaaatgagtgggacacacttgcatattgtgaccattctattgaggcccttctctgtttaatgcatattatacttgtgcttttaactgtggaatctatttctaacctaaaggtgctgccctagtacttttctttgctgcctctgctgctctttttcctttccaaacagcaactctgaggccatgagcagccaaaaactagaggtactgctccacctcgtctcataaagggaaacgggctcatcccttggattctggaggagggagagggagatggtgtggaggcctcgaggacagagatagacatgagctttgacaacaatctgtaggctctcctgctttagaataagcatgtaccattctttatccattccccttattcctacatcaattgtttttactttcttgggtgtgagactgagtgagacacacacaaaatgtgttgacactgtgatgccggcaggcagagcagctactgactttgaacatgggcagagaggcccctggatctcatccagcccactccttttccccttccagtacagtgacactctggtgcccattggcagatggcgacttccctgcacccataactgatgctttgtgaattcttcctccttttcagaactactctgtgctaattgttctgccagtatgggcgcatcagctccatcctgacaaacaagacatttaggtaaaactttgtaggcaccttctgcttctctgcttcattgttcctgtgatagtcctgttgttattacagcatgtacccaaaacagcctcacattgttacaggaggcaggccaggacatcaaagtcatcatctttatgtggcatgactcttaagaggccattactgtatctcatggcctcttgatgtggaaagaagttgacagagggttgcagggtttaaaaacatccattaacatgaaagctaataaacctgtcagagaaca

SEQ ID NO: 301592 - DNA, 2464 bp, Homo sapiens
  misc_feature (13)..(13): n is a, c, g, or t
  misc_feature (15)..(15): n is a, c, g, or t
  misc_feature (402)..(402): n is a, c, g, or t
caagaagaatgtnanaagggcggagaggggaagatccagaataatgtccagaggaggtttatgaccctcgatctctatatgaaaggctacaggaacagaaggacaggaagcagcaggagtacgaggaacagttcaaattcaaaaacatggtaagaggcttagatgaagatgagaccaacttccttgatgaggtttctcgacagcaggaactaatagaaaagcaacgaagagaagaagaactgaaagaactgaaggaatacagaaataacctcaagaaggttggaatttctcaagagaacaagaaggaagtggaaaagaaactgactgtgaagcctatagaaaccaagaacaagttctcccaggcgaagctgttggcaggagctgtgaagcataagagctcanagagtggcaacagtgtgtgcaagagccctcatcctgcaagtctctcggaaacacctccctgagtggcccctccatccactgcccctctgctgcagtatgtatcggcatcctcccaggcctgggtgcctactctgggagcagcgactccgagtccagctcagacagcgaaggcaccatcaatgccaccggaaagattgtctcctccatcttccgaaccaacaccttcctcgaggccccctagtttctccgtccctacacagggagctcctccccaagggtagatcggaccgttcatgctgcctataggcattatgtccctcaaaaaaaaactcctttgcctgcatcctgtgtacaacatgacatttttaaccaatccaatctaaaaatgtgccagaatccacctgtggcccgaatcgtgtttggttcctctttctactccactgcagatgaccaaacctgtcccgctgccactttcctcactgatattgggaggagggcaaggcccagccgaagttccactaaaaatgccccaggagaataggcaccggctggcttgccaaagggtttgggttttattgctttctgttttttcttttcccgacagcacaaagaagtaagggcagttattggacaggtgttatttaaacattctattgtaaatgaatgtgttgtttggttctactgcattgtggagcatgcgggggaagagaactgacccaggtaatgaaatggagcccttccctggaactaaccagtccttgatgttgtgtgactaagtaaagatgataaaccccatctgctgggggtgtcacttcacactcggcatgcattgtgaaagctttccatacccttggccattccctctctcctctctctccaaccccatttatgcaggaagggactgctaacaagaacgcttccatctcaaaccttttctctgcctgggaaattattttatgtttgtttttgaaataaaggatttagtttaagattctaaattttagagaaacaaacgtaggccttgtttactaatagccagacatcagaactgcaggtaggtatgttaatgagatgacttatttctggcagctcctggaatcctaatattgtaaatgagtgggacacacttgcatattgtgaccattctattgaggcccttctctgtttaatgcatattatacttgtgcttttaactgtggaatctatttctaacctaaaggtgctgccctagtacttttctttgctgcctctgctgctctttttcctttccaaacagcaactctgaggccatgagcagccaaaaactagaggtactgctccacctcgtctcataaagggaaacgggctcatcccttggattctggaggagggagagggagatggtgtggaggcctcgaggacagagatagacatgagctttgacaacaatctgtaggctctcctgctttagaataagcatgtaccattctttatccattccccttattcctacatcaattgtttttactttcttgggtgtgagactgagtgagacacacacaaaatgtgttgacactgtgatgccggcaggcagagcagctactgactttgaacatgggcagagaggcccctggatctcatccagcccactccttttccccttccagtacagtgacactctggtgcccattggcagatggcgacttccctgcacccataactgatgctttgtgaattcttcctccttttcagaactactctgtgctaattgttctgccagtatgggcgcatcagctccatcctgacaaacaagacatttaggtaaaactttgtaggcaccttctgcttctctgcttcattgttcctgtgatagtcctgttgttattacagcatgtacccaaaacagcctcacattgttacaggaggcaggccaggacatcaaagtcatcatctttatgtggcatgactcttaagaggccattactgtatctcatggcctcttgatgtggaaagaagttgacagagggttgcagggtttaaaaacatccattaacatgaaagctaataaacctgtcagagaaca

SEQ ID NO: 301593 - DNA, 1075 bp, Homo sapiens
agcgggtcgccggaagtggggcgggactctattgtggcggtgaggaacaggaagccctgaagggtcaaaagaaatacaaaagcaaaggctattttctttttttttttctttctttcattccttccttcctctgtttctttctttcttcctttcatttttttttcttttttaagagcgagcggctctgcggtggcggtttggggtgggcgccgccgaggtgaggtcgtctcgcctcccgcgcgccggtagattggttgtttcattatggatggaggggatgatggtaaccttattatcaaaaagaggtttgtgtctgaggcagaactagatgaacggcgcaaaaggaggcaagaagaatgggagaaagttcgaaaacctgaagatccagaagaatgtccagaggaggtttatgaccctcgatctctatatgaaaggctacaggaacagaaggacaggaagcagcaggagtacgaggaacagttcaaattcaaaaacatggtaagaggcttagatgaagatgagaccaacttccttgatgaggtttctcgacagcaggaactaatagaaaagcaacgaagagaagaagaactgaaagaactgaaggaatacagaaataacctcaagaaggttggaatttctcaagagaacaagaaggaagtggaaaagaaactgactgtgaagcctatagaaaccaagaacaagttctcccaggcgaagctgttggcaggagctgtgaagcataagagctcagagagtggcaacagtgtgaaaagactgaaaccggaccctgagccagatgacaagaatcaagagccctcatcctgcaagtctctcggaaacacctccctgagtggcccctccatccactgcccctctgctgcagtatgtatcggcatcctcccaggcctgggtgcctactctgggagcagcgactccgagtccagctcagacagcgaaggcaccatcaatgccaccggaaagattgtctcctccatcttccgaaccaacaccttcctcgaggccccccttattttttttccggccccttccacaaggggaagcttcctttccccaa

SEQ ID NO: 301594 - DNA, 2034 bp, Homo sapiens
  misc_feature (12)..(13): n is a, c, g, or t
  misc_feature (52)..(52): n is a, c, g, or t
  misc_feature (64)..(64): n is a, c, g, or t
  misc_feature (76)..(76): n is a, c, g, or t
attcggcacagnngggcaaaaggggctgtgctccttggacactttgcacagncccagtggcttnctttctcctctnttagtgtggttaatgttcatctgcctgcatccctgagtcacccaagtgtaacctcagcctcctgagtggctgggattacagccggaaagattgtctcctccatcttccgaaccaacaccttcctcgaggccccctagtttctccgtccctacacagggagctcctccccaagggtagatcggaccgttcatgctgcctataggcattatgtccctcaaaaaaaaactcctttgcctgcatcctgtgtacaacatgacatttttaaccaatccaatctaaaaatgtgccagaatccacctgtggcccgaatcgtgtttggttcctctttctactccactgcagatgaccaaacctgtcccgctgccactttcctcactgatattgggaggagggcaaggcccagccgaagttccactaaaaatgccccaggagaataggcaccggctggcttgccaaagggtttgggttttattgctttctgttttttcttttcccgacagcacaaagaagtaagggcagttattggacaggtgttatttaaacattctattgtaaatgaatgtgttgtttggttctactgcattgtggagcatgcgggggaagagaactgacccaggtaatgaaatggagcccttccctggaactaaccagtccttgatgttgtgtgactaagtaaagatgataaaccccatctgctgggggtgtcacttcacactcggcatgcattgtgaaagctttccatacccttggccattccctctctcctctctctccaaccccatttatgcaggaagggactgctaacaagaacgcttccatctcaaaccttttctctgcctgggaaattattttatgtttgtttttgaaataaaggatttagtttaagattctaaattttagagaaacaaacgtaggccttgtttactaatagccagacatcagaactgcaggtaggtatgttaatgagatgacttatttctggcagctcctggaatcctaatattgtaaatgagtgggacacacttgcatattgtgaccattctattgaggcccttctctgtttaatgcatattatacttgtgcttttaactgtggaatctatttctaacctaaaggtgctgccctagtacttttctttgctgcctctgctgctctttttcctttccaaacagcaactctgaggccatgagcagccaaaaactagaggtactgctccacctcgtctcataaagggaaacgggctcatcccttggattctggaggagggagagggagatggtgtggaggcctcgaggacagagatagacatgagctttgacaacaatctgtaggctctcctgctttagaataagcatgtaccattctttatccattccccttattcctacatcaattgtttttactttcttgggtgtgagactgagtgagacacacacaaaatgtgttgacactgtgatgccggcaggcagagcagctactgactttgaacatgggcagagaggcccctggatctcatccagcccactccttttccccttccagtacagtgacactctggtgcccattggcagatggcgacttccctgcacccataactgatgctttgtgaattcttcctccttttcagaactactctgtgctaattgttctgccagtatgggcgcatcagctccatcctgacaaacaagacatttaggtaaaactttgtaggcaccttctgcttctctgcttcattgttcctgtgatagtcctgttgttattacagcatgtacccaaaacagcctcacattgttacaggaggcaggccaggacatcaaagtcatcatctttatgtggcatgactcttaagaggccattactgtatctcatggcctcttgatgtggaaagaagttgacagagggttgcagggtttaaaaacatccattaacatgaaagctaataaacctgtcagagaaca

SEQ ID NO: 301595 - DNA, 1228 bp, Homo sapiens
agcgggtcgccggaagtggggcgggactctattgtggcggtgaggaacaggaagccctgaagggtcaaaagaaatacaaaagcaaaggctattttctttttttttttctttctttcattccttccttcctctgtttctttctttcttcctttcatttttttttcttttttaagagcgagcggctctgcggtggcggtttggggtgggcgccgccgaggtgaggtcgtctcgcctcccgcgcgccggtagattggttgtttcattatggatggaggggatgatggtaaccttattatcaaaaagaggtttgtgtctgaggcagaactagatgaacggcgcaaaaggaggcaagaagaatgggagaaagttcgaaaacctgaagatccagaagaatgtccagaggaggtttatgaccctcgatctctatatgaaaggctacaggaacagaaggacaggaagcagcaggagtacgaggaacagttcaaattcaaaaacatggtaagaggcttagatgaagatgagaccaacttccttgatgaggtttctcgacagcaggaactaatagaaaagcaacgaagagaagaagaactgaaagaactgaaggaatacagaaataacctcaagaaggttggaatttctcaagagaacaagaaggaagtggaaaagaaactgactgtgaagcctatagaaaccaagaacaagttctcccaggcgaagctgttggcaggagctgtgaagcataagagctcagagagtggcaacagtgtgaaaagactgaaaccggaccctgagccagatgacaagaatcaagagccctcatcctgcaagtctctcggaaacacctccctgagtggcccctccatccactgcccctctgctgcacacaaagaagtaagggcagttattggacaggtgttatttaaacattctattgtaaatgaatgtgttgtttggttctactgcattgtggagcatgcgggggaagagaactgacccagaactactctgtgctaattgttctgccagtatgggcgcatcagctccatcctgacaaacaagacatttaggaggcaggccaggacatcaaagtcatcatctttatgtggcatgactcttaagaggccattactgtatctcatggcctcttgatgtggaaagaagttgacagagggttgcagggtttaaaaacatccattaacatgaaagctaataaacctgtcagagaaca

SEQ ID NO: 301596 - DNA, 1213 bp, Homo sapiens
cctggcctggcggcgacacctgggttccagcttccttacggaagagatgagctgcggctgctgttagggttagggccaggcctgttctcagtccgcgcacccgctccttgtccggagtagccgaagcctggggcttgcgggcccagcctgaggggagctgagggtgcccgcgggaaggcatctgggtcgcggcgaggaccctttcaggcgggcccaacactgccgggcgtttaatggggtttccccaattttctgctagaatcttgccctgtcgctcaagctggggtgcagcggtgtgatcttggctcactgcaacctccgcctcccaggttcaagcgattctcctgcctcagcctcctgagtagctgggattacagattggttgtttcattatggatggaggggatgatggtaaccttattatcaaaaagaggtttgtgtctgaggcagaactagatgaacggcgcaaaaggaggcaagaagaatgggagaaagttcgaaaacctgaagatccagaagaatgtccagaggaggtttatgaccctcgatctctatatgaaaggctacaggaacagaaggacaggaagcagcaggagtacgaggaacagttcaaattcaaaaacatggtaagaggcttagatgaagatgagaccaacttccttgatgaggtttctcgacagcaggaactaatagaaaagcaacgaagagaagaagaactgaaagaactgaaggaatacagaaataacctcaagaaggttggaatttctcaagagaacaagaaggaagtggaaaagaaactgactgtgaagcctatagaaaccaagaacaagttctcccaggcgaagctgttggcaggagctgtgaagcataagagctcagagagtggcaacagtgtgaaaagactgaaaccggaccctgagccagatgacaagaatcaagagccctcatcctgcaagtctctcggaaacacctccctgagtggcccctccatccactgcccctctgctgcagtatgtatcggcatcctcccaggcctgggtgcctactctgggagcagcgactccgagtccagctcagacagcgaaggcaccatcaatgccaccggaaagattgtctcctccatcttccgaaccaactttctgaggcctagtttccggctaagggagcctcccagggtaatgggcggaagggccaaggtattgtccaaaaaact

SEQ ID NO: 301597 - DNA, 1209 bp, Homo sapiens
aaaagtataaagaaaagaaatagttagctttgcagggagtagtgcttgggaggtaataggtgcttctggagtgctgttgatgttctgttcctaagtagggtgctatggcttgagtttggtttgtctgaccctaccaagtctcatgttaaaatttcatccccagtgttggaggtgaggcctggtgggaagggttgtgggagtggatttctcatgagtggcttcgtattctgtaaggagtgagttcattaagagactggcacttcctctctcctttctctcgccatgtgatctctgcatatgtcatctcctgtctgccttccaccgtgagcagcctgaagccctcactggaagcagatactgctaccatgcttcttgtacagcctgcaaaaccgtgagccaaataagccgaacattctaagacactgggattacatgagtgttagcactctatgacttaatgagaagtaggttttttggagaaaaatgtactttcagtatgtatattatatatttcatggttatttttaaaactcgtgagcaatgctggatacacactaccaactattacttccctgactgagccaatttttctgtaaatgcatcacaaatgtgaaagataaggtaggcctgaattctggggaatgacaatggtgaaggaaaggcgagacaggtgcaaaagacactgcagaactcaggctcaaaatctcatccttaactccttccctcatcccaccatgttgaatcagatgtcaatagcaattttatatggcattttttaagcttgcaaaaagttataaacagaaaatgttcattttatcactccatcacagacgaaaaacatgaaattaagctaggaaacatgttcaggtgattagagtagatagaacatagactaaaaaccagtgaacttataaaaaaaaatcccatgatgtggacaaaaaaaaagaacttgtggctcctcactccaactcctgtgactctctcaccttacccccactgccttcaagttttttgtagaaagagaaattttgtatggattgagtttaagatgatgccagaatatcaaggtagaattattaaacacacaaaagctaaggtttggtactctgaaaaaaggtcagaattggtgatagaaaattagaagttacccatccatagaagggtaataaagccatgagagtgaaggaaaccagtgagagagaatattga

SEQ ID NO: 301598 - DNA, 616 bp, Homo sapiens
agacctacatgactacggtttgaaggaaaaagactttatttaatcctagtgattggaattggaattctcatttgagccagaagatttcttgagtggttttgttttctgtgataacttggtttatataagtaatccacattacttgggtgttagtggtaaagcaagtctttgccttgtacaacaaagataatttagtgattgatacattctgaataatctggtggttatgacttgacacatacaaaaaatgttagtggttgcagtccatctgttgctctgtaaaaagatttttgttattgtttgtttgttttgagaccaagtctcactcttattgcctaggctggaatgcagtggcatgatctctgctcactgcaaactctgcctcctggattcaagcaattctcctgcctcagcctcctgagtagctgggattacaggcatgcaccatcatacctggctaatttttgttttgttttgttttttctttttttttgagataaagtctcactatgtcacccagcctggagtgcaatggtgagatctcagctcactgcaacctccgccccccaggttcaagagcttctcttgcctcagtctcccgagtagctgagattaa

SEQ ID NO: 301599 - DNA, 2274 bp, Homo sapiens
agcgggggggcagcggcggggtcctgtctgggagaggacagggttgcggcgggcggaacggtgtctccttcacttcgccctccagctgctgcagctgcagcccgaccgcgagcgtgccaagcggcttcagcagctagcggagcggtggcggcggcccccctcaggacaccaccagattcccctcttcccgcggcctcgccatggcgacccacggacagacttgcgcgcgtccaatgtgtattcctccatcatatgctgaccttggcaaagctgccagagatattttcaacaaaggatttggttttgggttggtgaaactggatgtgaaaacaaagtcttgcagtggcgtggaattttcaacgtccggttcatctaatacagacactggtaaagttactgggaccttggagaccaaatacaagtggtgtgagtatggtctgactttcacagaaaagtggaacactgataacactctgggaacagaaatcgcaattgaagaccagatttgtcaaggtttgaaactgacatttgatactaccttctcaccaaacacaggaaagaaaagtggtaaaatcaagtcttcttacaagagggagtgtataaaccttggttgtgatgttgactttgattttgctggacctgcaatccatggttcagctgtctttggttatgagggctggcttgctggctaccagatgacctttgacagtgccaaatcaaagctgacaaggaataactttgcagtgggctacaggactggggacttccagctacacactaatgtcaatgatgggacagaatttggaggatcaatttatcagaaagtttgtgaagatcttgacacttcagtaaaccttgcttggacatcaggtaccaactgcactcgttttggcattgcagctaaatatcagttggatcccactgcttccatttctgcaaaagtcaacaactctagcttaattggagtaggctatactcagactctgaggcctggtgtgaagcttacactctctgctctggtagatgggaagagcattaatgctggaggccacaaggttgggctcgccctggagttggaggcttaatccagctgaaagaaacctttgggaatggatatcagaagatttggccttaatatatttccattgtgaccagcagcaggcttttttcccccaagaagatgatcaaaacaaaggatgatctcaacaagagctgtattttaagtatttagacagttctttgttagctggtttctagttggttatctagttaccaatgctgcagtcctgcagtcacctatacattatttaaatgtatttaactgttaaatgcgctacccaccaataatgaaatagacctttatgaaaactgtgcaattgtgtgcatgtttgtttttatgttcctttagaaaacattgactgttaccattgaatgagatggatcagtggatattaagatgaggttacaaattttgttaagttcagccattattacttttggtatcccagaacatgacaaattatgaataaaacaagtatacataacaagtatacataattaatggctccaagtatttgcggagttccacgtttgccagctaggatcaaatccccgtggtagctagccaatacttgatttttccagtgagtattttgctctgtacctaaatctgtgccacagaatcttctgtgtccctagattccacgagctttttaagactacaataagaggatacatgcttttacacttttacatgcacagtttgtaagtctgtgcagaattgccctgcatcattgaaaggaaaaagagaaggtgctgaaaagttacacaaacacaccatacccctgtgagctactgctaggaacataaagtaggccctggtttggtgagatggtgttaagcatacagaagaggagtaaggtgtagacagtgagggtaacctgagggactgtgagaggtcattactcatttccttctaggcagacacactgaaaggtgggtataggtaggagaccagagacaacccctttaggctgcgtggcattggccttcatctgggcatgaatgagacattaataggtggttctggctggaaaagtaggtaagagtacgttttctgatgggagaagataattggatatgattaaaggttggagaagatttgttcaacaaatctgtaatagacctgaagaatggtagaacctgagtgataagaaatgggtaagaaaatggaaggacttatcacccaagaaatgatacatgctacaaacttcc

SEQ ID NO: 301600 - DNA, 1417 bp, Homo sapiens
gctgcagctgcagcagctggagggcgaagtgaaggagacaccgttccgattcccctcttcccgcggcctcgccatggcgacccacggacagacttgcgcgcgtccaatgtgtattcctccatcatatgctgaccttggcaaagctgccagagatattttcaacaaaggatttggttttgggttggtgaaactggatgtgaaaacaaagtcttgcagtggcgtggaattttcaacgtccggttcatctaatacagacactggtaaagttactgggaccttggagaccaaatacaagtggtgtgagtatggtctgactttcacagaaaagtggaacactgataacactctgggaacagaaatcgcaattgaagaccagatttgtcaaggtttgaaactgacatttgatactaccttctcaccaaacacaggaaagaaaagtggtaaaatcaagtcttcttacaagagggagtgtataaaccttggttgtgatgttgactttgattttgctggacctgcaatccatggttcagctgtctttggttatgagggctggcttgctggctaccagatgacctttgacagtgccaaatcaaagctgacaaggaataactttgcagtgggctacaggactggggacttccagctacacactaatgtcaatgatgggacagaatttggaggatcaatttatcagaaagtttgtgaagatcttgacacttcagtaaaccttgcttggacatcaggtaccaactgcactcgttttggcattgcagctaaatatcagttggatcccactgcttccatttctgcaaaagtcaacaactctagcttaattggagtaggctatactcagactctgaggcctggtgtgaagcttacactctctgctctggtagatgggaagagcattaatgctggaggccacaaggttgggctcgccctggagttggaggcttaatccagctgaaagaaacctttgggaatggatatcagaagatttggccttaatatatttccattgtgaccagcagcaggcttttttcccccaagaagatgatcaaaacaaaggatgatctcaacaagagctgtattttaagtatttagacagttctttgttagctggtttctagttggttatctagttaccaatgctgcagtcctgcagtcacctatacattatttaaatgtatttaactgttaaatgcgctacccaccaataatgaaatagacctttatgaaaactgtgcaattgtgtgcatgtttgtttttatgttcctttagaaaacattgactgttaccattgaatgagatggatcagtggatattaagatgaggttacaaattttgttaagttcagccattattacttttggtatcccagaacatgacaaattatgaataaaacaagtatacataa

SEQ ID NO: 301601 - DNA, 1081 bp, Homo sapiens
gttgtggttcacctttttatatgtgtgtgtatatatacttatatataaaatacgtaaccaaaaggctgtttgagaacctcttgcatgtttaatacagtgtgataattccactgaatggatattctgtggttcattttaccaatccctgtatgggtatgggttggggaaaaaaacctgttaaaacttgcaagttttcagtggaacactaaagacccacttgagctgtggttttttatttaaatgtaatgctacaaatcagcctgtgccttagacattattacattgtctattctagatctactaatttaaaatatcttatagcaatgatgggacagaatttggaggatcaatttatcagaaagtttgtgaagatcttgacacttcagtaaaccttgcttggacatcaggtaccaactgcactcgttttggcattgcagctaaatatcagttggatcccactgcttccatttctgcaaaagtcaacaactctagcttaattggagtaggctatactcagactctgaggcctggtgtgaagcttacactctctgctctggtagatgggaagagcattaatgctggaggccacaaggttgggctcgccctggagttggaggcttaatccagctgaaagaaacctttgggaatggatatcagaagatttggccttaatatatttccattgtgaccagcagcaggcttttttcccccaagaagatgatcaaaacaaaggatgatctcaacaagagctgtattttaagtatttagacagttctttgttagctggtttctagttggttatctagttaccaatgctgcagtcctgcagtcacctatacattatttaaatgtatttaactgttaaatgcgctacccaccaataatgaaatagacctttatgaaaactgtgcaattgtgtgcatgtttgtttttatgttcctttagaaaacattgactgttaccattgaatgagatggatcagtggatattaagatgaggttacaaattttgttaagttcagccattattacttttggtatcccagaacatgacaaattatgaataaaacaagtatacataa

SEQ ID NO: 301602 - DNA, 832 bp, Homo sapiens
  misc_feature (688)..(688): n is a, c, g, or t
  misc_feature (716)..(716): n is a, c, g, or t
  misc_feature (736)..(736): n is a, c, g, or t
  misc_feature (743)..(743): n is a, c, g, or t
  misc_feature (772)..(772): n is a, c, g, or t
  misc_feature (781)..(781): n is a, c, g, or t
  misc_feature (785)..(785): n is a, c, g, or t
  misc_feature (787)..(787): n is a, c, g, or t
ggcagtcccaaaaagcctctcaggcacacaacccagcacagcaaggcagtcacaccaagattcccctcttcccgcggcctcgccatggcgacccacggacagacttgcgcgcgtccaatgtgtattcctccatcatatgctgaccttggcaaagctgccagagatattttcaacaaaggatttggttttgggttggtgaaactggatgtgaaaacaaagtcttgcagtggcgtggaattttcaacgtccggttcatctaatacagacactggtaaagttactgggaccttggagaccaaatacaagtggtgtgagtatggtctgactttcacagaaaagtggaacactgataacactctgggaacagaaatcgcaattgaagaccagatttgtcaaggtttgaaactgacatttgatactaccttctcaccaaacacaggaaagaaaagtggtaaaatcaagtcttcttacaagagggagtgtataaaccttggttgtgatgttgactttgattttgctggacctgcaatccatggttcagctgtctttggttatgagggctggcttgctggctaccagatgacctttgacagtgccaaatcaaagctgacaaggaataactttgcagtgggctacaggactggggacttccagctacacactaatgtccatgctggggccgcacttngggggtcacttttccgcacagttgtggnagatcttgcccttcgtaacntgcttgnctcggtccctggcctcgtttggctgcgcnaaatcgtgntccngntcctttgggagcggcctgcttgggggggtccccccgggggggccc

SEQ ID NO: 301603 - DNA, 1205 bp, Homo sapiens
gtgattttgaaacctaaagaaaagttggaagaatggtacaatgaacatcatatgtccttaccttgcattgaccaattattaacaatttattaacaattattaacatttactacatttattttatgtctgaaacttcacatacttttaaaaaaatgtatgttttgcagacatacagacatggcagcccctagcatgtgtatcctaagagtaagacatttttctttataagcacaataccattgtcgcatctaagaaaactaacattaatgtaataccaaatacatattcagatttacccccgttcccaaatgtgtctttattgtaggttttcctttctaggatcgaattatgattatgtctttagtctcttttcatcgggatagtatactcaacattatagtatattctagaacactttgaagttgttattaaaacatttctctgtgacttggtgccttagctagaatggtaacccagttcttctggtgtctcagatacttccaagcgccctctggtggccagcactagtaggtcagctgacaggctgaggaagtgacaggcaggctctggggatgactgtgaaagaaggcccagactgagtgacgtgccaggtacatcacggttttttgtttttgtgtttttttgtcttaataggtgtgaagcttacactctctgctctggtagatgggaagagcattaatgctggaggccacaaggttgggctcgccctggagttggaggcttaatccagctgaaagaaacctttgggaatggatatcagaagatttggccttaatatatttccattgtgaccagcagcaggcttttttcccccaagaagatgatcaaaacaaaggatgatctcaacaagagctgtattttaagtatttagacagttctttgttagctggtttctagttggttatctagttaccaatgctgcagtcctgcagtcacctatacattatttaaatgtatttaactgttaaatgcgctacccaccaataatgaaatagacctttatgaaaactgtgcaattgtgtgcatgtttgtttttatgttcctttagaaaacattgactgttaccattgaatgagatggatcagtggatattaagatgaggttacaaattttgttaagttcagccattattacttttggtatcccagaacatgacaaattatgaataaaacaagtatacataa

SEQ ID NO: 301604 - DNA, 715 bp, Homo sapiens
  misc_feature (699)..(699): n is a, c, g, or t
cccaccgacggacggaggcagcccacctgcaggaccggggcgctgtcggtccacgtggccgctctggagcagattcccctcttcccgcggcctcgccatggcgacccacggacagacttgcgcgcgtccaatgtgtattcctccatcatatgctgaccttggcaaagctgccagagatattttcaacaaaggatttggttttgggttggtgaaactggatgtgaaaacaaagtcttgcagtggcgtggaattttcaacgtccggttcatctaatacagacactggtaaagttactgggaccttggagaccaaatacaagtggtgtgagtatggtctgactttcacagaaaagtggaacactgataacactctgggaacagaaatcgcaattgaagaccagatttgtcaaggtttgaaactgacatttgatactaccttctcaccaaacacaggaaagaaaagtggtaaaatcaagtcttcttacaagagggagtgtataaaccttggttgtgatgttgactttgattttgctggacctgcaatccatggttcagctgtctttggttatgagggctggcttgctggctaccagatgacctttgacagtgccaaatcaaagctgacaaggaataactttgcagtgggctacaggactggggacttccagctacacactaatgtcaatgatgggacgcgccntcggggtaccgagctc

SEQ ID NO: 301605 - DNA, 952 bp, Homo sapiens
  misc_feature (880)..(882): n is a, c, g, or t
  misc_feature (889)..(889): n is a, c, g, or t
  misc_feature (898)..(898): n is a, c, g, or t
  misc_feature (901)..(901): n is a, c, g, or t
agcgggggggcagcggcggggtcctgtctgggagaggacagggttgcggcgggcggaacggtgtctccttcacttcgccctccagctgctgcagctgcagcccgaccgcgagcgtgccaagcggcttcagcagctagcggagcggtggcggcggcccccctcaggacaccaccagattcccctcttcccgcggcctcgccatggcgacccacggacagacttgcgcgcgtccaatgtgtattcctccatcatatgctgaccttggcaaagctgccagagatattttcaacaaaggatttggttttgggttggtgaaactggatgtgaaaacaaagtcttgcagtggcgtggaattttcaacgtccggttcatctaatacagacactggtaaagttactgggaccttggagaccaaatacaagtggtgtgagtatggtctgactttcacagaaaagtggaacactgataacactctgggaacagaaatcgcaattgaagaccaggtaacattttgaaaattttagtattaattttattaatttatttttgtatttcaaaaaaagaaaacaaattacttttctttcaaaatagatttgtcaaggtttgaaactgacatttgatactaccttctcaccaaacacaggaaagaaaagtggtaaaatcaagtcttcttacaagagggagtgtataaaccttggttgtgatgttgactttgattttgctggacctgcaatccatggttcagctgtctttggttatgagggctggcttgctggctaccagatgacctttgacagtgccaaatcaaagctgacaaggaataactttgcagtgggctacaggactggggacttccagctacacactaatgtcatgatgnnncccaaanttggaggancantatccgaaggttgcgaaaacctaccttcagtaacctggttggacttcggtc

SEQ ID NO: 301606 - DNA, 1032 bp, Homo sapiens
gtgattttgaaacctaaagaaaagttggaagaatggtacaatgaacatcatatgtccttaccttgcattgaccaattattaacaatttattaacaattattaacatttactacatttattttatgtctgaaacttcacatacttttaaaaaaatgtatgttttgcagacatacagacatggcagcccctagcatgtgtatcctaagagtaagacatttttctttataagcacaataccattgtcgcatctaagaaaactaacattaatgtaataccaaatacatattcagatttacccccgttcccaaatgtgtctttattgtaggttttcctttctaggatcgaattatgattatgtctttagtctcttttcatcgggatagtatactcaacattatagtatattctagaacactttgaagttgttattaaaacatttctctgtgacttggtgccttagctagaatggtaacccagttcttctggtgtctcagatacttccaagcgccctctggtggccagcactagtaggtcagctgacaggctgaggaagtgacaggcaggctctggggatgactgtgaaagaaggcccagactgagtgacgtgccaggtacatcacggttttttgtttttgtgtttttttgtcttaataggtgtgaagcttacactctctgctctggtagatgggaagagcattaatgctggaggccacaaggttgggctcgccctggagttggaggcttaatccagctgaaagaaacctttgggaatggatatcagaagatttggccttaatatatttccattgtgaccagcagcaggcttttttcccccaagaagatgatcaaaacaaaggatgatctcaacaagagctgtattttaagtatttagacagttctttgttagctggtttctagttggttatctagttaccaatgctgcagtcctgcagtcacctatacattatttaaatgtatttaactgttaaatgcgctacccaccaataatgaaatagacctttatgaaaactg

SEQ ID NO: 301607 - DNA, 469 bp, Homo sapiens
  misc_feature (23)..(23): n is a, c, g, or t
  misc_feature (25)..(25): n is a, c, g, or t
  misc_feature (27)..(27): n is a, c, g, or t
  misc_feature (58)..(58): n is a, c, g, or t
  misc_feature (79)..(79): n is a, c, g, or t
  misc_feature (85)..(85): n is a, c, g, or t
tggcttgcgggtttggttcttgncngngactcggtttaagaaacacactcgggcttgnatggaataccctatactcagnatctgnagcctggtgtgaagcttacactctctgctctggtagatgggaagagcattaatgctggaggccacaaggttgggctcgccctggagttggaggcttaatccagctgaaagaaacctttgggaatggatatcagaagatttggccttaatatatttccattgtgaccagcagcaggcttttttcccccaagaagatgatcaaaacaaaggatgatctcaacaagagctgtattttaagtatttagacagttctttgttagctggtttctagttggttatctagttaccaatgctgcagtcctgcagtcacctatacattatttaaatgtatttaactgttaaatgcgctacccaccaataatgaaatagacctttatgaaaactg

SEQ ID NO: 301608 - DNA, 571 bp, Homo sapiens
gttgtggttcacctttttatatgtgtgtgtatatatacttatatataaaatacgtaaccaaaaggctgtttgagaacctcttgcatgtttaatacagtgtgataattccactgaatggatattctgtggttcattttaccaatccctgtatgggtatgggttggggaaaaaaacctgttaaaacttgcaagttttcagtggaacactaaagacccacttgagctgtggttttttatttaaatgtaatgctacaaatcagcctgtgccttagacattattacattgtctattctagatctactaatttaaaatatcttatagcaatgatgggacagaatttggaggatcaatttatcagaaagtttgtgaagatcttgacacttcagtaaaccttgcttggacatcaggtaccaactgcactcgttttggcattgcagctaaatatcagttggatcccactgcttccatttctgtgagtacttttgtggacttagaatgggggttttggttgtgggaatgagtctttgggtatactgaattatgttgaaaatttgacctgatttcacacagt

SEQ ID NO: 301609 - DNA, 615 bp, Homo sapiens
  misc_feature (558)..(558): n is a, c, g, or t
gtatcaacgcagagtgcccattatggccgggtgccagagatattttcaacaaaggatttggttttgggttggtgaaactggatgtgaaaacaaagtcttgcagtggcgtggaattttcaacgtccggttcatctaatacagacactggtaaagttactgggaccttggagaccaaatacaagtggtgtgagtatggtctgactttcacagaaaagtggaacactgataacactctgggaacagaaatcgcaattgaagaccagatttgtcaaggtttgaaactgacatttgatactaccttctcaccaaacacaggaaagaaaagtggtaaaatcaagtcttcttacaagagggagtgtataaaccttggttgtgatgttgactttgattttgctggacctgcaatccatggttcagctgtctttggttatgagggctggcttgctggctaccagatgacctttgacagtgccaaatcaaagctgacaaggaataactttgcagtgggctacaggactggggacttccagctacacactaatgtcaatgaatggggancagaaattgggagggatccattttatccagaaaagttttgtggaaagatcctttgaa

SEQ ID NO: 301610 - DNA, 704 bp, Homo sapiens
ttgttgttgcactaacttgggcaactaatgtgtttctaacaggcttttgtgactgattgtttgttctgcaaagcagttttcctagatggctgtccagttgcttcatgtgtccttgtcttgtagttcattgagctgacttttttactccctgttattgtattgctgatttttactccctggtcatactgcagtttatttaagtctgttttgtgctctcttgtgcagaagtgtgtgtaaatttttcccaatgacatcagtttgttctttttccagaaagaaaagtggtaaaatcaagtcttcttacaagagggagtgtataaaccttggttgtgatgttgactttgattttgctggacctgcaatccatggttcagctgtctttggttatgagggctggcttgctggctaccagatgacctttgacagtgccaaatcaaagctgacaaggaataactttgcagtgggctacaggactggggacttccagctacacactaatgtgtaagtatttctttcataggatactgtgatgtgggccctcagaggatgattttgatgtctgtcatcttattgatctgggtgcaccctaaaggatttctcataacatttaaaaacaaaatcattcttggtcatttctagggtgccccttgaaagtttatagtagaagactgttagtctgacctttggtgctgagagagtaaatg

SEQ ID NO: 301611 - DNA, 1544 bp, Homo sapiens
agcgggggggcagcggcggggtcctgtctgggagaggacagggttgcggcgggcggaacggtgtctccttcacttcgccctccagctgctgcagctgcagcccgaccgcgagcgtgccaagcggcttcagcagctagcggagcggtggcggcggcccccctcaggacaccaccagattcccctcttcccgcggcctcgccatggcgacccacggacagacttgcgcgcgtccaatgtgtattcctccatcatatgctgaccttggcaaagctgccagagatattttcaacaaaggatttggttttgggttggtgaaactggatgtgaaaacaaagtcttgcagtggcgtggaattttcaacgtccggttcatctaatacagacactggtaaagttactgggaccttggagaccaaatacaagtggtgtgagtatggtctgactttcacagaaaagtggaacactgataacactctgggaacagaaatcgcaattgaagaccagatttgtcaaggtttgaaactgacatttgatactaccttctcaccaaacacaggaaagaaaagtggtaaaatcaagtcttcttacaagagggagtgtataaaccttggttgtgatgttgactttgattttgctggacctgcaatccatggttcagctgtctttggttatgagggctggcttgctggctaccagatgacctttgacagtgccaaatcaaagctgacaaggaataactttgcagtgggctacaggactggggacttccagctacacactaatgtcaatgatgggacagaatttggaggatcaatttatcagaaagtttgtgaagatcttgacacttcagtaaaccttgcttggacatcaggtaccaactgcactcgttttggcattgcagctaaatatcagttggatcccactgcttccatttctgcaaaagtcaacaactctagcttaattggagtaggctatactcagactctgaggcctggtgtgaagcttacactctctgctctggtagatgggaagagcattaatgctggaggccacaaggttgggctcgccctggagttggaggcttaatccagctgaaagaaacctttgggaatggatatcagaagatttggccttaatatatttccattgtgaccagcagcaggcttttttcccccaagaagatgatcaaaacaaaggatgatctcaacaagagctgtattttaagtatttagacagttctttgttagctggtttctagttggttatctagttaccaatgctgcagtcctgcagtcacctatacattatttaaatgtatttaactgttaaatgcgctacccaccaataatgaaatagacctttatgaaaactgtgcaattgtgtgcatgtttgtttttatgttcctttagaaaacattgactgttaccattgaatgagatggatcagtggatattaagatgaggttacaaattttgttaagttcagccattattacttttggtatcccagaacatgacaaattatgaataaaacaagtatacataa

SEQ ID NO: 301612 - DNA, 1838 bp, Homo sapiens
  misc_feature (1838)..(1838): n is a, c, g, or t
agcgggggggcagcggcggggtcctgtctgggagaggacagggttgcggcgggcggaacggtgtctccttcacttcgccctccagctgctgcagctgcagcccgaccgcgagcgtgccaagcggcttcagcagctagcggagcggtggcggcggcccccctcaggacaccaccagattcccctcttcccgcggcctcgccatggcgacccacggacagacttgcgcgcgtccaatgtgtattcctccatcatatgctgaccttggcaaagctgccagagatattttcaacaaaggatttggttttgggttggtgaaactggatgtgaaaacaaagtcttgcagtggcgtggaattttcaacgtccggttcatctaatacagacactggtaaagttactgggaccttggagaccaaatacaagtggtgtgagtatggtctgactttcacagaaaagtggaacactgataacactctgggaacagaaatcgcaattgaagaccagatttgtcaaggtttgaaactgacatttgatactaccttctcaccaaacacaggaaagaaaagtggtaaaatcaagtcttcttacaagagggagtgtataaaccttggttgtgatgttgactttgattttgctggacctgcaatccatggttcagctgtctttggttatgagggctggcttgctggctaccagatgacctttgacagtgccaaatcaaagctgacaaggaataactttgcagtgggctacaggactggggacttccagctacacactaatgtcaatgatgggacagaatttggaggatcaatttatcagaaagtttgtgaagatcttgacacttcagtaaaccttgcttggacatcaggtaccaactgcactcgttttggcattgcagctaaatatcagttggatcccactgcttccatttctgcaaaagtcaacaactctagcttaattggagtaggctatactcagactctgaggcctggtgtgaagcttacactctctgctctggtagatgggaagagcattaatgctggaggccacaaggttgggctcgccctggagttggaggcttaatccagctgaaagaaacctttgggaatggatatcagaagatttggccttaatatatttccattgtgaccagcagcaggcttttttcccccaagaagatgatcaaaacaaaggatgatctcaacaagagctgtattttaagtatttagacagttctttgttagctggtttctagttggttatctagttaccaatgctgcagtcctgcagtcacctatacattatttaaatgtatttaactgttaaatgcgctacccaccaataatgaaatagacctttatgaaaactgtgcaattgtgtgcatgtttgtttttatgttcctttagaaaacattgactgttaccattgaatgagatggatcagtggatattaagatgaggttacaaattttgttaagttcagccattattacttttggtatcccagaacatgacaaattatgaataaaacaagtatacataaaaaaaaaggcgtgaggaggatgaagaggtgcggactggacaagaggaccccatggcccttccccaagcctccttcccctctgttcattgaccagccacagcccccttgctggccctcactcccactttatttctttattatttatttatttaattatctgagatggagtttcactcttgatgccctggctggagtgcaatggcgtgatcttggctcactgcaacctccacctccctggtgcaagtgattcttctgccttagcctcccgagtagctgagtacaggcatgtgcccn

SEQ ID NO: 301613 - DNA, 1371 bp, Homo sapiens
agcgggggggcagcggcggggtcctgtctgggagaggacagggttgcggcgggcggaacggtgtctccttcacttcgccctccagctgctgcagctgcagcccgaccgcgagcgtgccaagcggcttcagcagctagcggagcggtggcggcggcccccctcaggacaccaccagattcccctcttcccgcggcctcgccatggcgacccacggacagacttgcgcgcgtccaatgtgtattcctccatcatatgctgaccttggcaaagctgccagagatattttcaacaaaggatttggttttgggttggtgaaactggatgtgaaaacaaagtcttgcagtggcgtggaattttcaacgtccggttcatctaatacagacactggtaaagttactgggaccttggagaccaaatacaagtggtgtgagtatggtctgactttcacagaaaagtggaacactgataacactctgggaacagaaatcgcaattgaagaccagatttgtcaaggtttgaaactgacatttgatactaccttctcaccaaacacaggaaagaaaagtggtaaaatcaagtcttcttacaagagggagtgtataaaccttggttgtgatgttgactttgattttgctggacctgcaatccatggttcagctgtctttggttatgagggctggcttgctggctaccagatgacctttgacagtgccaaatcaaagctgacaaggaataactttgcagtgggctacaggactggggacttccagctacacactaatgtcaatgatgggacagaatttggaggatcaatttatcagaaagtttgtgaagatcttgacacttcagtaaaccttgcttggacatcaggtaccaactgcactcgttttggcattgcagctaaatatcagttggatcccactgcttccatttctgcaaaagtcaacaactctagcttaattggagtaggctatactcagactctgaggcctggtgtgaagcttacactctctgctctggtagatgggaagagcattaatgctggaggccacaaggttgggctcgccctggagttggaggcttaatccagctgaaagaaacctttgggaatggatatcagaagatttggccttaatatatttccattgtgaccagcagcaggcttttttcccccaagaagatgatcaaaacaaaggatgatctcaacaagagctgtattttaagtatttagacagttctttgttagctggtttctagttggttatctagttaccaatgctgcagtcctgcagtcacctatacattatttaaatgtatttaactgttaaatgcgctacccaccaataatgaaatagacctttatgaaaactg

SEQ ID NO: 301614 - DNA, 1433 bp, Homo sapiens
  misc_feature (1402)..(1402): n is a, c, g, or t
  misc_feature (1405)..(1405): n is a, c, g, or t
  misc_feature (1408)..(1408): n is a, c, g, or t
  misc_feature (1418)..(1418): n is a, c, g, or t
  misc_feature (1425)..(1425): n is a, c, g, or t
agcgggggggcagcggcggggtcctgtctgggagaggacagggttgcggcgggcggaacggtgtctccttcacttcgccctccagctgctgcagctgcagcccgaccgcgagcgtgccaagcggcttcagcagctagcggagcggtggcggcggcccccctcaggacaccaccagattcccctcttcccgcggcctcgccatggcgacccacggacagacttgcgcgcgtccaatgtgtattcctccatcatatgctgaccttggcaaagctgccagagatattttcaacaaaggatttggttttgggttggtgaaactggatgtgaaaacaaagtcttgcagtggcgtggaattttcaacgtccggttcatctaatacagacactggtaaagttactgggaccttggagaccaaatacaagtggtgtgagtatggtctgactttcacagaaaagtggaacactgataacactctgggaacagaaatcgcaattgaagaccagatttgtcaaggtttgaaactgacatttgatactaccttctcaccaaacacaggaaagaaaagtggtaaaatcaagtcttcttacaagagggagtgtataaaccttggttgtgatgttgactttgattttgctggacctgcaatccatggttcagctgtctttggttatgagggctggcttgctggctaccagatgacctttgacagtgccaaatcaaagctgacaaggaataactttgcagtgggctacaggactggggacttccagctacacactaatgtcaatgatgggacagaatttggaggatcaatttatcagaaagtttgtgaagatcttgacacttcagtaaaccttgcttggacatcaggtaccaactgcactcgttttggcattgcagctaaatatcagttggatcccactgcttccatttctgcaaaagtcaacaactctagcttaattggagtaggctatactcagactctgaggcctggtgtgaagcttacactctctgctctggtagatgggaagagcattaatgctggaggccacaaggttgggctcgccctggagttggaggcttaatccagctgaaagaaacctttgggaatggatatcagaagatttggccttaatatatttccattgtgaccagcagcaggcttttttcccccaagaagatgatcaaaacaaaggatgatctcaacaagagctgtattttaagtatttagacagttctttgttagctggtttctagttggttatctagttaccaatgctgcagtcctgcagtcacctatacattatttaaatgtatttaactgttaaatgcgctacccaccaataatgaaatagacctttatgaaaactgaaaaaaaaaacaaaaaaaaaaaaaaaaaaanttntgngggcgcgccngggcccngagaaaaa

SEQ ID NO: 301615 - DNA, 1406 bp, Homo sapiens
  misc_feature (1375)..(1375): n is a, c, g, or t
  misc_feature (1378)..(1378): n is a, c, g, or t
  misc_feature (1381)..(1381): n is a, c, g, or t
  misc_feature (1391)..(1391): n is a, c, g, or t
  misc_feature (1398)..(1398): n is a, c, g, or t
agcgggggggcagcggcggggtcctgtctgggagaggacagggttgcggcgggcggaacggtgtctccttcacttcgccctccagctgctgcagctgcagcccgaccgcgagcgtgccaagcggcttcagcagctagcggagcggtggcggcggcccccctcaggacaccaccagattcccctcttcccgcggcctcgccatggcgacccacggacagacttgcgcgcgtccaatgtgtattcctccatcatatgctgaccttggcaaagctgccagagatattttcaacaaaggatttggttttgggttggtgaaactggatgtgaaaacaaagtcttgcagtggcgtggaattttcaacgtccggttcatctaatacagacactggtaaagttactgggaccttggagaccaaatacaagtggtgtgagtatggtctgactttcacagaaaagtggaacactgataacactctgggaacagaaatcgcaattgaagaccagatttgtcaaggtttgaaactgacatttgatactaccttctcaccaaacacaggaaagaaaagtggtaaaatcaagtcttcttacaagagggagtgtataaaccttggttgtgatgttgactttgattttgctggacctgcaatccatggttcagctgtctttggttatgagggctggcttgctggctaccagatgacctttgacagtgccaaatcaaagctgacaaggaataactttgcagtgggctacaggactggggacttccagctacacactaatgtcaatgatgggacagaatttggaggatcaatttatcagaaagtttgtgaagatcttgacacttcagtaaaccttgcttggacatcaggtaccaactgcactcgttttggcattgcagctaaatatcagttggatcccactgcttccatttctgcaaaagtcaacaactctagcttaattggagtaggctatactcagactctgaggcctggtgtgaagcttacactctctgctctggtagatgggaagagcattaatgctggaggccacaaggttgggctcgccctggagttggaggcttaatccagctgaaagaaacctttgggaatggatatcagaagatttggccttaatatatttccattgtgaccagcagcaggcttttttcccccaagaagatgatcaaaacaaaggatgatctcaacaagagctgtattttaagtatttagacagttctttgttagctggtttctagttggttatctagttaccaatgctgcagtcctgcagtcacctatacattatttaaatgtatttaactgttaaatgcgctacccaccaaaaaaaaaaaacaaaaaaaaaaaaaaaaaaanttntgngggcgcgccngggcccngagaaaaa

SEQ ID NO: 301616 - DNA, 1505 bp, Homo sapiens
aaacgccaggctggtactggtctcgagttctataggatatcgcaggctgctgcagctgcagcccgaccgcgagcgtgccaagcggcttcagcagctagcggagcggtggcggcggcccccctcaggacaccaccagattcccctcttcccgcggcctcgccatggcgacccacggacagacttgcgcgcgtccaatgtgtattcctccatcatatgctgaccttggcaaagctgccagagatattttcaacaaaggatttggttttgggttggtgaaactggatgtgaaaacaaagtcttgcagtggcgtggaattttcaacgtccggttcatctaatacagacactggtaaagttactgggaccttggagaccaaatacaagtggtgtgagtatggtctgactttcacagaaaagtggaacactgataacactctgggaacagaaatcgcaattgaagaccagatttgtcaaggtttgaaactgacatttgatactaccttctcaccaaacacaggaaagaaaagtggtaaaatcaagtcttcttacaagagggagtgtataaaccttggttgtgatgttgactttgattttgctggacctgcaatccatggttcagctgtctttggttatgagggctggcttgctggctaccagatgacctttgacagtgccaaatcaaagctgacaaggaataactttgcagtgggctacaggactggggacttccagctacacactaatgtcaatgatgggacagaatttggaggatcaatttatcagaaagtttgtgaagatcttgacacttcagtaaaccttgcttggacatcaggtaccaactgcactcgttttggcattgcagctaaatatcagttggatcccactgcttccatttctgcaaaagtcaacaactctagcttaattggagtaggctatactcagactctgaggcctggtgtgaagcttacactctctgctctggtagatgggaagagcattaatgctggaggccacaaggttgggctcgccctggagttggaggcttaatccagctgaaagaaacctttgggaatggatatcagaagatttggccttaatatatttccattgtgaccagcagcaggcttttttcccccaagaagatgatcaaaacaaaggatgatctcaacaagagctgtattttaagtatttagacagttctttgttagctggtttctagttggttatctagttaccaatgctgcagtcctgcagtcacctatacattatttaaatgtatttaactgttaaatgcgctacccaccaataatgaaatagacctttatgaaaactgtgcaattgtgtgcatgtttgtttttatgttcctttagaaaacattgactgttaccattgaatgagatggatcagtggatattaagatgaggttacaaattttgttaagttcagccattattacttttggtatcccagaacatgacaaattatgaataaaacaagtatacataa

SEQ ID NO: 301617 - DNA, 1487 bp, Homo sapiens
gaccacgcgtcgcgacccacgcgtcgcgctgctgcagctgcagcccgaccgcgagcgtgccaagcggcttcagcagctagcggagcggtggcggcggcccccctcaggacaccaccagattcccctcttcccgcggcctcgccatggcgacccacggacagacttgcgcgcgtccaatgtgtattcctccatcatatgctgaccttggcaaagctgccagagatattttcaacaaaggatttggttttgggttggtgaaactggatgtgaaaacaaagtcttgcagtggcgtggaattttcaacgtccggttcatctaatacagacactggtaaagttactgggaccttggagaccaaatacaagtggtgtgagtatggtctgactttcacagaaaagtggaacactgataacactctgggaacagaaatcgcaattgaagaccagatttgtcaaggtttgaaactgacatttgatactaccttctcaccaaacacaggaaagaaaagtggtaaaatcaagtcttcttacaagagggagtgtataaaccttggttgtgatgttgactttgattttgctggacctgcaatccatggttcagctgtctttggttatgagggctggcttgctggctaccagatgacctttgacagtgccaaatcaaagctgacaaggaataactttgcagtgggctacaggactggggacttccagctacacactaatgtcaatgatgggacagaatttggaggatcaatttatcagaaagtttgtgaagatcttgacacttcagtaaaccttgcttggacatcaggtaccaactgcactcgttttggcattgcagctaaatatcagttggatcccactgcttccatttctgcaaaagtcaacaactctagcttaattggagtaggctatactcagactctgaggcctggtgtgaagcttacactctctgctctggtagatgggaagagcattaatgctggaggccacaaggttgggctcgccctggagttggaggcttaatccagctgaaagaaacctttgggaatggatatcagaagatttggccttaatatatttccattgtgaccagcagcaggcttttttcccccaagaagatgatcaaaacaaaggatgatctcaacaagagctgtattttaagtatttagacagttctttgttagctggtttctagttggttatctagttaccaatgctgcagtcctgcagtcacctatacattatttaaatgtatttaactgttaaatgcgctacccaccaataatgaaatagacctttatgaaaactgtgcaattgtgtgcatgtttgtttttatgttcctttagaaaacattgactgttaccattgaatgagatggatcagtggatattaagatgaggttacaaattttgttaagttcagccattattacttttggtatcccagaacatgacaaattatgaataaaacaagtatacataa

SEQ ID NO: 301618 - DNA, 1495 bp, Homo sapiens
  misc_feature (23)..(23): n is a, c, g, or t
ttcccccaaaaggttccattagngccttttggcaggctgctgcagctgcagcccgaccgcgagcgtgccaagcggcttcagcagctagcggagcggtggcggcggcccccctcaggacaccaccagattcccctcttcccgcggcctcgccatggcgacccacggacagacttgcgcgcgtccaatgtgtattcctccatcatatgctgaccttggcaaagctgccagagatattttcaacaaaggatttggttttgggttggtgaaactggatgtgaaaacaaagtcttgcagtggcgtggaattttcaacgtccggttcatctaatacagacactggtaaagttactgggaccttggagaccaaatacaagtggtgtgagtatggtctgactttcacagaaaagtggaacactgataacactctgggaacagaaatcgcaattgaagaccagatttgtcaaggtttgaaactgacatttgatactaccttctcaccaaacacaggaaagaaaagtggtaaaatcaagtcttcttacaagagggagtgtataaaccttggttgtgatgttgactttgattttgctggacctgcaatccatggttcagctgtctttggttatgagggctggcttgctggctaccagatgacctttgacagtgccaaatcaaagctgacaaggaataactttgcagtgggctacaggactggggacttccagctacacactaatgtcaatgatgggacagaatttggaggatcaatttatcagaaagtttgtgaagatcttgacacttcagtaaaccttgcttggacatcaggtaccaactgcactcgttttggcattgcagctaaatatcagttggatcccactgcttccatttctgcaaaagtcaacaactctagcttaattggagtaggctatactcagactctgaggcctggtgtgaagcttacactctctgctctggtagatgggaagagcattaatgctggaggccacaaggttgggctcgccctggagttggaggcttaatccagctgaaagaaacctttgggaatggatatcagaagatttggccttaatatatttccattgtgaccagcagcaggcttttttcccccaagaagatgatcaaaacaaaggatgatctcaacaagagctgtattttaagtatttagacagttctttgttagctggtttctagttggttatctagttaccaatgctgcagtcctgcagtcacctatacattatttaaatgtatttaactgttaaatgcgctacccaccaataatgaaatagacctttatgaaaactgtgcaattgtgtgcatgtttgtttttatgttcctttagaaaacattgactgttaccattgaatgagatggatcagtggatattaagatgaggttacaaattttgttaagttcagccattattacttttggtatcccagaacatgacaaattatgaataaaacaagtatacataa

SEQ ID NO: 301619 - DNA, 1486 bp, Homo sapiens
agcgggggggcagcggcggggtcctgtctgggagaggacagggttgcggcgggcggaacggtgtctccttcacttcgccctccagctgctgcagctgcagcccgaccgcgagcgtgccaagcggcttcagcagctagcggagcggtggcggcggcccccctcaggacaccaccagattcccctcttcccgcggcctcgccatggcgacccacggacagacttgcgcgcgtccaatgtgtattcctccatcatatgctgaccttggcaaagctgccagagatattttcaacaaaggatttggttttgggttggtgaaactggatgtgaaaacaaagtcttgcagtggcgtggaattttcaacgtccggttcatctaatacagacactggtaaagttactgggaccttggagaccaaatacaagtggtgtgagtatggtctgactttcacagaaaagtggaacactgataacactctgggaacagaaatcgcaattgaagaccagatttgtcaaggtttgaaactgacatttgatactaccttctcaccaaacacaggaaagaaaagtggtaaaatcaagtcttcttacaagagggagtgtataaaccttggttgtgatgttgactttgattttgctggacctgcaatccatggttcagctgtctttggttatgagggctggcttgctggctaccagatgacctttgacagtgccaaatcaaagctgacaaggaataactttgcagtgggctacaggactggggacttccagctacacactaatgtcaatgatgggacagaatttggaggatcaatttatcagaaagtttgtgaagatcttgacacttcagtaaaccttgcttggacatcaggtaccaactgcactcgttttggcattgcagctaaatatcagttggatcccactgcttccatttctgtgtgaagcttacactctctgctctggtagatgggaagagcattaatgctggaggccacaaggttgggctcgccctggagttggaggcttaatccagctgaaagaaacctttgggaatggatatcagaagatttggccttaatatatttccattgtgaccagcagcaggcttttttcccccaagaagatgatcaaaacaaaggatgatctcaacaagagctgtattttaagtatttagacagttctttgttagctggtttctagttggttatctagttaccaatgctgcagtcctgcagtcacctatacattatttaaatgtatttaactgttaaatgcgctacccaccaataatgaaatagacctttatgaaaactgtgcaattgtgtgcatgtttgtttttatgttcctttagaaaacattgactgttaccattgaatgagatggatcagtggatattaagatgaggttacaaattttgttaagttcagccattattacttttggtatcccagaacatgacaaattatgaataaaacaagtatacataa

SEQ ID NO: 301620 - DNA, 1469 bp, Homo sapiens
taagatggccgcgctgccccgcggccctcgcccctctctgcccgggatctccctttggccctttgaccccagcttaccgcacttcttgtccctcccgcagattcccctcttcccgcggcctcgccatggcgacccacggacagacttgcgcgcgtccaatgtgtattcctccatcatatgctgaccttggcaaagctgccagagatattttcaacaaaggatttggttttgggttggtgaaactggatgtgaaaacaaagtcttgcagtggcgtggaattttcaacgtccggttcatctaatacagacactggtaaagttactgggaccttggagaccaaatacaagtggtgtgagtatggtctgactttcacagaaaagtggaacactgataacactctgggaacagaaatcgcaattgaagaccagatttgtcaaggtttgaaactgacatttgatactaccttctcaccaaacacaggaaagaaaagtggtaaaatcaagtcttcttacaagagggagtgtataaaccttggttgtgatgttgactttgattttgctggacctgcaatccatggttcagctgtctttggttatgagggctggcttgctggctaccagatgacctttgacagtgccaaatcaaagctgacaaggaataactttgcagtgggctacaggactggggacttccagctacacactaatgtcaatgatgggacagaatttggaggatcaatttatcagaaagtttgtgaagatcttgacacttcagtaaaccttgcttggacatcaggtaccaactgcactcgttttggcattgcagctaaatatcagttggatcccactgcttccatttctgcaaaagtcaacaactctagcttaattggagtaggctatactcagactctgaggcctggtgtgaagcttacactctctgctctggtagatgggaagagcattaatgctggaggccacaaggttgggctcgccctggagttggaggcttaatccagctgaaagaaacctttgggaatggatatcagaagatttggccttaatatatttccattgtgaccagcagcaggcttttttcccccaagaagatgatcaaaacaaaggatgatctcaacaagagctgtattttaagtatttagacagttctttgttagctggtttctagttggttatctagttaccaatgctgcagtcctgcagtcacctatacattatttaaatgtatttaactgttaaatgcgctacccaccaataatgaaatagacctttatgaaaactgtgcaattgtgtgcatgtttgtttttatgttcctttagaaaacattgactgttaccattgaatgagatggatcagtggatattaagatgaggttacaaattttgttaagttcagccattattacttttggtatcccagaacatgacaaattatgaataaaacaagtatacataa

SEQ ID NO: 301621 - DNA, 1428 bp, Homo sapiens
ggcagtcccaaaaagcctctcaggcacacaacccagcacagcaaggcagtcacaccaagattcccctcttcccgcggcctcgccatggcgacccacggacagacttgcgcgcgtccaatgtgtattcctccatcatatgctgaccttggcaaagctgccagagatattttcaacaaaggatttggttttgggttggtgaaactggatgtgaaaacaaagtcttgcagtggcgtggaattttcaacgtccggttcatctaatacagacactggtaaagttactgggaccttggagaccaaatacaagtggtgtgagtatggtctgactttcacagaaaagtggaacactgataacactctgggaacagaaatcgcaattgaagaccagatttgtcaaggtttgaaactgacatttgatactaccttctcaccaaacacaggaaagaaaagtggtaaaatcaagtcttcttacaagagggagtgtataaaccttggttgtgatgttgactttgattttgctggacctgcaatccatggttcagctgtctttggttatgagggctggcttgctggctaccagatgacctttgacagtgccaaatcaaagctgacaaggaataactttgcagtgggctacaggactggggacttccagctacacactaatgtcaatgatgggacagaatttggaggatcaatttatcagaaagtttgtgaagatcttgacacttcagtaaaccttgcttggacatcaggtaccaactgcactcgttttggcattgcagctaaatatcagttggatcccactgcttccatttctgcaaaagtcaacaactctagcttaattggagtaggctatactcagactctgaggcctggtgtgaagcttacactctctgctctggtagatgggaagagcattaatgctggaggccacaaggttgggctcgccctggagttggaggcttaatccagctgaaagaaacctttgggaatggatatcagaagatttggccttaatatatttccattgtgaccagcagcaggcttttttcccccaagaagatgatcaaaacaaaggatgatctcaacaagagctgtattttaagtatttagacagttctttgttagctggtttctagttggttatctagttaccaatgctgcagtcctgcagtcacctatacattatttaaatgtatttaactgttaaatgcgctacccaccaataatgaaatagacctttatgaaaactgtgcaattgtgtgcatgtttgtttttatgttcctttagaaaacattgactgttaccattgaatgagatggatcagtggatattaagatgaggttacaaattttgttaagttcagccattattacttttggtatcccagaacatgacaaattatgaataaaacaagtatacataa

SEQ ID NO: 301622 - DNA, 1414 bp, Homo sapiens
tggcacgaggataacttttaatggcccccctcaggacaccaccagattcccctcttcccgcggcctcgccatggcgacccacggacagacttgcgcgcgtccaatgtgtattcctccatcatatgctgaccttggcaaagctgccagagatattttcaacaaaggatttggttttgggttggtgaaactggatgtgaaaacaaagtcttgcagtggcgtggaattttcaacgtccggttcatctaatacagacactggtaaagttactgggaccttggagaccaaatacaagtggtgtgagtatggtctgactttcacagaaaagtggaacactgataacactctgggaacagaaatcgcaattgaagaccagatttgtcaaggtttgaaactgacatttgatactaccttctcaccaaacacaggaaagaaaagtggtaaaatcaagtcttcttacaagagggagtgtataaaccttggttgtgatgttgactttgattttgctggacctgcaatccatggttcagctgtctttggttatgagggctggcttgctggctaccagatgacctttgacagtgccaaatcaaagctgacaaggaataactttgcagtgggctacaggactggggacttccagctacacactaatgtcaatgatgggacagaatttggaggatcaatttatcagaaagtttgtgaagatcttgacacttcagtaaaccttgcttggacatcaggtaccaactgcactcgttttggcattgcagctaaatatcagttggatcccactgcttccatttctgcaaaagtcaacaactctagcttaattggagtaggctatactcagactctgaggcctggtgtgaagcttacactctctgctctggtagatgggaagagcattaatgctggaggccacaaggttgggctcgccctggagttggaggcttaatccagctgaaagaaacctttgggaatggatatcagaagatttggccttaatatatttccattgtgaccagcagcaggcttttttcccccaagaagatgatcaaaacaaaggatgatctcaacaagagctgtattttaagtatttagacagttctttgttagctggtttctagttggttatctagttaccaatgctgcagtcctgcagtcacctatacattatttaaatgtatttaactgttaaatgcgctacccaccaataatgaaatagacctttatgaaaactgtgcaattgtgtgcatgtttgtttttatgttcctttagaaaacattgactgttaccattgaatgagatggatcagtggatattaagatgaggttacaaattttgttaagttcagccattattacttttggtatcccagaacatgacaaattatgaataaaacaagtatacataa

SEQ ID NO: 301623 - DNA, 1269 bp, Homo sapiens
agcgggggggcagcggcggggtcctgtctgggagaggacagggttgcggcgggcggaacggtgtctccttcacttcgccctccagctgctgcagctgcagcccgaccgcgagcgtgccaagcggcttcagcagctagcggagcggtggcggcggcccccctcaggacaccaccagattcccctcttcccgcggcctcgccatggcgacccacggacagacttgcgcgcgtccaatgtgtattcctccatcatatgctgaccttggcaaagctgccagagatattttcaacaaaggatttggttttgggttggtgaaactggatgtgaaaacaaagtcttgcagtggcgtggaattttcaacgtccggttcatctaatacagacactggtaaagttactgggaccttggagaccaaatacaagtggtgtgagtatggtctgactttcacagaaaagtggaacactgataacactctgggaacagaaatcgcaattgaagaccagatttgtcaaggtttgaaactgacatttgatactaccttctcaccaaacacaggaaagaaaagtggtaaaatcaagtcttcttacaagagggagtgtataaaccttggttgtgatgttgactttgattttgctggacctgcaatccatggttcagctgtctttggttatgagggctggcttgctggctaccagatgacctttgacagtgccaaatcaaagctgacaaggaataactttgcagtgggctacaggactggggacttccagctacacactaatgtcaatgatgggacagaatttggaggatcaatttatcagaaagtttgtgaagatcttgacacttcagtaaaccttgcttggacatcaggtaccaactgcactcgttttggcattgcagctaaatatcagttggatcccactgcttccatttctgcaaaagtcaacaactctagcttaattggagtaggctatactcagactctgaggcctgctggtgtgaagcttaactctctgtctggtagatgggaagagcataatgtgggcaaaggtggtcgcctggagtggaggctatcagtgaagaacttggatggttcagagattggtaaaattcatggagagaaggggttttccagaaagataaagggttcagagggttgatttaagctgtagggagggtaaaaaggggggcaaattattgtatggtgggcaaaattatggaaaggggattggagctagtttatagaagggggtgtatgattataatttg

SEQ ID NO: 301624 - DNA, 1347 bp, Homo sapiens
  misc_feature (19)..(19): n is a, c, g, or t
gactctagaggatcccgangcgcacgatgggcgccaatgtgtattcctccatcatatgctgaccttggcaaagctgccagagatattttcaacaaaggatttggttttgggttggtgaaactggatgtgaaaacaaagtcttgcagtggcgtggaattttcaacgtccggttcatctaatacagacactggtaaagttactgggaccttggagaccaaatacaagtggtgtgagtatggtctgactttcacagaaaagtggaacactgataacactctgggaacagaaatcgcaattgaagaccagatttgtcaaggtttgaaactgacatttgatactaccttctcaccaaacacaggaaagaaaagtggtaaaatcaagtcttcttacaagagggagtgtataaaccttggttgtgatgttgactttgattttgctggacctgcaatccatggttcagctgtctttggttatgagggctggcttgctggctaccagatgacctttgacagtgccaaatcaaagctgacaaggaataactttgcagtgggctacaggactggggacttccagctacacactaatgtcaatgatgggacagaatttggaggatcaatttatcagaaagtttgtgaagatcttgacacttcagtaaaccttgcttggacatcaggtaccaactgcactcgttttggcattgcagctaaatatcagttggatcccactgcttccatttctgcaaaagtcaacaactctagcttaattggagtaggctatactcagactctgaggcctggtgtgaagcttacactctctgctctggtagatgggaagagcattaatgctggaggccacaaggttgggctcgccctggagttggaggcttaatccagctgaaagaaacctttgggaatggatatcagaagatttggccttaatatatttccattgtgaccagcagcaggcttttttcccccaagaagatgatcaaaacaaaggatgatctcaacaagagctgtattttaagtatttagacagttctttgttagctggtttctagttggttatctagttaccaatgctgcagtcctgcagtcacctatacattatttaaatgtatttaactgttaaatgcgctacccaccaataatgaaatagacctttatgaaaactgtgcaattgtgtgcatgtttgtttttatgttcctttagaaaacattgactgttaccattgaatgagatggatcagtggatattaagatgaggttacaaattttgttaagttcagccattattacttttggtatcccagaacatgacaaattatgaataaaacaagtatacataa

SEQ ID NO: 301625 - DNA, 1282 bp, Homo sapiens
tagaggatccgcttatgtctggacccaccaagaggattgttttgggttggtgaaactggatgtgaaaacaaagtcttgcagtggcgtggaattttcaacgtccggttcatctaatacagacactggtaaagttactgggaccttggagaccaaatacaagtggtgtgagtatggtctgactttcacagaaaagtggaacactgataacactctgggaacagaaatcgcaattgaagaccagatttgtcaaggtttgaaactgacatttgatactaccttctcaccaaacacaggaaagaaaagtggtaaaatcaagtcttcttacaagagggagtgtataaaccttggttgtgatgttgactttgattttgctggacctgcaatccatggttcagctgtctttggttatgagggctggcttgctggctaccagatgacctttgacagtgccaaatcaaagctgacaaggaataactttgcagtgggctacaggactggggacttccagctacacactaatgtcaatgatgggacagaatttggaggatcaatttatcagaaagtttgtgaagatcttgacacttcagtaaaccttgcttggacatcaggtaccaactgcactcgttttggcattgcagctaaatatcagttggatcccactgcttccatttctgcaaaagtcaacaactctagcttaattggagtaggctatactcagactctgaggcctggtgtgaagcttacactctctgctctggtagatgggaagagcattaatgctggaggccacaaggttgggctcgccctggagttggaggcttaatccagctgaaagaaacctttgggaatggatatcagaagatttggccttaatatatttccattgtgaccagcagcaggcttttttcccccaagaagatgatcaaaacaaaggatgatctcaacaagagctgtattttaagtatttagacagttctttgttagctggtttctagttggttatctagttaccaatgctgcagtcctgcagtcacctatacattatttaaatgtatttaactgttaaatgcgctacccaccaataatgaaatagacctttatgaaaactgtgcaattgtgtgcatgtttgtttttatgttcctttagaaaacattgactgttaccattgaatgagatggatcagtggatattaagatgaggttacaaattttgttaagttcagccattattacttttggtatcccagaacatgacaaattatgaataaaacaagtatacataa

SEQ ID NO: 301626 - DNA, 1310 bp, Homo sapiens
ccccaatacaggccacgtggatctgccattgcttttcacgtgaatgcctaggagaggctggatttggttttgggttggtgaaactggatgtgaaaacaaagtcttgcagtggcgtggaattttcaacgtccggttcatctaatacagacactggtaaagttactgggaccttggagaccaaatacaagtggtgtgagtatggtctgactttcacagaaaagtggaacactgataacactctgggaacagaaatcgcaattgaagaccagatttgtcaaggtttgaaactgacatttgatactaccttctcaccaaacacaggaaagaaaagtggtaaaatcaagtcttcttacaagagggagtgtataaaccttggttgtgatgttgactttgattttgctggacctgcaatccatggttcagctgtctttggttatgagggctggcttgctggctaccagatgacctttgacagtgccaaatcaaagctgacaaggaataactttgcagtgggctacaggactggggacttccagctacacactaatgtcaatgatgggacagaatttggaggatcaatttatcagaaagtttgtgaagatcttgacacttcagtaaaccttgcttggacatcaggtaccaactgcactcgttttggcattgcagctaaatatcagttggatcccactgcttccatttctgcaaaagtcaacaactctagcttaattggagtaggctatactcagactctgaggcctggtgtgaagcttacactctctgctctggtagatgggaagagcattaatgctggaggccacaaggttgggctcgccctggagttggaggcttaatccagctgaaagaaacctttgggaatggatatcagaagatttggccttaatatatttccattgtgaccagcagcaggcttttttcccccaagaagatgatcaaaacaaaggatgatctcaacaagagctgtattttaagtatttagacagttctttgttagctggtttctagttggttatctagttaccaatgctgcagtcctgcagtcacctatacattatttaaatgtatttaactgttaaatgcgctacccaccaataatgaaatagacctttatgaaaactgtgcaattgtgtgcatgtttgtttttatgttcctttagaaaacattgactgttaccattgaatgagatggatcagtggatattaagatgaggttacaaattttgttaagttcagccattattacttttggtatcccagaacatgacaaattatgaataaaacaagtatacataa

SEQ ID NO: 301627 - DNA, 1489 bp, Homo sapiens
agcgggggggcagcggcggggtcctgtctgggagaggacagggttgcggcgggcggaacggtgtctccttcacttcgccctccagctgctgcagctgcagcccgaccgcgagcgtgccaagcggcttcagcagctagcggagcggtggcggcggcccccctcaggacaccaccagattcccctcttcccgcggcctcgccatggcgacccacggacagacttgcgcgcgtccaatgtgtattcctccatcatatgctgaccttggcaaagctgccagagatattttcaacaaaggatttggttttgggttggtgaaactggatgtgaaaacaaagtcttgcagtggcgtggaattttcaacgtccggttcatctaatacagacactggtaaagttactgggaccttggagaccaaatacaagtggtgtgagtatggtctgactttcacagaaaagtggaacactgataacactctgggaacagaaatcgcaattgaagaccagatttgtcaaggtttgaaactgacatttgatactaccttctcaccaaacacaggaaagaaaagtggtaaaatcaagtcttcttacaagagggagtgtataaaccttggttgtgatgttgactttgattttgctggacctgcaatccatggttcagctgtctttggttatgagggctggcttgctggctaccagatgacctttgacagtgccaaatcaaagctgacaaggaataactttgcagtgggctacaggactggggacttccagctacacactaatgtcaatgatgggacagaatttggaggatcaatttatcagaaagtttgtgaagatgcattgcagctaaatatcagttggatcccactgcttccatttctgcaaaagtcaacaactctagcttaattggagtaggctatactcagactctgaggcctggtgtgaagcttacactctctgctctggtagatgggaagagcattaatgctggaggccacaaggttgggctcgccctggagttggaggcttaatccagctgaaagaaacctttgggaatggatatcagaagatttggccttaatatatttccattgtgaccagcagcaggcttttttcccccaagaagatgatcaaaacaaaggatgatctcaacaagagctgtattttaagtatttagacagttctttgttagctggtttctagttggttatctagttaccaatgctgcagtcctgcagtcacctatacattatttaaatgtatttaactgttaaatgcgctacccaccaataatgaaatagacctttatgaaaactgtgcaattgtgtgcatgtttgtttttatgttcctttagaaaacattgactgttaccattgaatgagatggatcagtggatattaagatgaggttacaaattttgttaagttcagccattattacttttggtatcccagaacatgacaaattatgaataaaacaagtatacataa

SEQ ID NO: 301628 - DNA, 1603 bp, Homo sapiens
agcgggggggcagcggcggggtcctgtctgggagaggacagggttgcggcgggcggaacggtgtctccttcacttcgccctccagctgctgcagctgcagcccgaccgcgagcgtgccaagcggcttcagcagctagcggagcggtggcggcggcccccctcaggacaccaccagattcccctcttcccgcggcctcgccatggcgacccacggacagacttgcgcgcgtccaatgtgtattcctccatcatatgctgaccttggcaaagctgccagagatattttcaacaaaggatttggttttgggttggtgaaactggatgtgaaaacaaagtcttgcagtggcgtgctgtcttccttaggcttggcgtggtgatgcttgtgatcccagctactcaggaggctgaggaattttcaacgtccggttcatctaatacagacactggtaaagttactgggaccttggagaccaaatacaagtggtgtgagtatggtctgactttcacagaaaagtggaacactgataacactctgggaacagaaatcgcaattgaagaccagatttgtcaaggtttgaaactgacatttgatactaccttctcaccaaacacaggaaagaaaagtggtaaaatcaagtcttcttacaagagggagtgtataaaccttggttgtgatgttgactttgattttgctggacctgcaatccatggttcagctgtctttggttatgagggctggcttgctggctaccagatgacctttgacagtgccaaatcaaagctgacaaggaataactttgcagtgggctacaggactggggacttccagctacacactaatgtcaatgatgggacagaatttggaggatcaatttatcagaaagtttgtgaagatcttgacacttcagtaaaccttgcttggacatcaggtaccaactgcactcgttttggcattgcagctaaatatcagttggatcccactgcttccatttctgcaaaagtcaacaactctagcttaattggagtaggctatactcagactctgaggcctggtgtgaagcttacactctctgctctggtagatgggaagagcattaatgctggaggccacaaggttgggctcgccctggagttggaggcttaatccagctgaaagaaacctttgggaatggatatcagaagatttggccttaatatatttccattgtgaccagcagcaggcttttttcccccaagaagatgatcaaaacaaaggatgatctcaacaagagctgtattttaagtatttagacagttctttgttagctggtttctagttggttatctagttaccaatgctgcagtcctgcagtcacctatacattatttaaatgtatttaactgttaaatgcgctacccaccaataatgaaatagacctttatgaaaactgtgcaattgtgtgcatgtttgtttttatgttcctttagaaaacattgactgttaccattgaatgagatggatcagtggatattaagatgaggttacaaattttgttaagttcagccattattacttttggtatcccagaacatgacaaattatgaataaaacaagtatacataa

SEQ ID NO: 301629 - DNA, 1648 bp, Homo sapiens
agcgggggggcagcggcggggtcctgtctgggagaggacagggttgcggcgggcggaacggtgtctccttcacttcgccctccagctgctgcagctgcagcccgaccgcgagcgtgccaagcggcttcagcagctagcggagcggtggcggcggcccccctcaggacaccaccagattcccctcttcccgcggcctcgccatggcgacccacggacagacttgcgcgcgtccaatgtgtattcctccatcatatgctgaccttggcaaagctgccagagatattttcaacaaaggatttggttttgggttggtgaaactggatgtgaaaacaaagtcttgcagtggcgtgatatcacaatttctggctgtagtctctttattattttcacatcagctgtcttccttaggcttggcgtggtgatgcttgtgatcccagctactcaggaggctgaggaattttcaacgtccggttcatctaatacagacactggtaaagttactgggaccttggagaccaaatacaagtggtgtgagtatggtctgactttcacagaaaagtggaacactgataacactctgggaacagaaatcgcaattgaagaccagatttgtcaaggtttgaaactgacatttgatactaccttctcaccaaacacaggaaagaaaagtggtaaaatcaagtcttcttacaagagggagtgtataaaccttggttgtgatgttgactttgattttgctggacctgcaatccatggttcagctgtctttggttatgagggctggcttgctggctaccagatgacctttgacagtgccaaatcaaagctgacaaggaataactttgcagtgggctacaggactggggacttccagctacacactaatgtcaatgatgggacagaatttggaggatcaatttatcagaaagtttgtgaagatcttgacacttcagtaaaccttgcttggacatcaggtaccaactgcactcgttttggcattgcagctaaatatcagttggatcccactgcttccatttctgcaaaagtcaacaactctagcttaattggagtaggctatactcagactctgaggcctggtgtgaagcttacactctctgctctggtagatgggaagagcattaatgctggaggccacaaggttgggctcgccctggagttggaggcttaatccagctgaaagaaacctttgggaatggatatcagaagatttggccttaatatatttccattgtgaccagcagcaggcttttttcccccaagaagatgatcaaaacaaaggatgatctcaacaagagctgtattttaagtatttagacagttctttgttagctggtttctagttggttatctagttaccaatgctgcagtcctgcagtcacctatacattatttaaatgtatttaactgttaaatgcgctacccaccaataatgaaatagacctttatgaaaactgtgcaattgtgtgcatgtttgtttttatgttcctttagaaaacattgactgttaccattgaatgagatggatcagtggatattaagatgaggttacaaattttgttaagttcagccattattacttttggtatcccagaacatgacaaattatgaataaaacaagtatacataa

SEQ ID NO: 301630 - DNA, 1549 bp, Homo sapiens
agcgggggggcagcggcggggtcctgtctgggagaggacagggttgcggcgggcggaacggtgtctccttcacttcgccctccagctgctgcagctgcagcccgaccgcgagcgtgccaagcggcttcagcagctagcggagcggtggcggcggcccccctcaggacaccaccagattcccctcttcccgcggcctcgccatggcgacccacggacagacttgcgcgcgtcgatcggatcaatcacttttctagaggaagtagcagtccctcttgtgagagcgcaaggtcattacttgtgctcctaagggcgtggacgtgctttgtggaatgaatgagctggtgtaatgagctcagattgcctgcccttaagcagcacagcattggccgaggacttgagagtcacattacaatgtgtattcctccatcatatgctgaccttggcaaagctgccagagatattttcaacaaaggatttggttttgggttggtgaaactggatgtgaaaacaaagtcttgcagtggcgtggaattttcaacgtccggttcatctaatacagacactggtaaagttactgggaccttggagaccaaatacaagtggtgtgagtatggtctgactttcacagaaaagtggaacactgataacactctgggaacagaaatcgcaattgaagaccagatttgtcaaggtttgaaactgacatttgatactaccttctcaccaaacacaggaaagaaaagtggtaaaatcaagtcttcttacaagagggagtgtataaaccttggttgtgatgttgactttgattttgctggacctgcaatccatggttcagctgtctttggttatgagggctggcttgctggctaccagatgacctttgacagtgccaaatcaaagctgacaaggaataactttgcagtgggctacaggactggggacttccagctacacactaatgtcaatgatgggacagaatttggaggatcaatttatcagaaagtttgtgaagatcttgacacttcagtaaaccttgcttggacatcaggtaccaactgcactcgttttggcattgcagctaaatatcagttggatcccactgcttccatttctgcaaaagtcaacaactctagcttaattggagtaggctatactcagactctgaggcctggtgtgaagcttacactctctgctctggtagatgggaagagcattaatgctggaggccacaaggttgggctcgccctggagttggaggcttaatccagctgaaagaaacctttgggaatggatatcagaagatttggccttaatatatttccattgtgaccagcagcaggcttttttcccccaagaagatgatcaaaacaaaggatgatctcaacaagagctgtattttaagtatttagacagttctttgttagctggtttctagttggttatctagttaccaatgctgcagtcctgcagtcacctatacattatttaaatgtatttaactgttaaatgcgctacccaccaataatgaaatagacctttatgaaaactg

SEQ ID NO: 301631 - DNA, 1632 bp, Homo sapiens
agcgggggggcagcggcggggtcctgtctgggagaggacagggttgcggcgggcggaacggtgtctccttcacttcgccctccagctgctgcagctgcagcccgaccgcgagcgtgccaagcggcttcagcagctagcggagcggtggcggcggcccccctcaggacaccaccagattcccctcttcccgcggcctcgccatggcgacccacggacagacttgcgcgcgtccaatgtgtattcctccatcatatgctgaccttggcaaagctgccagagatattttcaacaaaggatttggttttgggttggtgaaactggatgtgaaaacaaagtcttgcagtggcgtggaattttcaacgtccggttcatctaatacagacactggtaaagttactgggaccttggagaccaaatacaagtggtgtgagtatggtctgactttcacagaaaagtggaacactgataacactctgggaacagaaatcgcaattgaagaccaggtaacattttgaaaattttagtattaattttattaatttatttttgtatttcaaaaaaagaaaacaaattacttttctttcaaaatagatttgtcaaggtttgaaactgacatttgatactaccttctcaccaaacacaggaaagaaaagtggtaaaatcaagtcttcttacaagagggagtgtataaaccttggttgtgatgttgactttgattttgctggacctgcaatccatggttcagctgtctttggttatgagggctggcttgctggctaccagatgacctttgacagtgccaaatcaaagctgacaaggaataactttgcagtgggctacaggactggggacttccagctacacactaatgtcaatgatgggacagaatttggaggatcaatttatcagaaagtttgtgaagatcttgacacttcagtaaaccttgcttggacatcaggtaccaactgcactcgttttggcattgcagctaaatatcagttggatcccactgcttccatttctgcaaaagtcaacaactctagcttaattggagtaggctatactcagactctgaggcctggtgtgaagcttacactctctgctctggtagatgggaagagcattaatgctggaggccacaaggttgggctcgccctggagttggaggcttaatccagctgaaagaaacctttgggaatggatatcagaagatttggccttaatatatttccattgtgaccagcagcaggcttttttcccccaagaagatgatcaaaacaaaggatgatctcaacaagagctgtattttaagtatttagacagttctttgttagctggtttctagttggttatctagttaccaatgctgcagtcctgcagtcacctatacattatttaaatgtatttaactgttaaatgcgctacccaccaataatgaaatagacctttatgaaaactgtgcaattgtgtgcatgtttgtttttatgttcctttagaaaacattgactgttaccattgaatgagatggatcagtggatattaagatgaggttacaaattttgttaagttcagccattattacttttggtatcccagaacatgacaaattatgaataaaacaagtatacataa

SEQ ID NO: 301632 - DNA, 1145 bp, Homo sapiens
acgaatcagctctgtacctgaacattcgtgtctatggtctgactttcacagaaaagtggaacactgataacactctgggaacagaaatcgcaattgaagaccagatttgtcaaggtttgaaactgacatttgatactaccttctcaccaaacacaggaaagaaaagtggtaaaatcaagtcttcttacaagagggagtgtataaaccttggttgtgatgttgactttgattttgctggacctgcaatccatggttcagctgtctttggttatgagggctggcttgctggctaccagatgacctttgacagtgccaaatcaaagctgacaaggaataactttgcagtgggctacaggactggggacttccagctacacactaatgtcaatgatgggacagaatttggaggatcaatttatcagaaagtttgtgaagatcttgacacttcagtaaaccttgcttggacatcaggtaccaactgcactcgttttggcattgcagctaaatatcagttggatcccactgcttccatttctgcaaaagtcaacaactctagcttaattggagtaggctatactcagactctgaggcctggtgtgaagcttacactctctgctctggtagatgggaagagcattaatgctggaggccacaaggttgggctcgccctggagttggaggcttaatccagctgaaagaaacctttgggaatggatatcagaagatttggccttaatatatttccattgtgaccagcagcaggcttttttcccccaagaagatgatcaaaacaaaggatgatctcaacaagagctgtattttaagtatttagacagttctttgttagctggtttctagttggttatctagttaccaatgctgcagtcctgcagtcacctatacattatttaaatgtatttaactgttaaatgcgctacccaccaataatgaaatagacctttatgaaaactgtgcaattgtgtgcatgtttgtttttatgttcctttagaaaacattgactgttaccattgaatgagatggatcagtggatattaagatgaggttacaaattttgttaagttcagccattattacttttggtatcccagaacatgacaaattatgaataaaacaagtatacataa

SEQ ID NO: 301633 - DNA, 1019 bp, Homo sapiens
cggacgcgtgggtcgacccacgcgtccgaggaaagaaaagtggtaaaatcaagtcttcttacaagagggagtgtataaaccttggttgtgatgttgactttgattttgctggacctgcaatccatggttcagctgtctttggttatgagggctggcttgctggctaccagatgacctttgacagtgccaaatcaaagctgacaaggaataactttgcagtgggctacaggactggggacttccagctacacactaatgtcaatgatgggacagaatttggaggatcaatttatcagaaagtttgtgaagatcttgacacttcagtaaaccttgcttggacatcaggtaccaactgcactcgttttggcattgcagctaaatatcagttggatcccactgcttccatttctgcaaaagtcaacaactctagcttaattggagtaggctatactcagactctgaggcctggtgtgaagcttacactctctgctctggtagatgggaagagcattaatgctggaggccacaaggttgggctcgccctggagttggaggcttaatccagctgaaagaaacctttgggaatggatatcagaagatttggccttaatatatttccattgtgaccagcagcaggcttttttcccccaagaagatgatcaaaacaaaggatgatctcaacaagagctgtattttaagtatttagacagttctttgttagctggtttctagttggttatctagttaccaatgctgcagtcctgcagtcacctatacattatttaaatgtatttaactgttaaatgcgctacccaccaataatgaaatagacctttatgaaaactgtgcaattgtgtgcatgtttgtttttatgttcctttagaaaacattgactgttaccattgaatgagatggatcagtggatattaagatgaggttacaaattttgttaagttcagccattattacttttggtatcccagaacatgacaaattatgaataaaacaagtatacataa

SEQ ID NO: 301634 - DNA, 1019 bp, Homo sapiens
gctagaggaccccgtctgcccccatcagaggaaagaaaagtggtaaaatcaagtcttcttacaagagggagtgtataaaccttggttgtgatgttgactttgattttgctggacctgcaatccatggttcagctgtctttggttatgagggctggcttgctggctaccagatgacctttgacagtgccaaatcaaagctgacaaggaataactttgcagtgggctacaggactggggacttccagctacacactaatgtcaatgatgggacagaatttggaggatcaatttatcagaaagtttgtgaagatcttgacacttcagtaaaccttgcttggacatcaggtaccaactgcactcgttttggcattgcagctaaatatcagttggatcccactgcttccatttctgcaaaagtcaacaactctagcttaattggagtaggctatactcagactctgaggcctggtgtgaagcttacactctctgctctggtagatgggaagagcattaatgctggaggccacaaggttgggctcgccctggagttggaggcttaatccagctgaaagaaacctttgggaatggatatcagaagatttggccttaatatatttccattgtgaccagcagcaggcttttttcccccaagaagatgatcaaaacaaaggatgatctcaacaagagctgtattttaagtatttagacagttctttgttagctggtttctagttggttatctagttaccaatgctgcagtcctgcagtcacctatacattatttaaatgtatttaactgttaaatgcgctacccaccaataatgaaatagacctttatgaaaactgtgcaattgtgtgcatgtttgtttttatgttcctttagaaaacattgactgttaccattgaatgagatggatcagtggatattaagatgaggttacaaattttgttaagttcagccattattacttttggtatcccagaacatgacaaattatgaataaaacaagtatacataa

SEQ ID NO: 301635 - DNA, 1390 bp, Homo sapiens
agcgggggggcagcggcggggtcctgtctgggagaggacagggttgcggcgggcggaacggtgtctccttcacttcgccctccagctgctgcagctgcagcccgaccgcgagcgtgccaagcggcttcagcagctagcggagcggtggcggcggcccccctcaggacaccaccagattcccctcttcccgcggcctcgccatggcgacccacggacagacttgcgcgcgtccaatgtgtattcctccatcatatgctgaccttggcaaagctgccagagatattttcaacaaaggatttggttttgggttggtgaaactggatgtgaaaacaaagtcttgcagtggcgtggaattttcaacgtccggttcatctaatacagacactggtaaagttactgggaccttggagaccaaatacaagtggtgtgagtatggtctgactttcacagaaaagtggaacactgataacactctgggaacagaaatcgcaattgaagaccagatttgtcaaggtttgaaactgacatttgatactaccttctcaccaaacacagggccaaatcaaagctgacaaggaataactttgcagtgggctacaggactggggacttccagctacacactaatgtcaatgatgggacagaatttggaggatcaatttatcagaaagtttgtgaagatcttgacacttcagtaaaccttgcttggacatcaggtaccaactgcactcgttttggcattgcagctaaatatcagttggatcccactgcttccatttctgcaaaagtcaacaactctagcttaattggagtaggctatactcagactctgaggcctggtgtgaagcttacactctctgctctggtagatgggaagagcattaatgctggaggccacaaggttgggctcgccctggagttggaggcttaatccagctgaaagaaacctttgggaatggatatcagaagatttggccttaatatatttccattgtgaccagcagcaggcttttttcccccaagaagatgatcaaaacaaaggatgatctcaacaagagctgtattttaagtatttagacagttctttgttagctggtttctagttggttatctagttaccaatgctgcagtcctgcagtcacctatacattatttaaatgtatttaactgttaaatgcgctacccaccaataatgaaatagacctttatgaaaactgtgcaattgtgtgcatgtttgtttttatgttcctttagaaaacattgactgttaccattgaatgagatggatcagtggatattaagatgaggttacaaattttgttaagttcagccattattacttttggtatcccagaacatgacaaattatgaataaaacaagtatacataa

SEQ ID NO: 301636 - DNA, 818 bp, Homo sapiens
  misc_feature (802)..(802): n is a, c, g, or t
agcgggggggcagcggcggggtcctgtctgggagaggacagggttgcggcgggcggaacggtgtctccttcacttcgccctccagctgctgcagctgcagcccgaccgcgagcgtgccaagcggcttcagcagctagcggagcggtggcggcggcccccctcaggacaccaccagattcccctcttcccgcggcctcgccatggcgacccacggacagacttgcgcgcgtccaatgtgtattcctccatcatatgctgaccttggcaaagctgccagagatattttcaacaaaggatttggttttgggttggtgaaactggatgtgaaaacaaagtcttgcagtggcgtggaattttcaacgtccggttcatctaatacagacactggtaaagttactgggaccttggagaccaaatacaagtggtgtgagtatggtctgactttcacagaaaagtggaacactgataacactctgggaacagaaatcgcaattgaagaccagatttgtcaaggtttgaaactgacatttgatactaccttctcaccaaacacaggaaagaaaagtggtaaaatcaagtcttcttacaagagggagtgtataaaccttggttgtgatgttgactttgattttgctggacctgcaatccatggttcagctgtctttggttatgagggctggcttgctggctaccagatgacctttgacagtgccaaatcaaagctgacaaggaataactttgcagtgggctacaggactggggacttccagctacacactaatgtcaatgatgggacgcgccntcggggtaccgagctc

SEQ ID NO: 301637 - DNA, 855 bp, Homo sapiens
  misc_feature (798)..(798): n is a, c, g, or t
agcgggggggcagcggcggggtcctgtctgggagaggacagggttgcggcgggcggaacggtgtctccttcacttcgccctccagctgctgcagctgcagcccgaccgcgagcgtgccaagcggcttcagcagctagcggagcggtggcggcggcccccctcaggacaccaccagattcccctcttcccgcggcctcgccatggcgacccacggacagacttgcgcgcgtccaatgtgtattcctccatcatatgctgaccttggcaaagctgccagagatattttcaacaaaggatttggttttgggttggtgaaactggatgtgaaaacaaagtcttgcagtggcgtggaattttcaacgtccggttcatctaatacagacactggtaaagttactgggaccttggagaccaaatacaagtggtgtgagtatggtctgactttcacagaaaagtggaacactgataacactctgggaacagaaatcgcaattgaagaccagatttgtcaaggtttgaaactgacatttgatactaccttctcaccaaacacaggaaagaaaagtggtaaaatcaagtcttcttacaagagggagtgtataaaccttggttgtgatgttgactttgattttgctggacctgcaatccatggttcagctgtctttggttatgagggctggcttgctggctaccagatgacctttgacagtgccaaatcaaagctgacaaggaataactttgcagtgggctacaggactggggacttccagctacacactaatgtcaatgaatggggancagaaattgggagggatccattttatccagaaaagttttgtggaaagatcctttgaa

SEQ ID NO: 301638 - DNA, 987 bp, Homo sapiens
agcgggggggcagcggcggggtcctgtctgggagaggacagggttgcggcgggcggaacggtgtctccttcacttcgccctccagctgctgcagctgcagcccgaccgcgagcgtgccaagcggcttcagcagctagcggagcggtggcggcggcccccctcaggacaccaccagattcccctcttcccgcggcctcgccatggcgacccacggacagacttgcgcgcgtccaatgtgtattcctccatcatatgctgaccttggcaaagctgccagagatattttcaacaaaggatttggttttgggttggtgaaactggatgtgaaaacaaagtcttgcagtggcgtggaattttcaacgtccggttcatctaatacagacactggtaaagttactgggaccttggagaccaaatacaagtggtgtgagtatggtctgactttcacagaaaagtggaacactgataacactctgggaacagaaatcgcaattgaagaccagatttgtcaaggtttgaaactgacatttgatactaccttctcaccaaacacaggaaagaaaagtggtaaaatcaagtcttcttacaagagggagtgtataaaccttggttgtgatgttgactttgattttgctggacctgcaatccatggttcagctgtctttggttatgagggctggcttgctggctaccagatgacctttgacagtgccaaatcaaagctgacaaggaataactttgcagtgggctacaggactggggacttccagctacacactaatgtgtaagtatttctttcataggatactgtgatgtgggccctcagaggatgattttgatgtctgtcatcttattgatctgggtgcaccctaaaggatttctcataacatttaaaaacaaaatcattcttggtcatttctagggtgccccttgaaagtttatagtagaagactgttagtctgacctttggtgctgagagagtaaatg

SEQ ID NO: 301639 - DNA, 1091 bp, Homo sapiens
agcgggggggcagcggcggggtcctgtctgggagaggacagggttgcggcgggcggaacggtgtctccttcacttcgccctccagctgctgcagctgcagcccgaccgcgagcgtgccaagcggcttcagcagctagcggagcggtggcggcggcccccctcaggacaccaccagattcccctcttcccgcggcctcgccatggcgacccacggacagacttgcgcgcgtccaatgtgtattcctccatcatatgctgaccttggcaaagctgccagagatattttcaacaaaggatttggttttgggttggtgaaactggatgtgaaaacaaagtcttgcagtggcgtgatatcacaatttctggctgtagtctctttattattttcacatcagctgtcttccttaggcttggcgtggtgatgcttgtgatcccagctactcaggaggctgaggaattttcaacgtccggttcatctaatacagacactggtaaagttactgggaccttggagaccaaatacaagtggtgtgagtatggtctgactttcacagaaaagtggaacactgataacactctgggaacagaaatcgcaattgaagaccagatttgtcaaggtttgaaactgacatttgatactaccttctcaccaaacacaggaaagaaaagtggtaaaatcaagtcttcttacaagagggagtgtataaaccttggttgtgatgttgactttgattttgctggacctgcaatccatggttcagctgtctttggttatgagggctggcttgctggctaccagatgacctttgacagtgccaaatcaaagctgacaaggaataactttgcagtgggctacaggactggggacttccagctacacactaatgtgtaagtatttctttcataggatactgtgatgtgggccctcagaggatgattttgatgtctgtcatcttattgatctgggtgcaccctaaaggatttctcataacatttaaaaacaaaatcattcttggtcatttctagggtgccccttgaaagtttatagtagaagactgttagtctgacctttggtgctgagagagtaaatg

SEQ ID NO: 301640 - DNA, 678 bp, Homo sapiens
agcgggggggcagcggcggggtcctgtctgggagaggacagggttgcggcgggcggaacggtgtctccttcacttcgccctccagctgctgcagctgcagcccgaccgcgagcgtgccaagcggcttcagcagctagcggagcggtggcggcggcccccctcaggacaccaccagattcccctcttcccgcggcctcgccatggcgacccacggacagacttgcgcgcgtccaatgtgtattcctccatcatatgctgaccttggcaaagctgccagagatattttcaacaaaggatttggttttgggttggtgaaactggatgtgaaaacaaagtcttgcagtggcgtggtgagtgttactgttgaataagttctattgaacctttataatttttcaacttgtaaaatggtcataactgaaagatgtctacctgttttgtcttaaagaagaggcagaagttaactttgttttaagagatttgcgtgtaacctgatttattttggccttgaatgtgatttctgattttcatgtggtctttcgtcatattatgtatgcacaaggaacttaggaaagaccagtcaaggtggtactctttactcgtaagattacacatttgaagccagggaacccattattagacttttttgtaaccctttgtcaaccaatagtcagcaga

SEQ ID NO: 301641 - DNA, 676 bp, Homo sapiens
cttttctagaggaagtagcagtccctcttgtgagagcgcaaggtcattacttgtgctcctaagggcgtggacgtgctttgtggaatgaatgagctggtgtaatgagctcagattgcctgcccttaagcagcacagcattggccgaggacttgagagtcacattagtaagtttgaagcgctatttgatatttagttgatgtagacatttgagtgaaacacacatggcagtattttttccaagtttcaatatttaaattcccagtattaaattctcttcccactccagggtgttggttttcccctcagcgaagatattaaaggacgtatcagggtaaagggcctagtcttaggtttcggttttatctaatttagttaaatcagctcatctcagtgaattttggcagatacataaatatccatacacacaaatacttgtttgattctttgtacttgtccagtcctaggaagtgaggctgtaggtaatagactgtttttccgttttgaaacgaattccccaagtttgtataatcatggttatctgttttagaaataattcgttggtggtatctcctttatgggtcgttatagttctattgtagctcctgaccgcataaaaaacattccaacaaatgggattgcttgaattttaatatcagcagtgggtcatgctcttgtt

SEQ ID NO: 301642 - DNA, 678 bp, Homo sapiens
gcatgccgccggcgaccacgcctaaatagccgcagcctctgcgcgtcgccctccacggttaccccggctctccgcccctccttctcgcggcgctcgagggaccatggccgatcctcgcgtgagacagatcaagatcaagaccggcgtggtgaagcggttggtcaaagaaaaagtgatgtatgaaaaagaggcaaaacaacaagaagaaaagattgaaaaaatgagagctgaagacggtgaaaattatgacattaaaaagcaggcagagatcctacaagaatccaggatgatgatcccagattgccagcgcaggttggaagccgcatatttggatcttcaacggatactagaaaatgaaaaagacttggaagaagctgaggaatataaagaagcacgtttagtactggattcagtgaagttagaagcctgaaacttttctcgtatggggtggtttttgcattaaatcctggggtccattttacaatccattatttttgaccactgctatgtgttcaagtagtatgagaatgtgattgtttttatctggttacatatatatttctttgtctaatttaatatgtcaaataaatgagttcatctaataaaattgtttattttatactttaaaaaatttttaaattaaccttttatcattaaaccacatagactttatgacag

SEQ ID NO: 301643 - DNA, 649 bp, Homo sapiens
gcatgccgccggcgaccacgcctaaatagccgcagcctctgcgcgtcgccctccacggttaccccggctctccgcccctccttctcgcggcgctcgagggaccatggccgatcctcgcgtgagacagatcaagatcaagaccggcgtggtgaagcgagacggggcctcaatatgttgcccagtctagtctggaactcctgagcgttggtcaaagaaaaagtgatgtatgaaaaagaggcaaaacaacaagaagaaaagattgaaaaaatgagagctgaagacggtgaaaattatgacattaaaaagcaggcagagatcctacaagaatccaggatgatgatcccagattgccagcgcaggttggaagccgcatatttggatcttcaacggatactagaaaatgaaaaagacttggaagaagctgaggaatataaagaagcacgtttagtactggattcagtgaagttagaagcctgaaacttttctcgtatggggtggtttttgcattaaatcctggggtccattttacaatccattatttttgaccactgctatgtgttcaagtagtatgagaatgtgattgtttttatctggttacatatatatttctttgtctaatttaatatgtcaaataaatgagttcatctaa

SEQ ID NO: 301644 - DNA, 513 bp, Homo sapiens
  misc_feature (40)..(42): n is a, c, g, or t
cgggagcgccaggtccgggtcagccgggttcggtcttttnnnggatgatgcggtttggtacacgtatgttggtcaaagaaaaagtgatgtatgaaaaagaggcaaaacaacaagaagaaaagattgaaaaaatgagagctgaagacggtgaaaattatgacattaaaaagcaggcagagatcctacaagaatccaggatgatgatcccagattgccagcgcaggttggaagccgcatatttggatcttcaacggatactagaaaatgaaaaagacttggaagaagctgaggaatataaagaagcacgtttagtactggattcagtgaagttagaagcctgaaacttttctcgtatggggtggtttttgcattaaatcctggggtccattttacaatccattatttttgaccactgctatgtgttcaagtagtatgagaatgtgattgtttttatctggttacatatatatttctttgtctaatttaatatgtcaaataaatgagttcatctaa

SEQ ID NO: 301645 - DNA, 507 bp, Homo sapiens
  misc_feature (47)..(47): n is a, c, g, or t
tttattattatatttttttttttataatttttattattgttttttanagagttaaaaactagttggtcaaagaaaaagtgatgtatgaaaaagaggcaaaacaacaagaagaaaagattgaaaaaatgagagctgaagacggtgaaaattatgacattaaaaagcaggcagagatcctacaagaatccaggatgatgatcccagattgccagcgcaggttggaagccgcatatttggatcttcaacggatactagaaaatgaaaaagacttggaagaagctgaggaatataaagaagcacgtttagtactggattcagtgaagttagaagcctgaaacttttctcgtatggggtggtttttgcattaaatcctggggtccattttacaatccattatttttgaccactgctatgtgttcaagtagtatgagaatgtgattgtttttatctggttacatatatatttctttgtctaatttaatatgtcaaataaatgagttcatctaa

SEQ ID NO: 301646 - DNA, 977 bp, Homo sapiens
  misc_feature (633)..(634): n is a, c, g, or t
  misc_feature (651)..(651): n is a, c, g, or t
  misc_feature (657)..(657): n is a, c, g, or t
  misc_feature (676)..(676): n is a, c, g, or t
  misc_feature (678)..(678): n is a, c, g, or t
  misc_feature (684)..(684): n is a, c, g, or t
gcatgccgccggcgaccacgcctaaatagccgcagcctctgcgcgtcgccctccacggttaccccggctctccgcccctccttctcgcggcgctcgagggaccatggccgatcctcgcgtgagacagatcaagatcaagaccggcgtggtgaagcggttggtcaaagaaaaagtgatgtatgaaaaagaggcaaaacaacaagaagaaaagattgaaaaaatgagagctgaagacggtgaaaattatgacattaaaaagcaggcagagatcctacaagaatccaggatgatgatcccagattgccagcgcaggttggaagccgcatatttggatcttcaacggatactagaaaatgaaaaagacttggaagaagctgaggaatataaagaagcacgtttagtactggattcagtgaagttagaagcctgaaacttttctcgtatggggtggtttttgcattaaatcctggggtccattttacaatccattatttttgaccactgctatgtgttcaagtagtatgagaatgtgattgtttttatctggttacatatatatttctttgtctaatttaatatgtcaaataaatgagttcatctaaaaaaaaaaaaaaaaaaaaacttgtgtgtggnngcgcgcgcttggggccnctgganaaagtttttaaaaccttgngngtgggngcgcgcgggggccccagggggttaggggaaccggggcccaaaagcgcgggtgccaagaggagagagaccgcgggcgccatgagagacaagcggcgcggggcgtcttctctcaccaaatattacataaaaaaggcgcgcgcggggggggaacaccagagaggcgtgttcttgcgaacaaaactcccaaagagtggggggaccagagagggaccaatacacgggagacttatatcaacaggggagcgttaccaaggggaaacctcacatattaaaaatatacgccccggcgcgga

SEQ ID NO: 301647 - DNA, 575 bp, Homo sapiens
ggtgaaggaccataatatgaaaaagtagagcggggcggtagctgcagtgcctctcttaaggttggtcaaagaaaaagtgatgtatgaaaaagaggcaaaacaacaagaagaaaagattgaaaaaatgagagctgaagacggtgaaaattatgacattaaaaagcaggctggtcttcaactcctggcctccagtgatcctcccaccccagcctctcagagtcctgggatgataagcgcagagatcctacaagaatccaggatgatgatcccagattgccagcgcaggttggaagccgcatatttggatcttcaacggatactagaaaatgaaaaagacttggaagaagctgaggaatataaagaagcacgtttagtactggattcagtgaagttagaagcctgaaacttttctcgtatggggtggtttttgcattaaatcctggggtccattttacaatccattatttttgaccactgctatgtgttcaagtagtatgagaatgtgattgtttttatctggttacatatatatttctttgtctaatttaatatgtcaaataaatgagttcatctaa

SEQ ID NO: 301648 - DNA, 372 bp, Homo sapiens
aatcgctctcctaaaatgaagcatgaggataagcagagatcctacaagaatccaggatgatgatcccagattgccagcgcaggttggaagccgcatatttggatcttcaacggatactagaaaatgaaaaagacttggaagaagctgaggaatataaagaagcacgtttagtactggattcagtgaagttagaagcctgaaacttttctcgtatggggtggtttttgcattaaatcctggggtccattttacaatccattatttttgaccactgctatgtgttcaagtagtatgagaatgtgattgtttttatctggttacatatatatttctttgtctaatttaatatgtcaaataaatgagttcatctaa

SEQ ID NO: 301649 - DNA, 515 bp, Homo sapiens
gcatgccgccggcgaccacgcctaaatagccgcagcctctgcgcgtcgccctccacggttaccccggctctccgcccctccttctcgcggcgctcgagggaccatggccgatcctcgcgtgagacagatcaagatcaagaccggcgtggtgaagcggttggtcaaagaaaaagtgatgtatgaaaaagaggcaaaacaacaagaagaaaagattgaaaaaatgagagctgaagacggtgaaaattatgacattaaaaagcaggaaaatgaaaaagacttggaagaagctgaggaatataaagaagcacgtttagtactggattcagtgaagttagaagcctgaaacttttctcgtatggggtggtttttgcattaaatcctggggtccattttacaatccattatttttgaccactgctatgtgttcaagtagtatgagaatgtgattgtttttatctggttacatatatatttctttgtctaatttaatatgtcaaataaatgagttcatctaa

SEQ ID NO: 301650 - DNA, 1066 bp, Homo sapiens
gcatgccgccggcgaccacgcctaaatagccgcagcctctgcgcgtcgccctccacggttaccccggctctccgcccctccttctcgcggcgctcgagggaccatggccgatcctcgcgtgagacagatcaagatcaagaccggcgtggtgaagcggttggtcaaagaaaaagtgatgtatgaaaaagaggcaaaacaacaagaagaaaagattgaaaaaatgagagctgaagacggtgaaaattatgacattaaaaagcaggcagagatcctacaagaatccaggatgatgatcccagattgccagcgcaggttggaagccgcatatttggatcttcaacggatactagtaagcaaagacttctgtgtcatgtttaaattttttttttcaatccaatacatggaaagccaaaagtttaaatatttaacactgagaactagttggcagtatttcttattcacttgccctttataccgctatattttaaaataattaatggagtttaaattgtgttttgaattatgcctccagtaaaagtactgttttctagcatgtttgttcagtttattaaaatttagctagttaaatttatttaagttatgatagtaccagtattgtccagcaatgtcttgattatttggttttcatacataaagatcttttgagacattgaggatgagttgactgattaaaattttaaaagatctaatgtttcaaaagaatttgggatcttattaaaaggatcttgaattctttcacattcaaacctagatcagtttgagagggggaaaaaacctggtaatctatgtagtcccctcatactaacttggagctgaataacacttatacttgctggtataaatgccttgtgatacagaaggtagataaagcaggaaataataactgttaaaatactatctaagacaggaagcatcatttgtatttcttgacagtttaaatgcttttttctctcatgaatctagtagctgagaaagtaatagaaattgcttggaaaaaaataatgttggccgccaggtgcagtggctcatgcctgtaatcccagca

SEQ ID NO: 301651 - DNA, 552 bp, Homo sapiens
aataaactttttctgaggtttttatttaattaatgctggtagctttagaagactgttattcacttattttatgagaatatatacagtgaaacaaaaccaccagttatttcttcctttccttgtaaagaaggaacagaatgtgggaaacctgtggaattacaatatatttagatgaggcttgggattttttacttttaattttttagttattaacattaatggtttgtaatatttgagtaaataacaaagtactgaaacttgaaaaggataaacttaatttttattgtatttcattttaggaaaatgaaaaagacttggaagaagctgaggaatataaagaagcacgtttagtactggattcagtgaagttagaagcctgaaacttttctcgtatggggtggtttttgcattaaatcctggggtccattttacaatccattatttttgaccactgctatgtgttcaagtagtatgagaatgtgattgtttttatctggttacatatatatttctttgtctaatttaatatgtcaaataaatgagttcatctaa

SEQ ID NO: 301652 - DNA, 585 bp, Homo sapiens
  misc_feature (241)..(242): n is a, c, g, or t
  misc_feature (259)..(259): n is a, c, g, or t
  misc_feature (265)..(265): n is a, c, g, or t
  misc_feature (284)..(284): n is a, c, g, or t
  misc_feature (286)..(286): n is a, c, g, or t
  misc_feature (292)..(292): n is a, c, g, or t
gcatgccgccggcgaccacgcctaaatagccgcagcctctgcgcgtcgccctccacggttaccccggctctccgcccctccttctcgcggcgctcgagggaccatggccgatcctcgcgtgagacagatcaagatcaagaccggcgtggtgaagcggttggtcaaagaaaaagtgatgtatgaaaaagaggcaaaacaacaagaagaaaaaaaaaaaaaaaaaaaaaaacttgtgtgtggnngcgcgcgcttggggccnctgganaaagtttttaaaaccttgngngtgggngcgcgcgggggccccagggggttaggggaaccggggcccaaaagcgcgggtgccaagaggagagagaccgcgggcgccatgagagacaagcggcgcggggcgtcttctctcaccaaatattacataaaaaaggcgcgcgcggggggggaacaccagagaggcgtgttcttgcgaacaaaactcccaaagagtggggggaccagagagggaccaatacacgggagacttatatcaacaggggagcgttaccaaggggaaacctcacatattaaaaatatacgccccggcgcgga

SEQ ID NO: 301653 - DNA, 267 bp, Homo sapiens
aatcgctctcctaaaatgaagcatgaggataagcagagatcctacaagaatccaggatgatgatcccagattgccagcgcaggttggaagccgcatatttggatcttcaacggatactagaaaatgaaaaagacttggaagaagctgaggaatataaagaagcacgtttagtactggattcagtgaagttagaagcctgaaacttttctcgtatggggtggtttttgcattaaatcgtcgcagtgcacgcgcgtaaccagacatctt

SEQ ID NO: 301654 - DNA, 1175 bp, Homo sapiens
gcatgccgccggcgaccacgcctaaatagccgcagcctctgcgcgtcgccctccacggttaccccggctctccgcccctccttctcgcggcgctcgagggaccatggccgatcctcgcgtgagacagatcaagatcaagaccggcgtggtgaagcggttggtcaaagaaaaagtgatgtatgaaaaagaggcaaaacaacaagaagaaaagattgaaaaaatgagagctgaagacggtgaaaattatgacattaaaaagcaggcagagatcctacaagaatccaggatgatgatcccagattgccagcgcaggttggaagccgcatatttggatcttcaacggatactagaaaatgaaaaagacttggaagaagctgaggaatataaagaagcacgtttagtactggattcagtgaagttagaagcctgaaacttttctcgtatggggtggtttttgcattaaatcctggggtccattttacaatccattatttttgaccactgctatgtgttcaagtagtatgagaatgtgattgtttttatctggttacatatatatttctttgtctaatttaatatgtcaaataaatgagttcatctaaaagagattagagaggttacactggcggacaaggtaacagctataaggggcgagctgggggtgctagtaggggtaggcgagggggggtgggggcttgtggggccgagggggggggctttgggcgccttttgttgaggggggggaaaaagttggacccctcccactctcctgcttgcttgtgggggttcggtgggtggacagtatatctttcattcatggagcggggtggcggttgttgcagggatggggggttccgcgggatatgtaagttggggcgggggtgtcggtagtggggcaggtaggtaaggggcgggtgtgggggtgttgtgagtaggtctccgcgtgggcggcggcattagatctgttgtggggcggggggggggggggccgggcggtcggagatgtgcatgagattgcgatggaggggcgtcgtgggcgtgtgttgctagcgtatgcggtaagaggatcaattgggttgttgttggggtgggggtgcgggtatgttcacacgactgcgtcgtatctggggctgcgggcgccttgcacgcgggggcgagagacgctcgggaggcag

SEQ ID NO: 301655 - DNA, 645 bp, Homo sapiens
  misc_feature (603)..(605): n is a, c, g, or t
  misc_feature (645)..(645): n is a, c, g, or t
gcatgccgccggcgaccacgcctaaatagccgcagcctctgcgcgtcgccctccacggttaccccggctctccgcccctccttctcgcggcgctcgagggaccatggccgatcctcgcgtgagacagatcaagatcaagaccggcgtggtgaagcggttggtcaaagaaaaagtgatgtatgaaaaagaggcaaaacaacaagaagaaaagattgaaaaaatgagagctgaagacggtgaaaattatgacattaaaaagcaggcagagatcctacaagaatccaggatgatgatcccagattgccagcgcaggttggaagccgcatatttggatcttcaacggatactagaaaatgaaaaagacttggaagaagctgaggaatataaagaagcacgtttagtactggattcagtgaagttagaagcctgaaacttttctcgtatggggtggtttttgcattaaatcctggggtccattttacaatccattatttttgaccactgctatgtgttcaagtagtatgagaatgtgattgtttttatctggttacatatatatttctttgtctaatttaatatgtcaaataaatgagttcatctaannntggcctcgttggcctcagcggtggagctctgcggccaaan

SEQ ID NO: 301656 - DNA, 591 bp, Homo sapiens
gcatgccgccggcgaccacgcctaaatagccgcagcctctgcgcgtcgccctccacggttaccccggctctccgcccctccttctcgcggcgctcgagggaccatggccgatcctcgcgtgagacagatcaagatcaagaccggcgtggtgaagcggttggtcaaagaaaaagtgatgtatgaaaaagaggcaaaacaacaagaagaaaagattgaaaaaatgagagctgaagacggtgaaaattatgacattaaaaagcaggaaaatgaaaaagacttggaagaagctgaggaatataaagaagcacgtttagtactggattcagtgaagttagaagcctgaaacttttctcgtatggggtggtttttgcattaaatcctggggtccattttacaatccattatttttgaccactgctatgtgttcaagtagtatgagaatgtgattgtttttatctggttacatatatatttctttgtctaatttaatatgtcaaataaatgagttcatctaataaaattgtttattttatactttaaaaaatttttaaattaaccttttatcattaaaccacatagactttatgacag

SEQ ID NO: 301657 - DNA, 614 bp, Homo sapiens
gcatgccgccggcgaccacgcctaaatagccgcagcctctgcgcgtcgccctccacggttaccccggctctccgcccctccttctcgcggcgctcgagggaccatggccgatcctcgcgtgagacagatcaagatcaagaccggcgtggtgaagcggttggtcaaagaaaaagtgatgtatgaaaaagaggcaaaacaacaagaagaaaagattgaaaaaatgagagctgaagacggtgaaaattatgacattaaaaagcaggcagagatcctacaagaatccaggatgatgatcccagattgccagcgcaggttggaagccgcatatttggatcttcaacggatactatgaagttagaagcctgaaacttttctcgtatggggtggtttttgcattaaatcctggggtccattttacaatccattatttttgaccactgctatgtgttcaagtagtatgagaatgtgattgtttttatctggttacatatatatttctttgtctaatttaatatgtcaaataaatgagttcatctaataaaattgtttattttatactttaaaaaatttttaaattaaccttttatcattaaaccacatagactttatgacag

SEQ ID NO: 301658 - DNA, 454 bp, Homo sapiens
gcatgccgccggcgaccacgcctaaatagccgcagcctctgcgcgtcgccctccacggttaccccggctctccgcccctccttctcgcggcgctcgagggaccatggccgatcctcgcgtgagacagatcaagatcaagaccggcgtggtgaagcggttggtcaaagaaaaagtgatgtatgaaaaagaggcaaaacaacaagaagaaaagattgaaaaaatgagagctgaagacggtgaaaattatgacattaaaaagcaggcagagatcctacaagaatccaggatgatgatcccagattgccagcgcaggttggaagccgcatatttggatcttcaacggatactagaaatgaaaaagacttggtggaagcttaggagtaataaggagcacgctttagatactgaatagatacgattgagagcctcttatctcatagcatctggagaagat

SEQ ID NO: 301659 - DNA, 602 bp, Homo sapiens
gcatgccgccggcgaccacgcctaaatagccgcagcctctgcgcgtcgccctccacggttaccccggctctccgcccctccttctcgcggcgctcgagggaccatggccgatcctcgcgtgagacagatcaagatcaagaccggcgtggtgaagcggttggtcaaagaaaaagtgatgtatgaaaaagaggcaaaacaacaagaagaaaagattgaaaaaatgagagctgaagacggtgaaaattatgacattaaaaagcaggcagagatcctacaagaatccaggatgatgatcccagattgccagcgcaggttggaagccgcatatttggatcttcaacggatactagaaaatgaaaaagacttggaagaagctgaggaatataaagaagcacgtttagtactggattcagtgaagttagaagcctgaaacttttctcgtatggggtggtttttgcattaaatcctggggtccattttacaatccattatttttgaccactgctatgtgttcaagtagtatgagaatgtgattgtttttatctggttacatatatatttctttgtctaatttaatatgtcaaataaatgagttcatctaa

SEQ ID NO: 301660 - DNA, 542 bp, Homo sapiens
gttagggattatgttgacaaggacttcctggtttcatggcttcttttcttggttttcgtcttcaatttgctggagtacattaagtaaatttctcaggttggtcaaagaaaaagtgatgtatgaaaaagaggcaaaacaacaagaagaaaagattgaaaaaatgagagctgaagacggtgaaaattatgacattaaaaagcaggcagagatcctacaagaatccaggatgatgatcccagattgccagcgcaggttggaagccgcatatttggatcttcaacggatactagaaaatgaaaaagacttggaagaagctgaggaatataaagaagcacgtttagtactggattcagtgaagttagaagcctgaaacttttctcgtatggggtggtttttgcattaaatcctggggtccattttacaatccattatttttgaccactgctatgtgttcaagtagtatgagaatgtgattgtttttatctggttacatatatatttctttgtctaatttaatatgtcaaataaatgagttcatctaa

SEQ ID NO: 301661 - DNA, 515 bp, Homo sapiens
  misc_feature (45)..(45): n is a, c, g, or t
  misc_feature (59)..(59): n is a, c, g, or t
  misc_feature (63)..(63): n is a, c, g, or t
  misc_feature (68)..(68): n is a, c, g, or t
cggggcgcccgacctggcccgccgtgtctggtctttttaccggcngctgggggtggaanaccnaattntgttggtcaaagaaaaagtgatgtatgaaaaagaggcaaaacaacaagaagaaaagattgaaaaaatgagagctgaagacggtgaaaattatgacattaaaaagcaggcagagatcctacaagaatccaggatgatgatcccagattgccagcgcaggttggaagccgcatatttggatcttcaacggatactagaaaatgaaaaagacttggaagaagctgaggaatataaagaagcacgtttagtactggattcagtgaagttagaagcctgaaacttttctcgtatggggtggtttttgcattaaatcctggggtccattttacaatccattatttttgaccactgctatgtgttcaagtagtatgagaatgtgattgtttttatctggttacatatatatttctttgtctaatttaatatgtcaaataaatgagttcatctaa

SEQ ID NO: 301662 - DNA, 591 bp, Homo sapiens
  misc_feature (45)..(45): n is a, c, g, or t
  misc_feature (59)..(59): n is a, c, g, or t
  misc_feature (63)..(63): n is a, c, g, or t
  misc_feature (68)..(68): n is a, c, g, or t
cggggcgcccgacctggcccgccgtgtctggtctttttaccggcngctgggggtggaanaccnaattntgttggtcaaagaaaaagtgatgtatgaaaaagaggcaaaacaacaagaagaaaagattgaaaaaatgagagctgaagacggtgaaaattatgacattaaaaagcaggcagagatcctacaagaatccaggatgatgatcccagattgccagcgcaggttggaagccgcatatttggatcttcaacggatactagaaaatgaaaaagacttggaagaagctgaggaatataaagaagcacgtttagtactggattcagtgaagttagaagcctgaaacttttctcgtatggggtggtttttgcattaaatcctggggtccattttacaatccattatttttgaccactgctatgtgttcaagtagtatgagaatgtgattgtttttatctggttacatatatatttctttgtctaatttaatatgtcaaataaatgagttcatctaataaaattgtttattttatactttaaaaaatttttaaattaaccttttatcattaaaccacatagactttatgacag

SEQ ID NO: 301663 - DNA, 403 bp, Homo sapiens
  misc_feature (30)..(30): n is a, c, g, or t
  misc_feature (36)..(37): n is a, c, g, or t
  misc_feature (52)..(52): n is a, c, g, or t
  misc_feature (59)..(59): n is a, c, g, or t
gggggggccgtctggaaggagttttggttntttttnngccaactacgagcangataccnacttgcagagatcctacaagaatccaggatgatgatcccagattgccagcgcaggttggaagccgcatatttggatcttcaacggatactagaaaatgaaaaagacttggaagaagctgaggaatataaagaagcacgtttagtactggattcagtgaagttagaagcctgaaacttttctcgtatggggtggtttttgcattaaatcctggggtccattttacaatccattatttttgaccactgctatgtgttcaagtagtatgagaatgtgattgtttttatctggttacatatatatttctttgtctaatttaatatgtcaaataaatgagttcatctaa

SEQ ID NO: 301664 - DNA, 593 bp, Homo sapiens
aggtgcgcaagtttatttcagcctgcaaacgtgcttctgtggccctcagcgggacggagaaccaggcggttgcggcaaaaagagcttgggatttcaaggcaggattttctccaggcctagaaaggagaagcctctgcccagagaaaggttggtcaaagaaaaagtgatgtatgaaaaagaggcaaaacaacaagaagaaaagattgaaaaaatgagagctgaagacggtgaaaattatgacattaaaaagcaggcagagatcctacaagaatccaggatgatgatcccagattgccagcgcaggttggaagccgcatatttggatcttcaacggatactagaaaatgaaaaagacttggaagaagctgaggaatataaagaagcacgtttagtactggattcagtgaagttagaagcctgaaacttttctcgtatggggtggtttttgcattaaatcctggggtccattttacaatccattatttttgaccactgctatgtgttcaagtagtatgagaatgtgattgtttttatctggttacatatatatttctttgtctaatttaatatgtcaaataaatgagttcatctaa

SEQ ID NO: 301665 - DNA, 652 bp, Homo sapiens
gcatgccgccggcgaccacgcctaaatagccgcagcctctgcgcgtcgccctccacggttaccccggctctccgcccctccttctcgcggcgctcgagggaccatggccgatcctcgcgtgagacagatcaagatcaagaccggcgtggtgaagcggttggtcaaagaaaaagtgatgtatgaaaaagaggcaaaacaacaagaagaaaagattgaaaaaatgagagctgaagacggtgaaaattatgacattaaaaagcaggcagagatcctacaagaatccaggatgatgatcccagattgccagcgcaggttggaagccgcatatttggatcttcaacggatactagaaaatgaaaaagacttggaagaagctgaggaatataaagaagcacgtttagtactggattcagtgaagttagaagcctgaaacttttctcgtatggggtggtttttgcattaaatcctggggtccattttacaatccattatttttgaccactgctatgtgttcaagtagtatgagaatgtgattgtttttatctggttacatatatatttctttgtctaatttaatatgtcaaataaatgagttcatctaagatgcggccaaataataaattgagttgcaaaaaaggaaagaactaatgag

SEQ ID NO: 301666 - DNA, 656 bp, Homo sapiens
gcatgccgccggcgaccacgcctaaatagccgcagcctctgcgcgtcgccctccacggttaccccggctctccgcccctccttctcgcggcgctcgagggaccatggccgatcctcgcgtgagacagatcaagatcaagaccggcgtggtgaagcggttggtcaaagaaaaagtgatgtatgaaaaagaggcaaaacaacaagaagaaaagattgaaaaaatgagagctgaagacggtgaaaattatgacattaaaaagcaggcagagatcctacaagaatccaggatgatgatcccagattgccagcgcaggttggaagccgcatatttggatcttcaacggatactagaaaatgaaaaagacttggaagaagctgaggaatataaagaagcacgtttagtactggattcagtgaagttagaagcctgaaacttttctcgtatggggtggtttttgcattaaatcctggggtccattttacaatccattatttttgaccactgctatgtgttcaagtagtatgagaatgtgattgtttttatctggttacatatatatttctttgtctaatttaatatgtcaaataaatgagttcatctaaacagatgcggccgaaaactgcacacccgtttttttttacgtattatacgctatt

SEQ ID NO: 301667 - DNA, 154 bp, Homo sapiens
tgcttccaggaatactactctgaggattatgaaccctcagtgtcactcagaggaaaagagtctagtgattgctgagcaatttctaccacaacggctcatgtatctgccaaccccaaaccatgattttactttaccaaaggcacacgtgctcatg

SEQ ID NO: 301668 - DNA, 2195 bp, Homo sapiens
ctcgcgtaggctgcaggctcggggagggagggcagcggcgccgcgtcgggagccgccgccgtcccggtcctcccgcccgcccgcccatccggtgcctcctgcagcccgcctgctgggcagggccggcgcggcccggccatggagtcctacgacatcatcgccaaccagcctgtggtcatcgacaacggttcgggggtgattaaagctggctttgcaggagaccagattcccaaatactgtttcccaaactatgtcgggcggccgaagcacatgcgggtgatggctggagccctggagggggacctcttcatcggaccaaaagcagaggagcaccgggggctgctgaccatccgctaccccatggagcacggcgtggtgcgagactggaacgacatggaacgcatctggcagtacgtctactccaaggatcagctgcagaccttctcggaggagcatcctgtgctcctcacggaggccccgctcaacccgagtaagaaccgggagaaggcggcagaggtgttctttgagaccttcaacgtgccggccctgttcatctccatgcaggctgtgctcagtctgtacgcaacaggacgcacgacaggagtggttctagactcaggggacggggtcactcatgctgtgcccatctatgagggctttgccatgcctcactccatcatgcgggtggacattgccggccgcgacgtctcccgctacctccgactcctgctgcgcaaggaaggggttgacttccatacctcggctgagtttgaggttgtccggacaatcaaagagcgagcgtgctacctgtccatcaacccacagaaggatgaggctctggagacggagaaggtgcagtacacgttgccagacggcagcacgcttgatgtggggcctgcacgattccgggcccccgagctgctgttccagccggaccttgtgggggatgagagtgaggggctccatgaggtggtggccttcgccatacacaagtccgacatggacctgcgccggacgctgttcgccaacatcgtgctctcaggtggctcaacgcttttcaaaggcttcggagaccgattactcagtgaagtgaagaagcttgccccaaaggatatcaaaatcaagatctcagccccgcaggaacggctgtactccacatggattggcggctccatcctggcctcgctggacacttttaagaagatgtgggtgtccaaaaaggagtatgaagaggatggctcccgtgctattcatcgcaaaactttctagtgcccaaggagggcggggcatgttgggagagggggagggaggggagacagagcctttaaccctttttggtcttggctcgtatactaggcttagggtcccctgcatgccctgaacccctgggtgggtggcacagcagtgcccccctgcagccttcccctctacacaggacatgcacacacaagtaacattgagctgcatggacaggagccttgagctggcgtgtgggaattgagcgccatgtcaggctgttgtgggtatccccctggcagggccagctaggcctgtggttccctgctccgactctcagggctgcctccctgagctccagggccagaatgcctggatgcctgggtagccagtttggggagtgggctgcaaggggcagccagcagctcccactggtgtgtcactgcatccattgccacctcctgttcgtgacctgacagggtgacacagcccctttcacactctgtcctcctatcttcctgggtagatgccctggtgtagggctgagtactgaatggtcttccatccccagcaagggggtgcagcccagggtcaggcccttcagagccagggcagaggacgcacggtggctagagccgctgcactatccttttcagagcacttcatccacttgctcctccctctaccctcggcaccctgggtgggaaagggttgatgctcatcatttattgaggggaagccacttaataaggagtcagacctaaaagggggtgggggacattttcttacctcacccaagaaagaggtcgtcacttttgctgtggccagggccccacctccctctctcagatatgtacaataatttaacacggttgcctgaaaaaaacttttgtaaatcattatagtaataattatggacaaggcccagtgtgtggctctgttttcttgtggctctctgt

SEQ ID NO: 301669 - DNA, 439 bp, Homo sapiens
ctagggttcccctttgtcttgggagtctctcgttttggtcttgttgagccacaagggggtgcagcccagggtcaggcccttcagagccagggcagaggacgcacggtggctagagccgctgcactatccttttcagagcacttcatccacttgctcctccctctaccctcggcaccctgggtgggaaagggttgatgctcatcatttattgaggggaagccacttaataaggagtcagacctaaaagggggtgggggacattttcttacctcacccaagaaagaggtcgtcacttttgctgtggccagggccccacctccctctctcagatatgtacaataatttaacacggttgcctgaaaaaaacttttgtaaatcattatagtaataattatggacaaggcccagtgtgtggctctgttttcttgtggctctctgt

SEQ ID NO: 301670 - DNA, 2155 bp, Homo sapiens
ggaaaagagaggaaaaaaggaacataggctaggtacgaggcctcgtgttacggtgctcctgcagcccgcctgctgggcagggccggcgcggcccggccatggagtcctacgacatcatcgccaaccagcctgtggtcatcgacaacggttcgggggtgattaaagctggctttgcaggagaccagattcccaaatactgtttcccaaactatgtcgggcggccgaagcacatgcgggtgatggctggagccctggagggggacctcttcatcggaccaaaagcagaggagcaccgggggctgctgaccatccgctaccccatggagcacggcgtggtgcgagactggaacgacatggaacgcatctggcagtacgtctactccaaggatcagctgcagaccttctcggaggagcatcctgtgctcctcacggaggccccgctcaacccgagtaagaaccgggagaaggcggcagaggtgttctttgagaccttcaacgtgccggccctgttcatctccatgcaggctgtgctcagtctgtacgcaacaggacgcacgacaggagtggttctagactcaggggacggggtcactcatgctgtgcccatctatgagggctttgccatgcctcactccatcatgcgggtggacattgccggccgcgacgtctcccgctacctccgactcctgctgcgcaaggaaggggttgacttccatacctcggctgagtttgaggttgtccggacaatcaaagagcgagcgtgctacctgtccatcaacccacagaaggatgaggctctggagacggagaaggtgcagtacacgttgccagacggcagcacgcttgatgtggggcctgcacgattccgggcccccgagctgctgttccagccggaccttgtgggggatgagagtgaggggctccatgaggtggtggccttcgccatacacaagtccgacatggacctgcgccggacgctgttcgccaacatcgtgctctcaggtggctcaacgcttttcaaaggcttcggagaccgattactcagtgaagtgaagaagcttgccccaaaggatatcaaaatcaagatctcagccccgcaggaacggctgtactccacatggattggcggctccatcctggcctcgctggacacttttaagaagatgtgggtgtccaaaaaggagtatgaagaggatggctcccgtgctattcatcgcaaaactttctagtgcccaaggagggcggggcatgttgggagagggggagggaggggagacagagcctttaaccctttttggtcttggctcgtatactaggcttagggtcccctgcatgccctgaacccctgggtgggtggcacagcagtgcccccctgcagccttcccctctacacaggacatgcacacacaagtaacattgagctgcatggacaggagccttgagctggcgtgtgggaattgagcgccatgtcaggctgttgtgggtatccccctggcagggccagctaggcctgtggttccctgctccgactctcagggctgcctccctgagctccagggccagaatgcctggatgcctgggtagccagtttggggagtgggctgcaaggggcagccagcagctcccactggtgtgtcactgcatccattgccacctcctgttcgtgacctgacagggtgacacagcccctttcacactctgtcctcctatcttcctgggtagatgccctggtgtagggctgagtactgaatggtcttccatccccagcaagggggtgcagcccagggtcaggcccttcagagccagggcagaggacgcacggtggctagagccgctgcactatccttttcagagcacttcatccacttgctcctccctctaccctcggcaccctgggtgggaaagggttgatgctcatcatttattgaggggaagccacttaataaggagtcagacctaaaagggggtgggggacattttcttacctcacccaagaaagaggtcgtcacttttgctgtggccagggccccacctccctctctcagatatgtacaataatttaacacggttgcctgaaaaaaacttttgtaaatcattatagtaataattatggacaaggcccagtgtgtggctctgttttcttgtggctctctgt

SEQ ID NO: 301671 - DNA, 2430 bp, Homo sapiens
ctcgcgtaggctgcaggctcggggagggagggcagcggcgccgcgtcgggagccgccgccgtcccggtcctcccgcccgcccgcccatccggtgcctcctgcagcccgcctgctgggcagggccggcgcggcccggccatggagtcctacgacatcatcgccaaccagcctgtggtcatcgacaacggttcgggggtgattaaagctggctttgcaggagaccagattcccaaatactgtttcccaaactatgtcgggcggccgaagcacatgcgggtgatggctggagccctggagggggacctcttcatcggaccaaaagcagaggagcaccgggggctgctgaccatccgctaccccatggagcacggcgtggtgcgagactggaacgacatggaacgcatctggcagtacgtctactccaaggatcagctgcagaccttctcggaggagcatcctgtgctcctcacggaggccccgctcaacccgagtaagaaccgggagaaggcggcagaggtgttctttgagaccttcaacgtgccggccctgttcatctccatgcaggctgtgctcagtctgtgagtgctccctaagcctggcctccctgagtcctgtcctccctgtgccgtcctgcttgccatgaccagggtctgacttccctggaaaaacagccccttgatgactgttcctctagggagtccctcgtgtcctctcttcagactagataatgcagatgtgccagggttcctcccctgggtgaggaggtccccgtgcctcagtggctgaggtgaggggatgctgacctggtgacaggtacgcaacaggacgcacgacaggagtggttctagactcaggggacggggtcactcatgctgtgcccatctatgagggctttgccatgcctcactccatcatgcgggtggacattgccggccgcgacgtctcccgctacctccgactcctgctgcgcaaggaaggggttgacttccatacctcggctgagtttgaggttgtccggacaatcaaagagcgagcgtgctacctgtccatcaacccacagaaggatgaggctctggagacggagaaggtgcagtacacgttgccagacggcagcacgcttgatgtggggcctgcacgattccgggcccccgagctgctgttccagccggaccttgtgggggatgagagtgaggggctccatgaggtggtggccttcgccatacacaagtccgacatggacctgcgccggacgctgttcgccaacatcgtgctctcaggtggctcaacgcttttcaaaggcttcggagaccgattactcagtgaagtgaagaagcttgccccaaaggatatcaaaatcaagatctcagccccgcaggaacggctgtactccacatggattggcggctccatcctggcctcgctggacacttttaagaagatgtgggtgtccaaaaaggagtatgaagaggatggctcccgtgctattcatcgcaaaactttctagtgcccaaggagggcggggcatgttgggagagggggagggaggggagacagagcctttaaccctttttggtcttggctcgtatactaggcttagggtcccctgcatgccctgaacccctgggtgggtggcacagcagtgcccccctgcagccttcccctctacacaggacatgcacacacaagtaacattgagctgcatggacaggagccttgagctggcgtgtgggaattgagcgccatgtcaggctgttgtgggtatccccctggcagggccagctaggcctgtggttccctgctccgactctcagggctgcctccctgagctccagggccagaatgcctggatgcctgggtagccagtttggggagtgggctgcaaggggcagccagcagctcccactggtgtgtcactgcatccattgccacctcctgttcgtgacctgacagggtgacacagcccctttcacactctgtcctcctatcttcctgggtagatgccctggtgtagggctgagtactgaatggtcttccatccccagcaagggggtgcagcccagggtcaggcccttcagagccagggcagaggacgcacggtggctagagccgctgcactatccttttcagagcacttcatccacttgctcctccctctaccctcggcaccctgggtgggaaagggttgatgctcatcatttattgaggggaagccacttaataaggagtcagacctaaaagggggtgggggacattttcttacctcacccaagaaagaggtcgtcacttttgctgtggccagggccccacctccctctctcagatatgtacaataatttaacacggttgcctgaaaaaaacttttgtaaatcattatagtaataattatggacaaggcccagtgtgtggctctgttttcttgtggctctctgt

SEQ ID NO: 301672 - DNA, 2041 bp, Homo sapiens
ctcgcgtaggctgcaggctcggggagggagggcagcggcgccgcgtcgggagccgccgccgtcccggtcctcccgcccgcccgcccatccggtgcctcctgcagcccgcctgctgggcagggccggcgcggcccggccatggagtcctacgacatcatcgccaaccagcctgtggtcatcgacaacggttcgggggtgattaaagctggctttgcaggagaccagattcccaaatactgtttcccaaactatgtcgggcggccgaagcacatgcgggtgatggctggagccctggagggggacctcttcatcggaccaaaagcagaggagcaccgggggctgctgaccatccgctaccccatggagcacggcgtggtgcgagactggaacgacatggaacgcatctggcagtacgtctactccaaggatcagctgcagaccttctcggaggagcatcctgtgctcctcacggaggccccgctcaacccgagtaagaaccgggagaaggcggcagaggtgttctttgagaccttcaacgtgccggccctgttcatctccatgcaggctgtgctcagtctcgcaaggaaggggttgacttccatacctcggctgagtttgaggttgtccggacaatcaaagagcgagcgtgctacctgtccatcaacccacagaaggatgaggctctggagacggagaaggtgcagtacacgttgccagacggcagcacgcttgatgtggggcctgcacgattccgggcccccgagctgctgttccagccggaccttgtgggggatgagagtgaggggctccatgaggtggtggccttcgccatacacaagtccgacatggacctgcgccggacgctgttcgccaacatcgtgctctcaggtggctcaacgcttttcaaaggcttcggagaccgattactcagtgaagtgaagaagcttgccccaaaggatatcaaaatcaagatctcagccccgcaggaacggctgtactccacatggattggcggctccatcctggcctcgctggacacttttaagaagatgtgggtgtccaaaaaggagtatgaagaggatggctcccgtgctattcatcgcaaaactttctagtgcccaaggagggcggggcatgttgggagagggggagggaggggagacagagcctttaaccctttttggtcttggctcgtatactaggcttagggtcccctgcatgccctgaacccctgggtgggtggcacagcagtgcccccctgcagccttcccctctacacaggacatgcacacacaagtaacattgagctgcatggacaggagccttgagctggcgtgtgggaattgagcgccatgtcaggctgttgtgggtatccccctggcagggccagctaggcctgtggttccctgctccgactctcagggctgcctccctgagctccagggccagaatgcctggatgcctgggtagccagtttggggagtgggctgcaaggggcagccagcagctcccactggtgtgtcactgcatccattgccacctcctgttcgtgacctgacagggtgacacagcccctttcacactctgtcctcctatcttcctgggtagatgccctggtgtagggctgagtactgaatggtcttccatccccagcaagggggtgcagcccagggtcaggcccttcagagccagggcagaggacgcacggtggctagagccgctgcactatccttttcagagcacttcatccacttgctcctccctctaccctcggcaccctgggtgggaaagggttgatgctcatcatttattgaggggaagccacttaataaggagtcagacctaaaagggggtgggggacattttcttacctcacccaagaaagaggtcgtcacttttgctgtggccagggccccacctccctctctcagatatgtacaataatttaacacggttgcctgaaaaaaacttttgtaaatcattatagtaataattatggacaaggcccagtgtgtggctctgttttcttgtggctctctgt

SEQ ID NO: 301673 - DNA, 2268 bp, Homo sapiens
  misc_feature (2126)..(2126): n is a, c, g, or t
  misc_feature (2130)..(2130): n is a, c, g, or t
ctcgcgtaggctgcaggctcggggagggagggcagcggcgccgcgtcgggagccgccgccgtcccggtcctcccgcccgcccgcccatccggtgcctcctgcagcccgcctgctgggcagggccggcgcggcccggccatggagtcctacgacatcatcgccaaccagcctgtggtcatcgacaacggttcgggggtgattaaagctggctttgcaggagaccagattcccaaatactgtttcccaaactatgtcgggcggccgaagcacatgcgggtgatggctggagccctggagggggacctcttcatcggaccaaaagcagaggagcaccgggggctgctgaccatccgctaccccatggagcacggcgtggtgcgagactggaacgacatggaacgcatctggcagtacgtctactccaaggatcagctgcagaccttctcggaggagcatcctgtgctcctcacggaggccccgctcaacccgagtaagaaccgggagaaggcggcagaggtgttctttgagaccttcaacgtgccggccctgttcatctccatgcaggctgtgctcagtctgtacgcaacaggacgcacgacaggagtggttctagactcaggggacggggtcactcatgctgtgcccatctatgagggctttgccatgcctcactccatcatgcgggtggacattgccggccgcgacgtctcccgctacctccgactcctgctgcgcaaggaaggggttgacttccatacctcggctgagtttgaggttgtccggacaatcaaagagcgagcgtgctacctgtccatcaacccacagaaggatgaggctctggagacggagaaggtgcagtacacgttgccagacggcagcacgcttgatgtggggcctgcacgattccgggcccccgagctgctgttccagccggaccttgtgggggatgagagtgaggggctccatgaggtggtggccttcgccatacacaagtccgacatggacctgcgccggacgctgttcgccaacatcgtgctctcaggtggctcaacgcttttcaaaggcttcggagaccgattactcagtgaagtgaagaagcttgccccaaaggatatcaaaatcaagatctcagccccgcaggaacggctgtactccacatggattggcggctccatcctggcctcgctggacacttttaagaagatgtgggtgtccaaaaaggagtatgaagaggatggctcccgtgctattcatcgcaaaactttctagtgcccaaggagggcggggcatgttgggagagggggagggaggggagacagagcctttaaccctttttggtcttggctcgtatactaggcttagggtcccctgcatgccctgaacccctgggtgggtggcacagcagtgcccccctgcagccttcccctctacacaggacatgcacacacaagtaacattgagctgcatggacaggagccttgagctggcgtgtgggaattgagcgccatgtcaggctgttgtgggtatccccctggcagggccagctaggcctgtggttccctgctccgactctcagggctgcctccctgagctccagggccagaatgcctggatgcctgggtagccagtttggggagtgggctgcaaggggcagccagcagctcccactggtgtgtcactgcatccattgccacctcctgttcgtgacctgacagggtgacacagcccctttcacactctgtcctcctatcttcctgggtagatgccctggtgtagggctgagtactgaatggtcttccatccccagcaagggggtgcagcccagggtcaggcccttcagagccagggcagaggacgcacggtggctagagccgctgcactatccttttcagagcacttcatccacttgctcctccctctaccctcggcaccctgggtgggaaagggttgatgctcatcatttattgaggggaagccacttaataaggagtcagacctaaaagggggtgggggacattttcttacctcacccaagaaagaggtcgtcacttttgctgtggccagggccccacctccctctctcagatatgtacaataatttaacacggttgcctgaaaaaacttgnatcntttggatacttggccggaacaaaaaaggggggcgctaagattcctggggccagtatcgtcccttcttgcagggccataggcggttaacaacggcggtacgcggggagcggggcgtgagcaccggggggcacccaaaag

SEQ ID NO: 301674 - DNA, 1647 bp, Homo sapiens
cgtacaaggaccgccccatctcagactgccttcttcctgcagcgaacagaagctgcaaagtcgagttgcaggagcgcatcaaggcggaggagcagcggcgtgctgatgtgcaggataggctggagcgtaccatgcgggcaatgcatatgaccaaggaggccctggaacacctggcaagcaagctagaccacatcacagtagcagactccgcccctgaggaagctccgcccagagccccgcaggacgtgagaggcagctccaccatcacgcaggtggattcccgccccaaagtccactcaagagaacccaccccatgccctgtccagtacatgagaggcccgaacacaggggaaactccaacctgctccgcggggccttgtacgcgtatctcagccccgcaggaacggctgtactccacatggattgggtgaggcggggctcaagggagggctctgggaggagaccactttaccctggatgctcctcccattgttggcctaggccacgtggaggtgggtggatttccctcccaaattagggaaatgcaactctgagcacccaggaaggtggttggctccctgacaggtccacagcaatactatccctccatccccacagcggctccatcctggcctcgctggacacttttaagaagatgtgggtgtccaaaaaggagtatgaagaggatggctcccgtgctattcatcgcaaaactttctagtgcccaaggagggcggggcatgttgggagagggggagggaggggagacagagcctttaaccctttttggtcttggctcgtatactaggcttagggtcccctgcatgccctgaacccctgggtgggtggcacagcagtgcccccctgcagccttcccctctacacaggacatgcacacacaagtaacattgagctgcatggacaggagccttgagctggcgtgtgggaattgagcgccatgtcaggctgttgtgggtatccccctggcagggccagctaggcctgtggttccctgctccgactctcagggctgcctccctgagctccagggccagaatgcctggatgcctgggtagccagtttggggagtgggctgcaaggggcagccagcagctcccactggtgtgtcactgcatccattgccacctcctgttcgtgacctgacagggtgacacagcccctttcacactctgtcctcctatcttcctgggtagatgccctggtgtagggctgagtactgaatggtcttccatccccagcaagggggtgcagcccagggtcaggcccttcagagccagggcagaggacgcacggtggctagagccgctgcactatccttttcagagcacttcatccacttgctcctccctctaccctcggcaccctgggtgggaaagggttgatgctcatcatttattgaggggaagccacttaataaggagtcagacctaaaagggggtgggggacattttcttacctcacccaagaaagaggtcgtcacttttgctgtggccagggccccacctccctctctcagatatgtacaataatttaacacggttgcctgaaaaaaacttttgtaaatcattatagtaataattatggacaaggcccagtgtgtggctctgttttcttgtggctctctgt

SEQ ID NO: 301675 - DNA, 928 bp, Homo sapiens
  misc_feature (28)..(28): n is a, c, g, or t
  misc_feature (33)..(33): n is a, c, g, or t
taacgaattcaggctaggtacgaggccngtggntgggagggaggggagacagagcctttaaccctttttggtcttggctcgtatactaggcttagggtcccctgcatgccctgaacccctgggtgggtggcacagcagtgcccccctgcagccttcccctctacacaggacatgcacacacaagtaacattgagctgcatggacaggagccttgagctggcgtgtgggaattgagcgccatgtcaggctgttgtgggtatccccctggcagggccagctaggcctgtggttccctgctccgactctcagggctgcctccctgagctccagggccagaatgcctggatgcctgggtagccagtttggggagtgggctgcaaggggcagccagcagctcccactggtgtgtcactgcatccattgccacctcctgttcgtgacctgacagggtgacacagcccctttcacactctgtcctcctatcttcctgggtagatgccctggtgtagggctgagtactgaatggtcttccatccccagcaagggggtgcagcccagggtcaggcccttcagagccagggcagaggacgcacggtggctagagccgctgcactatccttttcagagcacttcatccacttgctcctccctctaccctcggcaccctgggtgggaaagggttgatgctcatcatttattgaggggaagccacttaataaggagtcagacctaaaagggggtgggggacattttcttacctcacccaagaaagaggtcgtcacttttgctgtggccagggccccacctccctctctcagatatgtacaataatttaacacggttgcctgaaaaaaacttttgtaaatcattatagtaataattatggacaaggcccagtgtgtggctctgttttcttgtggctctctgt

SEQ ID NO: 301676 - DNA, 2153 bp, Homo sapiens
ctcgcgtaggctgcaggctcggggagggagggcagcggcgccgcgtcgggagccgccgccgtcccggtcctcccgcccgcccgcccatccggtgcctcctgcagcccgcctgctgggcagggccggcgcggcccggccatggagtcctacgacatcatcgccaaccagcctgtggtcatcgacaacggttcgggggtgattaaagctggctttgcaggagaccagattcccaaatactgtttcccaaactatgtcgggcggccgaagcacatgcgggtgatggctggagccctggagggggacctcttcatcggaccaaaagcagaggagcaccgggggctgctgaccatccgctaccccatggagcacggcgtggtgcgagactggaacgacatggaacgcatctggcagtacgtctactccaaggatcagctgcagaccttctcggaggagcatcctgtgctcctcacggaggccccgctcaacccgagtaagaaccgggagaaggcggcagaggtgttctttgagaccttcaacgtgccggccctgttcatctccatgcaggctgtgctcagtctgtacgcaacaggacgcacgacaggagtggttctagactcaggggacggggtcactcatgctgtgcccatctatgagggctttgccatgcctcactccatcatgcgggtggacattgccggccgcgacgtctcccgctacctccgactcctgctgcgcaaggaaggggttgacttccatacctcggctgagtttgaggttgtccggacaatcaaagagcgagcgtgctacctgtccatcaacccacagaaggatgaggctctggagacggagaaggtgcagtacacgttgccagacggcagcacgcttgatgtggggcctgcacgattccgggcccccgagctgctgttccagccggaccttgtgggggatgagagtgaggggctccatgaggtggtggccttcgccatacacaagtccgacatggacctgcgccggacgctgttcgccaacatcgtgctctcaggtggctcaacgcttttcaaaggcttcggagaccgattactcagtgaagtgaagaagcttgccccaaaggatatcaaaatcaagatctcagccccgcaggaacggctgtactccacatggattggcggctccatcctggcctcgctggacacttttaagaagatgtgggtgtccaaaaaggagtatgaagaggatggctcccgtgctattcatcgcaaaactttctagtgcccaaggagggcggggcatgttgggagagggggagggaggggagacagagcctttaaccctttttggtcttggctcgtatactaggcttagggtcccctgcatgccctgaacccctgggtgggtggcacagcagtgcccccctgcagccttcccctctacacaggacatgcacacacaagtaacattgagctgcatggacaggagccttgagctggcgtgtgggaattgagcgccatgtcaggctgttgtgggtatccccctggcagggccagctaggcctgtggttccctgctccgactctcagggctgcctccctgagctccagggccagaatgcctggatgcctgggtagccagtttggggagtgggctgcaaggggcagccagcagctcccactggtgtgtcactgcatccattgccacctcctgttcgtgacctgacagggtgacacagcccctttcacactctgtcctcctatcttcctgggtagatgccctggtgtagggctgagtactgaatggtcttccatccccagcaagggggtgcagcccagggtcaggcccttcagagccagggcagaggacgcacggtggctagagccgctgcactatccttttcagagcacttcatccacttgctcctccctctaccctcggcaccctgggtgggaaagggttgatgctcatcatttattgaggggaagccacttaataaggagtcagacctaaaagggggtgggggacattttcttaccccacctccctctctcagatatgtacaataatttaacacggttgcctgaaaaaaacttttgtaaatcattatagtaataattatggacaaggcccagtgtgtggctctgttttcttgtggctctctgt

SEQ ID NO: 301677 - DNA, 1739 bp, Homo sapiens
  misc_feature (1738)..(1738): n is a, c, g, or t
ctcgcgtaggctgcaggctcggggagggagggcagcggcgccgcgtcgggagccgccgccgtcccggtcctcccgcccgcccgcccatccggtgcctcctgcagcccgcctgctgggcagggccggcgcggcccggccatggagtcctacgacatcatcgccaaccagcctgtggtcatcgacaacggttcgggggtgattaaagctggctttgcaggagaccagattcccaaatactgtttcccaaactatgtcgggcggccgaagcacatgcgggtgatggctggagccctggagggggacctcttcatcggaccaaaagcagaggagcaccgggggctgctgaccatccgctaccccatggagcacggcgtggtgcgagactggaacgacatggaacgcatctggcagtacgtctactccaaggatcagctgcagaccttctcggaggagcatcctgtgctcctcacggaggccccgctcaacccgagtaagaaccgggagaaggcggcagaggtgttctttgagaccttcaacgtgccggccctgttcatctccatgcaggctgtgctcagtctgtacgcaacaggacgcacgacaggagtggttctagactcaggggacggggtcactcatgctgtgcccatctatgagggctttgccatgcctcactccatcatgcgggtggacattgccggccgcgacgtctcccgctacctccgactcctgctgcgcaaggaaggggttgacttccatacctcggctgagtttgaggttgtccggacaatcaaagagcgagcgtgctacctgtccatcaacccacagaaggatgaggctctggagacggagaaggtgcagtacacgttgccagacggcagcacgcttgatgtggggcctgcacgattccgggcccccgagctgctgttccagccggaccttgtgggggatgagagtgaggggctccatgaggtggtggccttcgccatacacaagtccgacatggacctgcgccggacgctgttcgccaacatcgtgctctcaggtggctcaacgcttttcaaaggcttcggagaccgattactcagtgaagtgaagaagcttgccccaaaggatatcaaaatcaagatctcagccccgcaggaacggctgtactccacatggattggcggctccatcctggcctcgctggacacttttaagaagatgtgggtgtccaaaaaggagtatgaagaggatggctcccgtgctattcatcgcaaaactttctagtgcccaaggagggcggggcatgttgggagagggggagggaggggagacagagcctttaaccctttttggtcttggctcgtatactaggcttagggtcccctgcatgccctgaacccctgggtgggtggcacagcagtgcccccctgcagccttcccctctacacaggacatgcacacacaagtaacattgagctgcatggacaggagccttgagctggcgtgtgggaattgagcgccatgtcaggctgttgtgggtatccccctggcagggccagctaggcctgtggttccctgctccgactctcagggctgcctccctgagctccagggccagaatgcctggatgcctgggtagccagtttggggagtgggctgcaaggggcagccagcagctcccactggtgtgtcactgctgtgctagccacccaggggttccaggagcttgacaggggtacccctagagcctagnt

SEQ ID NO: 301678 - DNA, 1654 bp, Homo sapiens
ctcgcgtaggctgcaggctcggggagggagggcagcggcgccgcgtcgggagccgccgccgtcccggtcctcccgcccgcccgcccatccggtgcctcctgcagcccgcctgctgggcagggccggcgcggcccggccatggagtcctacgacatcatcgccaaccagcctgtggtcatcgacaacggttcgggggtgattaaagctggctttgcaggagaccagattcccaaatactgtttcccaaactatgtcgggcggccgaagcacatgcgggtgatggctggagccctggagggggacctcttcatcggaccaaaagcagaggagcaccgggggctgctgaccatccgctaccccatggagcacggcgtggtgcgagactggaacgacatggaacgcatctggcagtacgtctactccaaggatcagctgcagaccttctcggaggagcatcctgtgctcctcacggaggccccgctcaacccgagtaagaaccgggagaaggcggcagaggtgttctttgagaccttcaacgtgccggccctgttcatctccatgcaggctgtgctcagtctgtacgcaacaggacgcacgacaggagtggttctagactcaggggacggggtcactcatgctgtgcccatctatgagggctttgccatgcctcactccatcatgcgggtggacattgccggccgcgacgtctcccgctacctccgactcctgctgcgcaaggaaggggttgacttccatacctcggctgagtttgaggttgtccggacaatcaaagagcgagcgtgctacctgtccatcaacccacagaaggatgaggctctggagacggagaaggtgcagtacacgttgccagacggcagcacgcttgatgtggggcctgcacgattccgggcccccgagctgctgttccagccggaccttgtgggggatgagagtgaggggctccatgaggtggtggccttcgccatacacaagtccgacatggacctgcgccggacgctgttcgccaacatcgtgctctcaggtggctcaacgcttttcaaaggcttcggagaccgattactcagtgaagtgaagaagcttgccccaaaggatatcaaaatcaagatctcagccccgcaggaacggctgtactccacatggattggcggctccatcctggcctcgctggacacttttaagaagatgtgggtgtccaaaaaggagtatgaagaggatggctcccgtgctattcatcgcaaaactttctagtgcccaaggagggcggggcatgttgggagaggccagggcagaggacgcacggtggctagagccgctgcactatccttttcagagcacttcatccacttgctcctccctctaccctcggcaccctgggtgggaaagggttgatgctcatcatttattgaggggaagccacttaataaggagtcagacctaaaagggggtgggggacattttcttacctcacccaagaaagaggtcgtcacttttgctgtggccagggccccacctccctctctcagatatgtacaataatttaacacggttgcctgaaaaaaacttttgtaaatcattatagtaataattatggacaaggcccagtgtgtggctctgttttcttgtggctctctgt

SEQ ID NO: 301679 - DNA, 1493 bp, Homo sapiens
ctcgcgtaggctgcaggctcggggagggagggcagcggcgccgcgtcgggagccgccgccgtcccggtcctcccgcccgcccgcccatccggtgcctcctgcagcccgcctgctgggcagggccggcgcggcccggccatggagtcctacgacatcatcgccaaccagcctgtggtcatcgacaacggttcgggggtgattaaagctggctttgcaggagaccagattcccaaatactgtttcccaaactatgtcgggcggccgaagcacatgcgggtgatggctggagccctggagggggacctcttcatcggaccaaaagcagaggagcaccgggggctgctgaccatccgctaccccatggagcacggcgtggtgcgagactggaacgacatggaacgcatctggcagtacgtctactccaaggatcagctgcagaccttctcggaggagcatcctgtgctcctcacggaggccccgctcaacccgagtaagaaccgggagaaggcggcagaggtgttctttgagaccttcaacgtgccggccctgttcatctccatgcaggctgtgctcagtctgtacgcaacaggacgcacgacaggagtggttctagactcaggggacggggtcactcatgctgtgcccatctatgagggctttgccatgcctcactccatcatgcgggtggacattgccggccgcgacgtctcccgctacctccgactcctgctgcgcaaggaaggggttgacttccatacctcggctgagtttgaggttgtccggacaatcaaagagcgagcgtgctacctgtccatcaacccacagaaggatgaggctctggagacggagaaggtgcagtacacgttgccagacggcagcacgcttgatgtggggcctgcacgattccgggcccccgagctgctgttccagccggaccttgtgggggatgagagtgaggggctccatgaggtggtggccttcgccatacacaagtccgacatggacctgcgccggacgctgttcgccaacatcgtgctctcaggtggctcaacgcttttcaaaggcttcggagaccgattactcagtgaagtgaagaagcttgccccaaaggatatcaaaatcaagatctcagccccgcaggaacggctgtactccacatggattggcggctccatcctggcctcgctggacacttttaagaagatgtgggtgtccaaaaaggagtatgaagaggatggctcccgtgctattcatcgcaaaactttctagtgcccaaggagggcggggcatgttgggagaggggggtgggggacattttcttacctcacccaagaaagaggtcgtcacttttgctgtggccagggccccacctccctctctcagatatgtacaataatttaacacggttgcctgaaaaaaacttttgtaaatcattatagtaataattatggacaaggcccagtgtgtggctctgttttcttgtggctctctgt

SEQ ID NO: 301680 - DNA, 1356 bp, Homo sapiens
ctcgcgtaggctgcaggctcggggagggagggcagcggcgccgcgtcgggagccgccgccgtcccggtcctcccgcccgcccgcccatccggtgcctcctgcagcccgcctgctgggcagggccggcgcggcccggccatggagtcctacgacatcatcgccaaccagcctgtggtcatcgacaacggttcgggggtgattaaagctggctttgcaggagaccagattcccaaatactgtttcccaaactatgtcgggcggccgaagcacatgcgggtgatggctggagccctggagggggacctcttcatcggaccaaaagcagaggagcaccgggggctgctgaccatccgctaccccatggagcacggcgtggtgcgagactggaacgacatggaacgcatctggcagtacgtctactccaaggatcagctgcagaccttctcggaggagcatcctgtgctcctcacggaggccccgctcaacccgagtaagaaccgggagaaggcggcagaggtgttctttgagaccttcaacgtgccggccctgttcatctccatgcaggctgtgctcagtctgtacgcaacaggacgcacgacaggagtggttctagactcaggggacggggtcactcatgctgtgcccatctatgagggctttgccatgcctcactccatcatgcgggtggacattgccggccgcgacgtctcccgctacctccgactcctgctgcgcaaggaaggggttgacttccatacctcggctgagtttgaggttgtccggacaatcaaagagcgagcgtgctacctgtccatcaacccacagaaggatgaggctctggagacggagaaggtgcagtacacgttgccagacggcagcacgcttgatgtggggcctgcacgattccgggcccccgagctgctgttccagccggaccttgtgggggatgagagtgaggggctccatgaggtggtggccttcgccatacacaagtccgacatggacctgcgccggacgctgttcgccaacatcgtgctctcaggtggctcaacgcttttcaaaggcttcggagaccgattactcagtgaagtgaagaagcttgccccaaaggatatcaaaatcaagatctcagccccgcaggaacggctgtactccacatggattggcggctccatcctggcctcgctggacacttttaagaagatgtgggtgtccaaaaaggagtatgaagaggatggctcccgtgctattcatcgcaaaactttctagtgcccaaggagggcggggcatgttgggagaggacctgaaccctgggtgggtgggtgcccggaaagcgggtgcagcggggcctgtacg

SEQ ID NO: 301681 - DNA, 1774 bp, Homo sapiens
ctcgcgtaggctgcaggctcggggagggagggcagcggcgccgcgtcgggagccgccgccgtcccggtcctcccgcccgcccgcccatccggtgcctcctgcagcccgcctgctgggcagggccggcgcggcccggccatggagtcctacgacatcatcgccaaccagcctgtggtcatcgacaacggttcgggggtgattaaagctggctttgcaggagaccagattcccaaatactgtttcccaaactatgtcgggcggccgaagcacatgcgggtgatggctggagccctggagggggacctcttcatcggaccaaaagcagaggagcaccgggggctgctgaccatccgctaccccatggagcacggcgtggtgcgagactggaacgacatggaacgcatctggcagtacgtctactccaaggatcagctgcagaccttctcggaggagcatcctgtgctcctcacggaggccccgctcaacccgagtaagaaccgggagaaggcggcagaggtgttctttgagaccttcaacgtgccggccctgttcatctccatgcaggctgtgctcagtctgtacgcaacaggacgcacgacaggagtggttctagactcaggggacggggtcactcatgctgtgcccatctatgagggctttgccatgcctcactccatcatgcgggtggacattgccggccgcgacgtctcccgctacctccgactcctgctgcgcaaggaaggggttgacttccatacctcggctgagtttgaggttgtccggacaatcaaagagcgagcgtgctacctgtccatcaacccacagaaggatgaggctctggagacggagaaggtgcagtacacgttgccagacggcagcacgcttgatgtggggcctgcacgattccgggcccccgagctgctgttccagccggaccttgtgggggatgagagtgaggggctccatgaggtggtggccttcgccatacacaagtccgacatggacctgcgccggacgctgttcgccaacatcgtgctctcaggtggctcaacgcttttcaaaggcttcggagaccgattactcagtgaagtgaagaagcttgccccaaaggatatcaaaatcaagatctcagccccgcaggaacggctgtactccacatggattgggtgaggcggggctcaagggagggctctgggaggagaccactttaccctggatgctcctcccattgttggcctaggccacgtggaggtgggtggatttccctcccaaattagggaaatgcaactctgagcacccaggaaggtggttggctccctgacaggtccacagcaatactatccctccatccccacagcggctccatcctggcctcgctggacacttttaagaagatgtgggtgtccaaaaaggagtatgaagaggatggctcccgtgctattcatcgcaaaactttctagtgcccaaggagggcggggcatgttgggagaggccttgtacgcgtacaaggccccgcaggcacaagaaaagtagctgtgatctaggtctgcactaaagctgcctttcctggcactcagaagtgcccttccagtgcctaactgcagaagggtggcctcagcctcctcctcctcctccttggattcctcctcacggatctgcaccagcaactgaaagaggtttggggctggcccttcaccagccccggtaagccacagctgccttaggattggcccgatgtggtaggcccggcaatgactgctctaggagggcatgg

SEQ ID NO: 301682 - DNA, 1377 bp, Homo sapiens
ctcgcgtaggctgcaggctcggggagggagggcagcggcgccgcgtcgggagccgccgccgtcccggtcctcccgcccgcccgcccatccggtgcctcctgcagcccgcctgctgggcagggccggcgcggcccggccatggagtcctacgacatcatcgccaaccagcctgtggtcatcgacaacggttcgggggtgattaaagctggctttgcaggagaccagattcccaaatactgtttcccaaactatgtcgggcggccgaagcacatgcgggtgatggctggagccctggagggggacctcttcatcggaccaaaagcagaggagcaccgggggctgctgaccatccgctaccccatggagcacggcgtggtgcgagactggaacgacatggaacgcatctggcagtacgtctactccaaggatcagctgcagaccttctcggaggagcatcctgtgctcctcacggaggccccgctcaacccgagtaagaaccgggagaaggcggcagaggtgttctttgagaccttcaacgtgccggccctgttcatctccatgcaggctgtgctcagtctgtacgcaacaggacgcacgacaggagtggttctagactcaggggacggggtcactcatgctgtgcccatctatgagggctttgccatgcctcactccatcatgcgggtggacattgccggccgcgacgtctcccgctacctccgactcctgctgcgcaaggaaggggttgacttccatacctcggctgagtttgaggttgtccggacaatcaaagagcgagcgtgctacctgtccatcaacccacagaaggatgaggctctggagacggagaaggtgcagtacacgttgccagacggcagcacgcttgatgtggggcctgcacgattccgggcccccgagctgctgttccagccggaccttgtgggggatgagagtgaggggctccatgaggtggtggccttcgccatacacaagtccgacatggacctgcgccggacgctgttcgccagggcagaggacgcacggtggctagagccgctgcactatccttttcagagcacttcatccacttgctcctccctctaccctcggcaccctgggtgggaaagggttgatgctcatcatttattgaggggaagccacttaataaggagtcagacctaaaagggggtgggggacattttcttacctcacccaagaaagaggtcgtcacttttgctgtggccagggccccacctccctctctcagatatgtacaataatttaacacggttgcctgaaaaaaacttttgtaaatcattatagtaataattatggacaaggcccagtgtgtggctctgttttcttgtggctctctgt

SEQ ID NO: 301683 - DNA, 524 bp, Homo sapiens
ctcgcgtaggctgcaggctcggggagggagggcagcggcgccgcgtcgggagccgccgccgtcccggtcctcccgcccgcccgcccatccggtgcctcctgcagcccgcctgctgggcagggccggcgcggcccggccatggagtcctacgacatcatcgccaaccagcctgtggtcatcgacaacggttcgggggtgattaaagctggctttgcaggagaccagattcccaaatactgtttcccaaactatgtcgggcggccgaagcacatgcgggtgatggctggagccctggagggggacctcttcatcggaccaaaagcagaggagcaccgggggctgctgaccatccgctaccccatggagcacggcgtggtgcgagactggaacgacatggaacgcatctggcagtacgtctactccaaggatcagctgcagaccttctcggaggagcatcctgtgctcctcacggaggcccccgctcaacccacagaactaatcatattttacatcttcttctggaa

SEQ ID NO: 301684 - DNA, 109 bp, Homo sapiens
gagactggaacgacatggaacgcatctggcagtacgtctactccaaggatcagctgcagaccttctcggaggaggtgtggcggctgcccctcctgcatgctctgcattc

SEQ ID NO: 301685 - DNA, 524 bp, Homo sapiens
cttgtattactttctagtctgtgctctctctccttggccccaaaggactctcccccatatcatccttcatttcatttgtaaaacgctggaaattttgctctactcccctttttgctaggtatacatttacaatgcctttcacactaggctataaacattacaaactaccagtaggtgccactgtccaacaaataatgctactgcatctcctggagagttagacgtttccagtttggaggacagacatgtgatcccccaaaaacaaccaagtaagctagatatggaacagataaaggctaacatcttgaagcttttaataaggtcttgttaaatgttatagcctggattcatctctgctataggggggcttgttggtttatcttcatatgatttttatgaatataaagaatatgaagataaaccaacaagcccccctatagcagagatgaatccaggctataacatttaacatgaccttattaaaagcttcaagatgttagcctttatctgttccatatctagct

SEQ ID NO: 301686 - DNA, 351 bp, Homo sapiens
acagtagtttagaggtaatcacaattttgtttgtagaaagatgtgtagaaattaatctgtcttgacgatgtttattatattctttagggtgatccaggtcctcaaggtatctcagggaaagatggaccagcaggattacgtggtttcccaggggaaagaggtcttcctggagctcagctggaaaatcgggtcactcccaccggaatactgcacttttccgaccggcttaaaaaacggcgcaccacgagattatatccggcacctggctcagagggtcctacgcccacggagtctcgctgattgctagcacagcagtctgagatcaaactgcaaggtggcagcgaggctggg

SEQ ID NO: 301687 - DNA, 219 bp, Homo sapiens
ggaacaagcaaatacacatgttaattccatgtgaatatttgcagtttattggagaaagtgctttgaaagcaatatctctttgtacatagcaatgtacaaatatatttctttcaatgatactgaaagcctactttccaggtgtttagagttgcttgagtagtaacaaaatcgcatcccatcacacgctatcaaattgtaatttaaatgcttaccttgctt

SEQ ID NO: 301688 - DNA, 7275 bp, Homo sapiens
ctcagcttgttggtggaagcccctcatctgccttcattctgaaggcagggcccggcagaggaaggatcagagggtcgcggccggagggtcccggccggtggggccaactcagagggagaggaaagggctagagacacgaagaacgcaaaccatcaaatttagaagaaaaagccctttgactttttccccctctccctccccaatggctgtgtagcaaacatccctggcgataccttggaaaggacgaagttggtctgcagtcgcaatttcgtgggttgagttcacagttgtgagtgcggggctcggagatggagccgtggtcctctaggtggaaaacgaaacggtggctctgggatttcaccgtaacaaccctcgcattgaccttcctcttccaagctagagaggtcagaggagctgctccagttgatgtactaaaagcactagattttcacaattctccagagggaatatcaaaaacaacgggattttgcacaaacagaaagaattctaaaggctcagatactgcttacagagtttcaaagcaagcacaactcagtgccccaacaaaacagttatttccaggtggaactttcccagaagacttttcaatactatttacagtaaaaccaaaaaaaggaattcagtctttccttttatctatatataatgagcatggtattcagcaaattggtgttgaggttgggagatcacctgtttttctgtttgaagaccacactggaaaacctgccccagaagactatcccctcttcagaactgttaacatcgctgacgggaagtggcatcgggtagcaatcagcgtggagaagaaaactgtgacaatgattgttgattgtaagaagaaaaccacgaaaccacttgatagaagtgagagagcaattgttgataccaatggaatcacggtttttggaacaaggattttggatgaagaagtttttgagggggacattcagcagtttttgatcacaggtgatcccaaggcagcatatgactactgtgagcattatagtccagactgtgactcttcagcacccaaggctgctcaagctcaggaacctcagatagatgagtatgcaccagaggatataatcgaatatgactatgagtatggggaagcagagtataaagaggctgaaagtgtaacagagggacccactgtaactgaggagacaatagcacagacggaggcaaacatcgttgatgattttcaagaatacaactatggaacaatggaaagttaccagacagaagctcctaggcatgtttctgggacaaatgagccaaatccagttgaagaaatatttactgaagaatatctaacgggagaggattatgattcccagaggaaaaattctgaggatacactatatgaaaacaaagaaatagacggcagggattctgatcttctggtagatggagatttaggcgaatatgatttttatgaatataaagaatatgaagataaaccaacaagcccccctaatgaagaatttggtccaggtgtaccagcagaaactgatattacagaaacaagcataaatggccatggtgcatatggagagaaaggacagaaaggagaaccagcagtggttgagcctggtatgcttgtcgaaggaccaccaggaccagcaggacctgcaggtattatgggtcctccaggtctacaaggccccactggaccccctggtgaccctggcgataggggccccccaggacgtcctggcttaccaggggctgatggtctacctggtcctcctggtactatgttgatgttaccgttccgttatggtggtgatggttccaaaggaccaaccatctctgctcaggaagctcaggctcaagctattcttcagcaggctcggattgctctgagaggcccacctggcccaatgggtctaactggaagaccaggtcctgtgggggggcctggttcatctggggccaaaggtgagagtggtgatccaggtcctcagggccctcgaggcgtccagggtccccctggtccaacgggaaaacctggaaaaaggggtcgtccaggtgcagatggaggaagaggaatgccaggagaacctggggcaaagggagatcgagggtttgatggacttccgggtctgccaggtgacaaaggtcacaggggtgaacgaggtcctcaaggtcctccaggtcctcctggtgatgatggaatgaggggagaagatggagaaattggaccaagaggtcttccaggtgaagctggcccacgaggtttgctgggtccaaggggaactccaggagctccagggcagcctggtatggcaggtgtagatggccccccaggaccaaaagggaacatgggtccccaaggggagcctgggcctccaggtcaacaagggaatccaggacctcagggtcttcctggtccacaaggtccaattggtcctcctggtgaaaaaggaccacaaggaaaaccaggacttgctggacttcctggtgctgatgggcctcctggtcatcctgggaaagaaggccagtctggagaaaagggggctctgggtccccctggtccacaaggtcctattggatacccgggcccccggggagtaaagggagcagatggtgtcagaggtctcaagggatctaaaggtgaaaagggtgaagatggttttccaggattcaaaggtgacatgggtctaaaaggtgacagaggagaagttggtcaaattggcccaagaggggaagatggccctgaaggacccaaaggtcgagcaggcccaactggagacccaggtccttcaggtcaagcaggagaaaagggaaaacttggagttccaggattaccaggatatccaggaagacaaggtccaaagggttccactggattccctgggtttccaggtgccaatggagagaaaggtgcacggggagtagctggcaaaccaggccctcggggtcagcgtggtccaacgggtcctcgaggttcaagaggtgcaagaggtcccactgggaaacctgggccaaagggcacttcaggtggcgatggccctcctggccctccaggtgaaagaggtcctcaaggacctcagggtccagttggattccctggaccaaaaggccctcctggaccacctgggaaggatgggctgccaggacaccctgggcaacgtggggagactggatttcaaggcaagaccggccctcctgggccagggggagtggttggaccacagggaccaaccggtgagactggtccaataggggaacgtgggcatcctggccctcctggccctcctggtgagcaaggtcttcctggtgctgcaggaaaagaaggtgcaaagggtgatccaggtcctcaaggtatctcagggaaagatggaccagcaggattacgtggtttcccaggggaaagaggtcttcctggagctcagggtgcacctggactgaaaggaggggaaggtccccagggcccaccaggtccagttggctcaccaggagaacgtgggtcagcaggtacagctggcccaattggtttaccagggcgcccgggacctcagggtcctcctggtccagctggagagaaaggtgctcctggagaaaaaggtccccaagggcctgcagggagagatggagttcaaggtcctgttggtctcccagggccagctggtcctgccggctcccctggggaagacggagacaagggtgaaattggtgagccgggacaaaaaggcagcaagggtgacaagggagaaaatggccctcccggtcccccaggtcttcaaggaccagttggtgcccctggaattgctggaggtgatggtgaaccaggtcctagaggacagcaggggatgtttgggcaaaaaggtgatgagggtgccagaggcttccctggacctcctggtccaataggtcttcagggtctgccaggcccacctggtgaaaaaggtgaaaatggggatgttggtcccatggggccacctggtcctccaggcccaagaggccctcaaggtcccaatggagctgatggaccacaaggacccccaggttctgttggttcagttggtggtgttggagaaaagggtgaacctggagaagcagggaacccagggcctcctggggaagcaggtgtaggcggtcccaaaggagaaagaggagagaaaggggaagctggtccacctggagctgctggacctccaggtgccaaggggccgccaggtgatgatggccctaagggtaacccgggtcctgttggttttcctggagatcctggtcctcctggggaacttggccctgcaggtcaagatggtgttggtggtgacaagggtgaagatggagatcctggtcaaccgggtcctcctggcccatctggtgaggctggcccaccaggtcctcctggaaaacgaggtcctcctggagctgcaggtgcagagggaagacaaggtgaaaaaggtgctaagggggaagcaggtgcagaaggtcctcctggaaaaaccggcccagtcggtcctcagggacctgcaggaaagcctggtccagaaggtcttcggggcatccctggtcctgtgggagaacaaggtctccctggagctgcaggccaagatggaccacctggtcctatgggacctcctggcttacctggtctcaaaggtgaccctggctccaagggtgaaaagggacatcctggtttaattggcctgattggtcctccaggagaacaaggggaaaaaggtgaccgagggctccctggaactcaaggatctccaggagcaaaaggggatgggggaattcctggtcctgctggtcccttaggtccacctggtcctccaggcttaccaggtcctcaaggcccaaagggtaacaaaggctctactggacccgctggccagaaaggtgacagtggtcttccagggcctcctgggcctccaggtccacctggtgaagtcattcagcctttaccaatcttgtcctccaaaaaaacgagaagacatactgaaggcatgcaagcagatgcagatgataatattcttgattactcggatggaatggaagaaatatttggttccctcaattccctgaaacaagacatcgagcatatgaaatttccaatgggtactcagaccaatccagcccgaacttgtaaagacctgcaactcagccatcctgacttcccagatggtgaatattggattgatcctaaccaaggttgctcaggagattccttcaaagtttactgtaatttcacatctggtggtgagacttgcatttatccagacaaaaaatctgagggagtaagaatttcatcatggccaaaggagaaaccaggaagttggtttagtgaatttaagaggggaaaactgctttcatacttagatgttgaaggaaattccatcaatatggtgcaaatgacattcctgaaacttctgactgcctctgctcggcaaaatttcacctaccactgtcatcagtcagcagcctggtatgatgtgtcatcaggaagttatgacaaagcacttcgcttcctgggatcaaatgatgaggagatgtcctatgacaataatccttttatcaaaacactgtatgatggttgtgcgtccagaaaaggctatgaaaagactgtcattgaaatcaatacaccaaaaattgatcaagtacctattgttgatgtcatgatcaatgactttggtgatcagaatcagaagttcggatttgaagttggtcctgtttgttttcttggctaagattaagacaaagaacatatcaaatcaacagaaaatataccttggtgccaccaacccattttgtgccacatgcaagttttgaataaggatggtatagaaaacaacgctgcatatacaggtaccatttaggaaataccgatgcctttgtgggggcagaatcacatggcaaaagctttgaaaatcataaagatataagttggtgtggctaagatggaaacagggctgattcttgattcccaattctcaactctccttttcctatttgaatttctttggtgctgtagaaaacaaaaaaagaaaaatatatattcataaaaaatatggtgctcattctcatccatccaggatgtactaaaacagtgtgtttaataaattgtaattattttgtgtacagttctatactgttatctgtgtccatttccaaaacttgcacgtgtccctgaattccatctgactctaattttatgagaattgcagaactctgatggcaataaatatatgtattatgaaaaaataaagttgtaatttctgatgactctaagtccctttctttggttaataataaaatgcctttgtatatattgatgttgaagagttcaattatttgatgtcgccaacaaaattctcagagggcaaaaatctggaagacttttggaagcacactctgatcaactcttctctgccgacagtcattttgctgaatttcagccaaaaatattatgcattttgatgctttattcaaggctatacctcaaactttttcttctcagaatccaggatttcacaggatacttgtatatatggaaaacaagcaagtttatatttttggacagggaaatgtgtgtaagaaagtatattaacaaatcaatgcctccgtcaagcaaacaatcatatgtatactttttttctacgttatctcatctccttgttttcagtgtgcttcaataatgcaggttaatattaaagatggaaattaagcaattatttatgaatttgtgcaatgttagattttcttatcaatcaagttcttgaatttgattctaagttgcatattataacagtctcgaaaattattttacttgcccaacaaatattacttttttcctttcaagataattttataaatcatttgacctacctaattgctaaatgaataacatatggtggactgttattaagagtatttgttttaagtcattcaggaaaatctaaacttttttttccactaaggtatttactttaaggtagcttgaaatagcaatacaatttaaaaattaaaaactgaattttgtatctattttaagtaatatatgtaagacttgaaaataaatgttttatttcttatataaagtgttaaattaattgataccagatttcactggaacagtttcaactgataatttatgacaaaagaacatacctgtaatattgaaattaaaaagtgaaatttgtcataaagaatttcttttatttttgaaatcgagtttgtaaatgtccttttaagaagggagatatgaatccaataaataaactcaagtcttggcta

SEQ ID NO: 301689 - DNA, 2992 bp, Homo sapiens
actggatatataatttggaaatcccttccaaaactagtgtacttaaaaattgacactttattcttaactgaaaagccatataaccatgttctatttctaactttacattcatttaatcaaaattatcaatattatggttacaaattaaaccatagtgttttaaatatataaatttacttagaagccttaaaaataaagcaacattaatcattactattttcaactccgtattttcaaaactaaactaggtctgtgactagttataggattctctaattcatacctactctgtttttgttttggggttttttttttgttattatttagggacctcctggcttacctggtctcaaaggtgaccctggctccaagggtgaaaagggacatcctggtttaattggcctgattggtcctccaggagaacaaggggaaaaaggtgaccgagggctccctggaactcaaggatctccaggagcaaaaggggatgggggaattcctggtcctgctggtcccttaggtccacctggtcctccaggcttaccaggtcctcaaggcccaaagggtaacaaaggctctactggacccgctggccagaaaggtgacagtggtcttccagggcctcctgggcctccaggtccacctggtgaagtcattcagcctttaccaatcttgtcctccaaaaaaacgagaagacatactgaaggcatgcaagcagatgcagatgataatattcttgattactcggatggaatggaagaaatatttggttccctcaattccctgaaacaagacatcgagcatatgaaatttccaatgggtactcagaccaatccagcccgaacttgtaaagacctgcaactcagccatcctgacttcccagatggtgaatattggattgatcctaaccaaggttgctcaggagattccttcaaagtttactgtaatttcacatctggtggtgagacttgcatttatccagacaaaaaatctgagggagtaagaatttcatcatggccaaaggagaaaccaggaagttggtttagtgaatttaagaggggaaaactgctttcatacttagatgttgaaggaaattccatcaatatggtgcaaatgacattcctgaaacttctgactgcctctgctcggcaaaatttcacctaccactgtcatcagtcagcagcctggtatgatgtgtcatcaggaagttatgacaaagcacttcgcttcctgggatcaaatgatgaggagatgtcctatgacaataatccttttatcaaaacactgtatgatggttgtgcgtccagaaaaggctatgaaaagactgtcattgaaatcaatacaccaaaaattgatcaagtacctattgttgatgtcatgatcaatgactttggtgatcagaatcagaagttcggatttgaagttggtcctgtttgttttcttggctaagattaagacaaagaacatatcaaatcaacagaaaatataccttggtgccaccaacccattttgtgccacatgcaagttttgaataaggatggtatagaaaacaacgctgcatatacaggtaccatttaggaaataccgatgcctttgtgggggcagaatcacatggcaaaagctttgaaaatcataaagatataagttggtgtggctaagatggaaacagggctgattcttgattcccaattctcaactctccttttcctatttgaatttctttggtgctgtagaaaacaaaaaaagaaaaatatatattcataaaaaatatggtgctcattctcatccatccaggatgtactaaaacagtgtgtttaataaattgtaattattttgtgtacagttctatactgttatctgtgtccatttccaaaacttgcacgtgtccctgaattccatctgactctaattttatgagaattgcagaactctgatggcaataaatatatgtattatgaaaaaataaagttgtaatttctgatgactctaagtccctttctttggttaataataaaatgcctttgtatatattgatgttgaagagttcaattatttgatgtcgccaacaaaattctcagagggcaaaaatctggaagacttttggaagcacactctgatcaactcttctctgccgacagtcattttgctgaatttcagccaaaaatattatgcattttgatgctttattcaaggctatacctcaaactttttcttctcagaatccaggatttcacaggatacttgtatatatggaaaacaagcaagtttatatttttggacagggaaatgtgtgtaagaaagtatattaacaaatcaatgcctccgtcaagcaaacaatcatatgtatactttttttctacgttatctcatctccttgttttcagtgtgcttcaataatgcaggttaatattaaagatggaaattaagcaattatttatgaatttgtgcaatgttagattttcttatcaatcaagttcttgaatttgattctaagttgcatattataacagtctcgaaaattattttacttgcccaacaaatattacttttttcctttcaagataattttataaatcatttgacctacctaattgctaaatgaataacatatggtggactgttattaagagtatttgttttaagtcattcaggaaaatctaaacttttttttccactaaggtatttactttaaggtagcttgaaatagcaatacaatttaaaaattaaaaactgaattttgtatctattttaagtaatatatgtaagacttgaaaataaatgttttatttcttatataaagtgttaaattaattgataccagatttcactggaacagtttcaactgataatttatgacaaaagaacatacctgtaatattgaaattaaaaagtgaaatttgtcataaagaatttcttttatttttgaaatcgagtttgtaaatgtccttttaagaagggagatatgaatccaataaataaactcaagtcttggcta

SEQ ID NO: 301690 - DNA, 2215 bp, Homo sapiens
agaggatccggtatagagtggcatatgaaatttccaatgggtactcagaccaatccagcccgaacttgtaaagacctgcaactcagccatcctgacttcccagatggtgaatattggattgatcctaaccaaggttgctcaggagattccttcaaagtttactgtaatttcacatctggtggtgagacttgcatttatccagacaaaaaatctgagggagtaagaatttcatcatggccaaaggagaaaccaggaagttggtttagtgaatttaagaggggaaaactgctttcatacttagatgttgaaggaaattccatcaatatggtgcaaatgacattcctgaaacttctgactgcctctgctcggcaaaatttcacctaccactgtcatcagtcagcagcctggtatgatgtgtcatcaggaagttatgacaaagcacttcgcttcctgggatcaaatgatgaggagatgtcctatgacaataatccttttatcaaaacactgtatgatggttgtgcgtccagaaaaggctatgaaaagactgtcattgaaatcaatacaccaaaaattgatcaagtacctattgttgatgtcatgatcaatgactttggtgatcagaatcagaagttcggatttgaagttggtcctgtttgttttcttggctaagattaagacaaagaacatatcaaatcaacagaaaatataccttggtgccaccaacccattttgtgccacatgcaagttttgaataaggatggtatagaaaacaacgctgcatatacaggtaccatttaggaaataccgatgcctttgtgggggcagaatcacatggcaaaagctttgaaaatcataaagatataagttggtgtggctaagatggaaacagggctgattcttgattcccaattctcaactctccttttcctatttgaatttctttggtgctgtagaaaacaaaaaaagaaaaatatatattcataaaaaatatggtgctcattctcatccatccaggatgtactaaaacagtgtgtttaataaattgtaattattttgtgtacagttctatactgttatctgtgtccatttccaaaacttgcacgtgtccctgaattccatctgactctaattttatgagaattgcagaactctgatggcaataaatatatgtattatgaaaaaataaagttgtaatttctgatgactctaagtccctttctttggttaataataaaatgcctttgtatatattgatgttgaagagttcaattatttgatgtcgccaacaaaattctcagagggcaaaaatctggaagacttttggaagcacactctgatcaactcttctctgccgacagtcattttgctgaatttcagccaaaaatattatgcattttgatgctttattcaaggctatacctcaaactttttcttctcagaatccaggatttcacaggatacttgtatatatggaaaacaagcaagtttatatttttggacagggaaatgtgtgtaagaaagtatattaacaaatcaatgcctccgtcaagcaaacaatcatatgtatactttttttctacgttatctcatctccttgttttcagtgtgcttcaataatgcaggttaatattaaagatggaaattaagcaattatttatgaatttgtgcaatgttagattttcttatcaatcaagttcttgaatttgattctaagttgcatattataacagtctcgaaaattattttacttgcccaacaaatattacttttttcctttcaagataattttataaatcatttgacctacctaattgctaaatgaataacatatggtggactgttattaagagtatttgttttaagtcattcaggaaaatctaaacttttttttccactaaggtatttactttaaggtagcttgaaatagcaatacaatttaaaaattaaaaactgaattttgtatctattttaagtaatatatgtaagacttgaaaataaatgttttatttcttatataaagtgttaaattaattgataccagatttcactggaacagtttcaactgataatttatgacaaaagaacatacctgtaatattgaaattaaaaagtgaaatttgtcataaagaatttcttttatttttgaaatcgagtttgtaaatgtccttttaagaagggagatatgaatccaataaataaactcaagtcttggcta

SEQ ID NO: 301691 - DNA, 6605 bp, Homo sapiens
ctcagcttgttggtggaagcccctcatctgccttcattctgaaggcagggcccggcagaggaaggatcagagggtcgcggccggagggtcccggccggtggggccaactcagagggagaggaaagggctagagacacgaagaacgcaaaccatcaaatttagaagaaaaagccctttgactttttccccctctccctccccaatggctgtgtagcaaacatccctggcgataccttggaaaggacgaagttggtctgcagtcgcaatttcgtgggttgagttcacagttgtgagtgcggggctcggagatggagccgtggtcctctaggtggaaaacgaaacggtggctctgggatttcaccgtaacaaccctcgcattgaccttcctcttccaagctagagaggtcagaggagctgctccagttgatgtactaaaagcactagattttcacaattctccagagggaatatcaaaaacaacgggattttgcacaaacagaaagaattctaaaggctcagatactgcttacagagtttcaaagcaagcacaactcagtgccccaacaaaacagttatttccaggtggaactttcccagaagacttttcaatactatttacagtaaaaccaaaaaaaggaattcagtctttccttttatctatatataatgagcatggtattcagcaaattggtgttgaggttgggagatcacctgtttttctgtttgaagaccacactggaaaacctgccccagaagactatcccctcttcagaactgttaacatcgctgacgggaagtggcatcgggtagcaatcagcgtggagaagaaaactgtgacaatgattgttgattgtaagaagaaaaccacgaaaccacttgatagaagtgagagagcaattgttgataccaatggaatcacggtttttggaacaaggattttggatgaagaagtttttgagggggacattcagcagtttttgatcacaggtgatcccaaggcagcatatgactactgtgagcattatagtccagactgtgactcttcagcacccaaggctgctcaagctcaggaacctcagatagatgagtatgcaccagaggatataatcgaatatgactatgagtatggggaagcagagtataaagaggctgaaagtgtaacagagggacccactgtaactgaggagacaatagcacagacggaggcaaacatcgttgatgattttcaagaatacaactatggaacaatggaaagttaccagacagaagctcctaggcatgtttctgggacaaatgagccaaatccagttgaagaaatatttactgaagaatatctaacgggagaggattatgattcccagaggaaaaattctgaggatacactatatgaaaacaaagaaatagacggcagggattctgatcttctggtagatggagatttaggcgaatatgatttttatgaatataaagaatatgaagataaaccaacaagcccccctaatgaagaatttggtccaggtgtaccagcagaaactgatattacagaaacaagcataaatggccatggtgcatatggagagaaaggacagaaaggagaaccagcagtggttgagcctggtatgcttgtcgaaggaccaccaggaccagcaggacctgcaggtattatgggtcctccaggtctacaaggccccactggaccccctggtgaccctggcgataggggccccccaggacgtcctggcttaccaggggctgatggtctacctggtcctcctggtactatgttgatgttaccgttccgttatggtggtgatggttccaaaggaccaaccatctctgctcaggaagctcaggctcaagctattcttcagcaggctcggattgctctgagaggcccacctggcccaatgggtctaactggaagaccaggtcctgtgggggggcctggttcatctggggccaaaggtgagagtggtgatccaggtcctcagggccctcgaggcgtccagggtccccctggtccaacgggaaaacctggaaaaaggggtcgtccaggtgcagatggaggaagaggaatgccaggagaacctggggcaaagggagatcgagggtttgatggacttccgggtctgccaggtgacaaaggtcacaggggtgaacgaggtcctcaaggtcctccaggtcctcctggtgatgatggaatgaggggagaagatggagaaattggaccaagaggtcttccaggtgaagctggcccacgaggtttgctgggtccaaggggaactccaggagctccagggcagcctggtatggcaggtgtagatggccccccaggaccaaaagggaacatgggtccccaaggggagcctgggcctccaggtcaacaagggaatccaggacctcagggtcttcctggtccacaaggtccaattggtcctcctggtgaaaaaggaccacaaggaaaaccaggacttgctggacttcctggtgctgatgggcctcctggtcatcctgggaaagaaggccagtctggagaaaagggggctctgggtccccctggtccacaaggtcctattggatacccgggcccccggggagtaaagggagcagatggtgtcagaggtctcaagggatctaaaggtgaaaagggtgaagatggttttccaggattcaaaggtgacatgggtctaaaaggtgacagaggagaagttggtcaaattggcccaagaggggaagatggccctgaaggacccaaaggtcgagcaggcccaactggagacccaggtccttcaggtcaagcaggagaaaagggaaaacttggagttccaggattaccaggatatccaggaagacaaggtccaaagggttccactggattccctgggtttccaggtgccaatggagagaaaggtgcacggggagtagctggcaaaccaggccctcggggtcagcgtggtccaacgggtcctcgaggttcaagaggtgcaagaggtcccactgggaaacctgggccaaagggcacttcaggtggcgatggccctcctggccctccaggtgaaagaggtcctcaaggacctcagggtccagttggattccctggaccaaaaggccctcctggaccacctgggaaggatgggctgccaggacaccctgggcaacgtggggagactggatttcaaggcaagaccggccctcctgggccagggggagtggttggaccacagggaccaaccggtgagactggtccaataggggaacgtgggcatcctggccctcctggccctcctggtgagcaaggtcttcctggtgctgcaggaaaagaaggtgcaaagggtgatccaggtcctcaaggtatctcagggaaagatggaccagcaggattacgtggtttcccaggggaaagaggtcttcctggagctcagggtgcacctggactgaaaggaggggaaggtccccagggcccaccaggtccagttggctcaccaggagaacgtgggtcagcaggtacagctggcccaattggtttaccagggcgcccgggacctcagggtcctcctggtccagctggagagaaaggtgctcctggagaaaaaggtccccaagggcctgcagggagagatggagttcaaggtcctgttggtctcccagggccagctggtcctgccggctcccctggggaagacggagacaagggtgaaattggtgagccgggacaaaaaggcagcaagggtgacaagggagaaaatggccctcccggtcccccaggtcttcaaggaccagttggtgcccctggaattgctggaggtgatggtgaaccaggtcctagaggacagcaggggatgtttgggcaaaaaggtgatgagggtgccagaggcttccctggacctcctggtccaataggtcttcagggtctgccaggcccacctggtgaaaaaggtgaaaatggggatgttggtcccatggggccacctggtcctccaggcccaagaggccctcaaggtcccaatggagctgatggaccacaaggacccccaggttctgttggttcagttggtggtgttggagaaaagggtgaacctggagaagcagggaacccagggcctcctggggaagcaggtgtaggcggtcccaaaggagaaagaggagagaaaggggaagctggtccacctggagctgctggacctccaggtgccaaggggccgccaggtgatgatggccctaagggtaacccgggtcctgttggttttcctggagatcctggtcctcctggggaacttggccctgcaggtcaagatggtgttggtggtgacaagggtgaagatggagatcctggtcaaccgggtcctcctggcccatctggtgaggctggcccaccaggtcctcctggaaaacgaggtcctcctggagctgcaggtgcagagggaagacaaggtgaaaaaggtgctaagggggaagcaggtgcagaaggtcctcctggaaaaaccggcccagtcggtcctcagggacctgcaggaaagcctggtccagaaggtcttcggggcatccctggtcctgtgggagaacaaggtctccctggagctgcaggccaagatggaccacctggtcctatgggacctcctggcttacctggtctcaaaggtgaccctggctccaagggtgaaaagggacatcctggtttaattggcctgattggtcctccaggagaacaaggggaaaaaggtgaccgagggctccctggaactcaaggatctccaggagcaaaaggggatgggggaattcctggtcctgctggtcccttaggtccacctggtcctccaggcttaccaggtcctcaaggcccaaagggtaacaaaggctctactggacccgctggccagaaaggtgacagtggtcttccagggcctcctgggcctccaggtccacctggtgaagtcattcagcctttaccaatcttgtcctccaaaaaaacgagaagacatactgaaggcatgcaagcagatgcagatgataatattcttgattactcggatggaatggaagaaatatttggttccctcaattccctgaaacaagacatcgagcatatgaaatttccaatgggtactcagaccaacccattttgtgccacatgcaagttttgaataaggatggtatagaaaacaacgctgcatatacaggtaccatttaggaaataccgatgcctttgtgggggcagaatcacatggcaaaagctttgaaaatcataaagatataagttggtgtggctaagatggaaacagggctgattcttgattcccaattctcaactctccttttcctatttgaatttctttggtgctgtagaaaacaaaaaaagaaaaatatatattcataaaaaatatggtgctcattctcatccatccaggatgtactaaaacagtgtgtttaataaattgtaattattttgtgtacagttctatactgttatctgtgtccatttccaaaacttgcacgtgtccctgaattccatctgactctaattttatgagaattgcagaactctgatggcaataaatatatgtattatgaaaaaataaagttgtaatttctgatgactctaagtccctttctttggttaataataaaatgcctttgtatatattgatgttgaagagttcaattatttgatgtcgccaacaaaattctcagagggcaaaaatctggaagacttttggaagcacactctgatcaactcttctctgccgacagtcattttgctgaatttcagccaaaaatattatgcattttgatgctttattcaaggctatacctcaaactttttcttctcagaatccaggatttcacaggatacttgtatatatggaaaacaagcaagtttatatttttggacagggaaatgtgtgtaagaaagtatattaacaaatcaatgcctccgtcaagcaaacaatcatatgtatactttttttctacgttatctcatctccttgttttcagtgtgcttcaataatgcaggttaatattaaagatggaaattaagcaattatttatgaatttgtgcaatgttagattttcttatcaatcaagttcttgaatttgattctaagttgcatattataacagtctcgaaaattattttacttgcccaacaaatattacttttttcctttcaagataattttataaatcatttgacctacctaattgctaaatgaataacatatggtggactgttattaagagtatttgttttaagtcattcaggaaaatctaaacttttttttccactaaggtatttactttaaggtagcttgaaatagcaatacaatttaaaaattaaaaactgaattttgtatctattttaagtaatatatgtaagacttgaaaataaatgttttatttcttatataaagtgttaaattaattgataccagatttcactggaacagtttcaactgataatttatgacaaaagaacatacctgtaatattgaaattaaaaagtgaaatttgtcataaagaatttcttttatttttgaaatcgagtttgtaaatgtccttttaagaagggagatatgaatccaataaataaactcaagtcttggcta

SEQ ID NO: 301692 - DNA, 1540 bp, Homo sapiens
gctcatagctgttcctagagtaacccgaggtagtgcactcagcactaacccattttgtgccacatgcaagttttgaataaggatggtatagaaaacaacgctgcatatacaggtaccatttaggaaataccgatgcctttgtgggggcagaatcacatggcaaaagctttgaaaatcataaagatataagttggtgtggctaagatggaaacagggctgattcttgattcccaattctcaactctccttttcctatttgaatttctttggtgctgtagaaaacaaaaaaagaaaaatatatattcataaaaaatatggtgctcattctcatccatccaggatgtactaaaacagtgtgtttaataaattgtaattattttgtgtacagttctatactgttatctgtgtccatttccaaaacttgcacgtgtccctgaattccatctgactctaattttatgagaattgcagaactctgatggcaataaatatatgtattatgaaaaaataaagttgtaatttctgatgactctaagtccctttctttggttaataataaaatgcctttgtatatattgatgttgaagagttcaattatttgatgtcgccaacaaaattctcagagggcaaaaatctggaagacttttggaagcacactctgatcaactcttctctgccgacagtcattttgctgaatttcagccaaaaatattatgcattttgatgctttattcaaggctatacctcaaactttttcttctcagaatccaggatttcacaggatacttgtatatatggaaaacaagcaagtttatatttttggacagggaaatgtgtgtaagaaagtatattaacaaatcaatgcctccgtcaagcaaacaatcatatgtatactttttttctacgttatctcatctccttgttttcagtgtgcttcaataatgcaggttaatattaaagatggaaattaagcaattatttatgaatttgtgcaatgttagattttcttatcaatcaagttcttgaatttgattctaagttgcatattataacagtctcgaaaattattttacttgcccaacaaatattacttttttcctttcaagataattttataaatcatttgacctacctaattgctaaatgaataacatatggtggactgttattaagagtatttgttttaagtcattcaggaaaatctaaacttttttttccactaaggtatttactttaaggtagcttgaaatagcaatacaatttaaaaattaaaaactgaattttgtatctattttaagtaatatatgtaagacttgaaaataaatgttttatttcttatataaagtgttaaattaattgataccagatttcactggaacagtttcaactgataatttatgacaaaagaacatacctgtaatattgaaattaaaaagtgaaatttgtcataaagaatttcttttatttttgaaatcgagtttgtaaatgtccttttaagaagggagatatgaatccaataaataaactcaagtcttggcta

SEQ ID NO: 301693 - DNA, 1593 bp, Homo sapiens
ctttttatttctgctttattttacagtccagaaaaggctatgaaaagactgtcattgaaatcaatacaccaaaaattgatcaagtacctattgttgatgtcatgatcaatgactttggtgatcagaatcagaagttcggatttgaagttggtcctgtttgttttcttggcatttaggaaataccgatgcctttgtgggggcagaatcacatggcaaaagctttgaaaatcataaagatataagttggtgtggctaagatggaaacagggctgattcttgattcccaattctcaactctccttttcctatttgaatttctttggtgctgtagaaaacaaaaaaagaaaaatatatattcataaaaaatatggtgctcattctcatccatccaggatgtactaaaacagtgtgtttaataaattgtaattattttgtgtacagttctatactgttatctgtgtccatttccaaaacttgcacgtgtccctgaattccatctgactctaattttatgagaattgcagaactctgatggcaataaatatatgtattatgaaaaaataaagttgtaatttctgatgactctaagtccctttctttggttaataataaaatgcctttgtatatattgatgttgaagagttcaattatttgatgtcgccaacaaaattctcagagggcaaaaatctggaagacttttggaagcacactctgatcaactcttctctgccgacagtcattttgctgaatttcagccaaaaatattatgcattttgatgctttattcaaggctatacctcaaactttttcttctcagaatccaggatttcacaggatacttgtatatatggaaaacaagcaagtttatatttttggacagggaaatgtgtgtaagaaagtatattaacaaatcaatgcctccgtcaagcaaacaatcatatgtatactttttttctacgttatctcatctccttgttttcagtgtgcttcaataatgcaggttaatattaaagatggaaattaagcaattatttatgaatttgtgcaatgttagattttcttatcaatcaagttcttgaatttgattctaagttgcatattataacagtctcgaaaattattttacttgcccaacaaatattacttttttcctttcaagataattttataaatcatttgacctacctaattgctaaatgaataacatatggtggactgttattaagagtatttgttttaagtcattcaggaaaatctaaacttttttttccactaaggtatttactttaaggtagcttgaaatagcaatacaatttaaaaattaaaaactgaattttgtatctattttaagtaatatatgtaagacttgaaaataaatgttttatttcttatataaagtgttaaattaattgataccagatttcactggaacagtttcaactgataatttatgacaaaagaacatacctgtaatattgaaattaaaaagtgaaatttgtcataaagaatttcttttatttttgaaatcgagtttgtaaatgtccttttaagaagggagatatgaatccaataaataaactcaagtcttggcta

SEQ ID NO: 301694 - DNA, 1313 bp, Homo sapiens
ctcagcttgttggtggaagcccctcatctgccttcattctgaaggcagggcccggcagaggaaggatcagagggtcgcggccggagggtcccggccggtggggccaactcagagggagaggaaagggctagagacacgaagaacgcaaaccatcaaatttagaagaaaaagccctttgactttttccccctctccctccccaatggctgtgtagcaaacatccctggcgataccttggaaaggacgaagttggtctgcagtcgcaatttcgtgggttgagttcacagttgtgagtgcggggctcggagatggagccgtggtcctctaggtggaaaacgaaacggtggctctgggatttcaccgtaacaaccctcgcattgaccttcctcttccaagctagagaggtcagaggagctgctccagttgatgtactaaaagcactagattttcacaattctccagagggaatatcaaaaacaacgggattttgcacaaacagaaagaattctaaaggctcagatactgcttacagagtttcaaagcaagcacaactcagtgccccaacaaaacagttatttccaggtggaactttcccagaagacttttcaatactatttacagtaaaaccaaaaaaaggaattcagtctttccttttatctatatataatgagcatggtattcagcaaattggtgttgaggttgggagatcacctgtttttctgtttgaagaccacactggaaaacctgccccagaagactatcccctcttcagaactgttaacatcgctgacgggaagtggcatcgggtagcaatcagcgtggagaagaaaactgtgacaatgattgttgattgtaagaagaaaaccacgaaaccacttgatagaagtgagagagcaattgttgataccaatggaatcacggtttttggaacaaggattttggatgaagaagtttttgagggggacattcagcagtttttgatcacaggtgatcccaaggcagcatatgactactgtgagcattatagtccagactgtgactcttcagcacccaaggctgctcaagctcaggaacctcagatagatgaggtgaggagcacaagaccagagaaggtcttcgtatttcagtgatatggacatagcagtgcagtttttgaacttatacttatttattccattttaattaagctatgctttgtattttaattgtgttgtaatatttccaggaaaaagtgacttgaatatatttggtacttgttttcttgctgtttaagcatttgattacataaatttattagcaataaaaaaaaaaca

SEQ ID NO: 301695 - DNA, 2591 bp, Homo sapiens
ctcagcttgttggtggaagcccctcatctgccttcattctgaaggcagggcccggcagaggaaggatcagagggtcgcggccggagggtcccggccggtggggccaactcagagggagaggaaagggctagagacacgaagaacgcaaaccatcaaatttagaagaaaaagccctttgactttttccccctctccctccccaatggctgtgtagcaaacatccctggcgataccttggaaaggacgaagttggtctgcagtcgcaatttcgtgggttgagttcacagttgtgagtgcggggctcggagatggagccgtggtcctctaggtggaaaacgaaacggtggctctgggatttcaccgtaacaaccctcgcattgaccttcctcttccaagctagagaggtcagaggagctgctccagttgatgtactaaaagcactagattttcacaattctccagagggaatatcaaaaacaacgggattttgcacaaacagaaagaattctaaaggctcagatactgcttacagagtttcaaagcaagcacaactcagtgccccaacaaaacagttatttccaggtggaactttcccagaagacttttcaatactatttacagtaaaaccaaaaaaaggaattcagtctttccttttatctatatataatgagcatggtattcagcaaattggtgttgaggttgggagatcacctgtttttctgtttgaagaccacactggaaaacctgccccagaagactatcccctcttcagaactgttaacatcgctgacgggaagtggcatcgggtagcaatcagcgtggagaagaaaactgtgacaatgattgttgattgtaagaagaaaaccacgaaaccacttgatagaagtgagagagcaattgttgataccaatggaatcacggtttttggaacaaggattttggatgaagaagtttttgagggggacattcagcagtttttgatcacaggtgatcccaaggcagcatatgactactgtgagcattatagtccagactgtgactcttcagcacccaaggctgctcaagctcaggaacctcagatagatgagtatgcaccagaggatataatcgaatatgactatgagtatggggaagcagagtataaagaggctgaaagtgtaacagagggacccactgtaactgaggagacaatagcacagacggaggcaaacatcgttgatgattttcaagaatacaactatggaacaatggaaagttaccagacagaagctcctaggcatgtttctgggacaaatgagccaaatccagttgaagaaatatttactgaagaatatctaacgggagaggattatgattcccagaggaaaaattctgaggatacactatatgaaaacaaagaaatagacggcagggattctgatcttctggtagatggagatttaggcgaatatgatttttatgaatataaagaatatgaagataaaccaacaagcccccctaatgaagaatttggtccaggtgtaccagcagaaactgatattacagaaacaagcataaatggccatggtgcatatggagagaaaggacagaaaggagaaccagcagtggttgagcctggtatgcttgtcgaaggaccaccaggaccagcaggacctgcaggtattatgggtcctccaggtctacaaggccccactggaccccctggtgaccctggcgataggggccccccaggacgtcctggcttaccaggggctgatggtctacctggtcctcctggtactatgttgatgttaccgttccgttatggtggtgatggttccaaaggaccaaccatctctgctcaggaagctcaggctcaagctattcttcagcaggctcggattgctctgagaggcccacctggcccaatgggtctaactggaagaccaggtcctgtgggggggcctggttcatctggggccaaaggtgagagtggtgatccaggtcctcagggccctcgaggcgtccagggtccccctggtccaacgggaaaacctggaaaaaggggtcgtccaggtgcagatggaggaagaggaatgccaggagaacctggggcaaagggagatcgagggtttgatggacttccgggtctgccaggtgacaaaggtcacaggggtgaacgaggtcctcaaggtcctccaggtcctcctggtgatgatggaatgaggggagaagatggagaaattggaccaagaggtcttccaggtgaagctggtatggcaggtgtagatggccccccaggaccaaaagggaacatgggtccccaaggggagcctgggcctccaggtcaacaagggaatccaggacctcagggtcttcctggtccacaaggtccaattggtcctcctggtgaaaaagtctccttttctttctcattattttacaaaaaagtaattaagtttgcttgtgacaaaagatttgtaggaagacatgatgaaaggaaagttgtgaagttgtcattgccattatatctcatatatgaatagcaaatgatgttcttgttaataactcaatgtctggatcaaaacaagaataaatctataattaaacac

SEQ ID NO: 301696 - DNA, 306 bp, Homo sapiens
aaaggtcgagcaggcccaactggagacccaggtccttcaggtcaagcaggagaaaaggttggtaaatgactttaaattcactggtactcttgcagctgatgtttcattatcatttaaatttctttcaataactggtgtcagaaattgagttcttactacattaaagataaaatgtttcattatcattttaaatttgcaaccattacatttacgtttcagtgtaatattaggcaacattaaaatttgcctccagaaagtatttagtgacaccttaaattttctataatgtactgtgaagttaaattt

SEQ ID NO: 301697 - DNA, 728 bp, Homo sapiens
attaagcaaagctttaactccataccttttttattgttcaaatcttaaactgtgaagtaaatatgaaattgactaacatgttttttccaatggaacaagcaaatacacatgttaattccatgtgaatatttgcagtttattggagaaagtgctttgaaagcaatatctctttgtacatagcaatgtacaaatatatttctttcaatgatactgaaagcctactttccaggtgtttagagttgcttgagtagtaacaaaatcgcatcccatcacacgctatcaaattgtaatttaaatgcttaccttgctttactaacaataaacttcatgttcctcaattccttgcaatttaaattaatagccaaatccagttgaagaaatatttactgaagaatatctaacgggagaggattatgattcccagaggaaaaattctgaggatacactatatgaaaacaaagaaatagacggcagggattctgatcttctggtagatggagatttaggcgaatatgatttttatgaatataaagaatatgaagataaaccaacaagcccccctaatgaagaatttggtccaggtgtaccagcagaaactgatattacagaaacaagcgtaagttgatactatgcactgtgtcattgtatgtcttatttatgggatatttttatgtccatgtccatcttaatgtcttttcaggtttaaaatgcaggttgaatttttatgt

SEQ ID NO: 301698 - DNA, 576 bp, Homo sapiens
taatttaagtcagtaatgttcttaaaaagatatttttattcagccctagagtaaataaattttaaaatatttaagttagaaaccataaaaattacagttgagtattatttaaacaaacatgtactaaattcccatcacctgtaaatcatattctgagggataaaggaatatacacattaacacatatagattgaaaacaaaaacctcattgatattgtagcaacataggaaaaatcctgattattttgcacaagttattttttagattcaccatggaaaaatgtttaagccattcataaatatttttgcattctctaaattttacagtgtatgctgttatgaaaatattgaaaagttatgaaaacatgaaaatgaaatagctgagaaaatccctttaaattggctgattctctctctagggaattcctggtcctgctggtcccttaggtccacctggtcctccaggcttaccagtaagtacaagacaaaataaccttataaggtagggttaagttacaaatataacagagacacaaatgctccagatttttatctgtgcttttgcatttgcatttt

SEQ ID NO: 301699 - DNA, 429 bp, Homo sapiens
gcccctatgacccctttaaggcgcggccagagtcctcccgcagaaaaacgacttaaaggagacgcgtggcgcgatggcggcggccccacgcgcgggccggcggcgcgggcagccgctcctggcgctgctgcttctgctgctggcgccactgccgccgggggccccgccgggcgccgacgcctacttccccgaggagcgctggagcccggagtcgcccctgcaggcgccgcgcgtgctcatcgcgctgttggcgcgaaacgcggcccacgcgttgcccaccacgctgggcgcactcgagcggctgcggcacccgcgggagcgcacggcgctatgacggaatcttgctctgtcgcccaggctggattgcagtgagccgagatcgcgccactgcactccagcctgggcaacagagcgagactctgtctcaaa

SEQ ID NO: 301700 - DNA, 3675 bp, Homo sapiens
gcccctatgacccctttaaggcgcggccagagtcctcccgcagaaaaacgacttaaaggagacgcgtggcgcgatggcggcggccccacgcgcgggccggcggcgcgggcagccgctcctggcgctgctgcttctgctgctggcgccactgccgccgggggccccgccgggcgccgacgcctacttccccgaggagcgctggagcccggagtcgcccctgcaggcgccgcgcgtgctcatcgcgctgttggcgcgaaacgcggcccacgcgttgcccaccacgctgggcgcactcgagcggctgcggcacccgcgggagcgcacggcgctatgggtggctacggaccacaacatggataacacgtcaactgtgctgcgggagtggctggtggccgtgaagagtttgtaccattccgtggagtggcggccagcagaggagcccaggtcctacccggacgaggaaggcccgaaacactggtctgactcacgctacgagcatgtcatgaagttgcgccaggcagccctgaaatcagctcgagacatgtgggctgattacatcctgtttgtagatgcggacaacctgatcctcaaccctgacacactgagcctgctcatcgctgagaacaagacggtggtcgcccccatgctggattcccgggctgcgtactccaacttctggtgtggaatgacttcccagggctactacaagcgcacacctgcctacatccctatccgcaagcgagaccgccggggctgctttgcagttcccatggtgcactcgaccttcctgatcgacctgcggaaggcggcgtccaggaacctggccttctacccacctcaccctgactacacctggtcctttgacgacatcatcgtctttgccttctcctgcaagcaggcagaggttcagatgtatgtgtgcaacaaggaggagtacggattcttgccagtgccattgcgcgcccacagcaccctccaggatgaggccgagagcttcatgcatgtgcagctggaggtcatggtgaagcacccgcccgcagagccctcccgcttcatctcggctcccaccaagacaccggacaagatgggcttcgacgaggtcttcatgatcaacctgaggcggcggcaggaccggcgggagcgcatgctgcgggcgctgcaggcacaggagatcgagtgccggctggtggaggccgtggacggcaaagccatgaacaccagccaggtggaggcgctggggatccagatgctgcctggctaccgggacccctaccacggccggcccctcaccaagggtgagctgggctgcttcctgagccactacaacatctggaaggaggtggtggaccgggggctgcagaaatcgcttgtgtttgaggatgacctgcgttttgagatcttcttcaagagacgtctgatgaacctcatgcgggatgtggagcgggagggcctggactgggacctcatctatgtgggccggaagcggatgcaggtggagcaccccgagaaggctgtgcctcgcgtgaggaacctggtggaggccgactattcctactggaccctggcctacgtgatctccctgcaaggcgcccgcaaactgctggctgctgagccgctctccaagatgctgcctgtggacgagttcctgcccgtcatgttcgacaaacacccagtgtccgagtacaaggcccacttctccctccgcaacctgcatgccttctctgtggagccgctgctcatctaccccacacactacacaggagacgatggctatgtgagtgacaccgagacctcagtcgtatggaacaatgagcacgtcaagaccgactgggaccgcgccaagtcccagaagatgcgggagcagcaggcactgagccgtgaggccaagaactcggacgtgctccagtccccactggacagtgctgcccgggatgaactctgaggggtagcagccagaaagccaaagcagccatcggtggcccaggctccacgtgcttactgaggacatcagggccacctctggaccccttggcaggccacagagggctctcgtgtggggtggtgtccagccagctcttgctaagcaatcacgtgcacacaggcagcattaatggagtgcctactgcatgccagcaacagggcttggccctggggaattgggaggaaccaagccctcttcatctgttcatgtgcccagcatttattaagcacctgctgtatgcaaggttcccatgttacggcagtgaatgaggcataattgttccctccatcagcgattgattcagtcatcaagcagttactgatcagattaagaatcaggcactagtgatacacattcatttttaaaattcattcaaggatttattgagtgcctactgtgtgttgggtgccattccaggctctgggattttttttttttttttttttttaagagtagagtctgtctctgtcacccaggctggagtgcagtggtgtgacggctcactgcagcctgcgcctcccagcgtccagcaattcttgtttctcggcctcccaagtagctgggactataggtgcgtgccatcacatctggctagtttttgtatttttagtagagacggggtttcaccatgttggccagactggtctcgaactcctgacctcaagtgatctgcccgccttggccacccaaagtgctagggttacaggcatgagccactgtgcccagcccaggctctgggaatattgagataaataagatgcttctatccatttattcaagcacatattggtcacctactgtgtgcctggcactcatgtcacaaagataagttcctgattcggtacacttactgagcacctgctgtgtgcagggagctgagctatgggatgggaatgggagtaaacaaggtactttttacttttttctttttttcctcactgctagacggtgtgggaacttctcactcattggcttctttcccacacacctgaagagcactgactgtgtgccgggcactagtgatacaaaagagtgtgacagttgttcagtctgcattttcgatcatgggctacatgccgagtgctggggcacagagatgaacaagatcggttccttcacttcttcatgccacaagtgtttattgagcacctgtgtgccaggcctcacagactcccagttgggttgaagaatggttgactgagtttgattcttcctgtaccctcggtcgtctgagctgtgtgcagacaacatccccccaccacccaagagggagggtagctcttccgccaccaggggcaagcacaggtcctggtggccccacgccacatgttagcccccctggagggggcgccagttggagacgggggctgggtgtccctggcccactcccggtcccctgtgctttacctccttgcccttgtgtctcaggtgtggtccctgcctgcttgatgaagttgctctgttcaagcctttggtgggatcatgtgtttgggggcttttaggggacccagctgcactggggcactgcccgtggcctgggtaggacatttcccagcaagggctggaggagttgccgtgccttcagcctgaatcgaatgtcagaaccagccagcggtgcttcaccctcttggggataacttgcttagttttttaataaatgttcctggttggttttcacagcaaaaaaatttgtg

SEQ ID NO: 301701 - DNA, 3256 bp, Homo sapiens
cgtgggttcttgcagaggagcccaggtcctacccggacgaggaaggcccgaaacactggtctgactcacgctacgagcatgtcatgaagttgcgccaggcagccctgaaatcagctcgagacatgtgggctgattacatcctgtttgtagatgcggacaacctgatcctcaaccctgacacactgagcctgctcatcgctgagaacaagacggtggtcgcccccatgctggattcccgggctgcgtactccaacttctggtgtggaatgacttcccagggctactacaagcgcacacctgcctacatccctatccgcaagcgagaccgccggggctgctttgcagttcccatggtgcactcgaccttcctgatcgacctgcggaaggcggcgtccaggaacctggccttctacccacctcaccctgactacacctggtcctttgacgacatcatcgtctttgccttctcctgcaagcaggcagaggttcagatgtatgtgtgcaacaaggaggagtacggattcttgccagtgccattgcgcgcccacagcaccctccaggatgaggccgagagcttcatgcatgtgcagctggaggtcatggtgaagcacccgcccgcagagccctcccgcttcatctcggctcccaccaagacaccggacaagatgggcttcgacgaggtcttcatgatcaacctgaggcggcggcaggaccggcgggagcgcatgctgcgggcgctgcaggcacaggagatcgagtgccggctggtggaggccgtggacggcaaagccatgaacaccagccaggtggaggcgctggggatccagatgctgcctggctaccgggacccctaccacggccggcccctcaccaagggtgagctgggctgcttcctgagccactacaacatctggaaggaggtggtggaccgggggctgcagaaatcgcttgtgtttgaggatgacctgcgttttgagatcttcttcaagagacgtctgatgaacctcatgcgggatgtggagcgggagggcctggactgggacctcatctatgtgggccggaagcggatgcaggtggagcaccccgagaaggctgtgcctcgcgtgaggaacctggtggaggccgactattcctactggaccctggcctacgtgatctccctgcaaggcgcccgcaaactgctggctgctgagccgctctccaagatgctgcctgtggacgagttcctgcccgtcatgttcgacaaacacccagtgtccgagtacaaggcccacttctccctccgcaacctgcatgccttctctgtggagccgctgctcatctaccccacacactacacaggagacgatggctatgtgagtgacaccgagacctcagtcgtatggaacaatgagcacgtcaagaccgactgggaccgcgccaagtcccagaagatgcgggagcagcaggcactgagccgtgaggccaagaactcggacgtgctccagtccccactggacagtgctgcccgggatgaactctgaggggtagcagccagaaagccaaagcagccatcggtggcccaggctccacgtgcttactgaggacatcagggccacctctggaccccttggcaggccacagagggctctcgtgtggggtggtgtccagccagctcttgctaagcaatcacgtgcacacaggcagcattaatggagtgcctactgcatgccagcaacagggcttggccctggggaattgggaggaaccaagccctcttcatctgttcatgtgcccagcatttattaagcacctgctgtatgcaaggttcccatgttacggcagtgaatgaggcataattgttccctccatcagcgattgattcagtcatcaagcagttactgatcagattaagaatcaggcactagtgatacacattcatttttaaaattcattcaaggatttattgagtgcctactgtgtgttgggtgccattccaggctctgggattttttttttttttttttttttaagagtagagtctgtctctgtcacccaggctggagtgcagtggtgtgacggctcactgcagcctgcgcctcccagcgtccagcaattcttgtttctcggcctcccaagtagctgggactataggtgcgtgccatcacatctggctagtttttgtatttttagtagagacggggtttcaccatgttggccagactggtctcgaactcctgacctcaagtgatctgcccgccttggccacccaaagtgctagggttacaggcatgagccactgtgcccagcccaggctctgggaatattgagataaataagatgcttctatccatttattcaagcacatattggtcacctactgtgtgcctggcactcatgtcacaaagataagttcctgattcggtacacttactgagcacctgctgtgtgcagggagctgagctatgggatgggaatgggagtaaacaaggtactttttacttttttctttttttcctcactgctagacggtgtgggaacttctcactcattggcttctttcccacacacctgaagagcactgactgtgtgccgggcactagtgatacaaaagagtgtgacagttgttcagtctgcattttcgatcatgggctacatgccgagtgctggggcacagagatgaacaagatcggttccttcacttcttcatgccacaagtgtttattgagcacctgtgtgccaggcctcacagactcccagttgggttgaagaatggttgactgagtttgattcttcctgtaccctcggtcgtctgagctgtgtgcagacaacatccccccaccacccaagagggagggtagctcttccgccaccaggggcaagcacaggtcctggtggccccacgccacatgttagcccccctggagggggcgccagttggagacgggggctgggtgtccctggcccactcccggtcccctgtgctttacctccttgcccttgtgtctcaggtgtggtccctgcctgcttgatgaagttgctctgttcaagcctttggtgggatcatgtgtttgggggcttttaggggacccagctgcactggggcactgcccgtggcctgggtaggacatttcccagcaagggctggaggagttgccgtgccttcagcctgaatcgaatgtcagaaccagccagcggtgcttcaccctcttggggataacttgcttagttttttaataaatgttcctggttggttttcacagcaaaaaaatttgtg

SEQ ID NO: 301702 - DNA, 3646 bp, Homo sapiens
gcccctatgacccctttaaggcgcggccagagtcctcccgcagaaaaacgacttaaaggagacgcgtggcgcgatggcggcggccccacgcgcgggccggcggcgcgggcagccgctcctggcgctgctgcttctgctgctggcgccactgccgccgggggccccgccgggcgccgacgcctacttccccgaggagcgctggagcccggagtcgcccctgcaggcgccgcgcgtgctcatcgcgctgttggcgcgaaacgcggcccacgcgttgcccaccacgctgggcgcactcgagcggctgcggcacccgcgggagcgcacggcgctatgggtggctacggaccacaacatggataacacgtcaactgtgctgcgggagtggctggtggccgtgaagagtttgtaccattccgtggagtggcggccagcagaggagcccaggtcctacccggacgaggaaggcccgaaacactggtctgactcacgctacgagcatgtcatgaagttgcgccaggcagccctgaaatcagctcgagacatgtgggctgattacatcctgtttgtagatgcggacaacctgatcctcaaccctgacacactgagcctgctcatcgctgagaacaagacggtggtcgcccccatgctggattcccgggctgcgtactccaacttctggtgtggaatgacttcccagggctactacaagcgcacacctgcctacatccctatccgcaagcgagaccgccggggctgctttgcagttcccatggtgcactcgaccttcctgatcgacctgcggaaggcggcgtccaggaacctggccttctacccacctcaccctgactacacctggtcctttgacgacatcatcgtctttgccttctcctgcaagcaggcagaggttcagatgtatgtgtgcaacaaggaggagtacggattcttgccagtgccattgcgcgcccacagcaccctccaggatgaggccgagagcttcatgcatgtgcagctggaggtcatggtgaagcacccgcccgcagagccctcccgcttcatctcggctcccaccaagacaccggacaagatgggcttcgacgaggtcttcatgatcaacctgaggcggcggcaggaccggcgggagcgcatgctgcgggcgctgcaggcacaggagatcgagtgccggctggtggaggccgtggacggcaaagccatgaacaccagccaggtggaggcgctggggatccagatgctgcctggctaccgggacccctaccacggccggcccctcaccaagggtgagctgggctgcttcctgagccactacaacatctggaaggaggtggtggaccgggggctgcagaaatcgcttgtgtttgaggatgacctgcgttttgagatcttcttcaagagacgtctgatgaacctcatgcgggatgtggagcgggagggcctggactgggacctcatctatgtgggccggaagcggatgcaggtggagcaccccgagaaggctgtgcctcgcgtgaggaacctggtggaggccgactattcctactggaccctggcctacgtgatctccctgcaaggcgcccgcaaactgctggctgctgagccgctctccaagatgctgcctgtggacgagttcctgcccgtcatgttcgacaaacacccagtgtccgagtacaaggcccacttctccctccgcaacctgcatgccttctctgtggagccgctgctcatctaccccacacactacacaggagacgatggctatgtgagtgacaccgagacctcagtcgtatggaacaatgagcacgtcaagaccgactgggaccgcgccaagtcccagaagatgcgggagcagcaggcactgagccgtgaggccaagaactcggacgtgctccagtccccactggacagtgctgcccgggatgaactctgaggggtagcagccagaaagccaaagcagccatcggtggcccaggctccacgtgcttactgaggacatcagggccacctctggaccccttggcaggccacagagggctctcgtgtggggtggtgtccagccagctcttgctaagcaatcacgtgcacacaggcagcattaatggagtgcctactgcatgccagcaacagggcttggccctggggaattgggaggaaccaagccctcttcatctgttcatgtgcccagcatttattaagcacctgctgtatgcaaggttcccatgttacggcagtgaatgaggcataattgttccctccatcagcgattgattcagtcatcaagcagttactgatcagattaagaatcaggcactagtgatacacattcatttttaaaattcattcaaggatttattgagtgcctactgtgtgttgggtgccattccaggctctgggattttttttttttttttttttttaagagtagagtctgtctctgtcacccaggctggagtgcagtggtgtgacggctcactgcagcctgcgcctcccagcgtccagcaattcttgtttctcggcctcccaagtagctgggactataggtgcgtgccatcacatctggctagtttttgtatttttagtagagacggggtttcaccatgttggccagactggtctcgaactcctgacctcaagtgatctgcccgccttggccacccaaagtgctagggttacaggcatgagccactgtgcccagcccaggctctgggaatattgagataaataagatgcttctatccatttattcaagcacatattggtcacctactgtgtgcctggcactcatgtcacaaagataagttcctgattcggtacacttactgagcacctgctgtgtgcagggagctgagctatgggatgggaatgggagtattcctcactgctagacggtgtgggaacttctcactcattggcttctttcccacacacctgaagagcactgactgtgtgccgggcactagtgatacaaaagagtgtgacagttgttcagtctgcattttcgatcatgggctacatgccgagtgctggggcacagagatgaacaagatcggttccttcacttcttcatgccacaagtgtttattgagcacctgtgtgccaggcctcacagactcccagttgggttgaagaatggttgactgagtttgattcttcctgtaccctcggtcgtctgagctgtgtgcagacaacatccccccaccacccaagagggagggtagctcttccgccaccaggggcaagcacaggtcctggtggccccacgccacatgttagcccccctggagggggcgccagttggagacgggggctgggtgtccctggcccactcccggtcccctgtgctttacctccttgcccttgtgtctcaggtgtggtccctgcctgcttgatgaagttgctctgttcaagcctttggtgggatcatgtgtttgggggcttttaggggacccagctgcactggggcactgcccgtggcctgggtaggacatttcccagcaagggctggaggagttgccgtgccttcagcctgaatcgaatgtcagaaccagccagcggtgcttcaccctcttggggataacttgcttagttttttaataaatgttcctggttggttttcacagcaaaaaaatttgtg

SEQ ID NO: 301703 - DNA, 2301 bp, Homo sapiens
caggacctgacggggtaactagatccctggctttctgggcaagctccctccggagggcgggaggagagtgacaggcccgatcttgcaccccagctatgtgggccggaagcggatgcaggtggagcaccccgagaaggctgtgcctcgcgtgaggaacctggtggaggccgactattcctactggaccctggcctacgtgatctccctgcaaggcgcccgcaaactgctggctgctgagccgctctccaagatgctgcctgtggacgagttcctgcccgtcatgttcgacaaacacccagtgtccgagtacaaggcccacttctccctccgcaacctgcatgccttctctgtggagccgctgctcatctaccccacacactacacaggagacgatggctatgtgagtgacaccgagacctcagtcgtatggaacaatgagcacgtcaagaccgactgggaccgcgccaagtcccagaagatgcgggagcagcaggcactgagccgtgaggccaagaactcggacgtgctccagtccccactggacagtgctgcccgggatgaactctgaggggtagcagccagaaagccaaagcagccatcggtggcccaggctccacgtgcttactgaggacatcagggccacctctggaccccttggcaggccacagagggctctcgtgtggggtggtgtccagccagctcttgctaagcaatcacgtgcacacaggcagcattaatggagtgcctactgcatgccagcaacagggcttggccctggggaattgggaggaaccaagccctcttcatctgttcatgtgcccagcatttattaagcacctgctgtatgcaaggttcccatgttacggcagtgaatgaggcataattgttccctccatcagcgattgattcagtcatcaagcagttactgatcagattaagaatcaggcactagtgatacacattcatttttaaaattcattcaaggatttattgagtgcctactgtgtgttgggtgccattccaggctctgggattttttttttttttttttttttaagagtagagtctgtctctgtcacccaggctggagtgcagtggtgtgacggctcactgcagcctgcgcctcccagcgtccagcaattcttgtttctcggcctcccaagtagctgggactataggtgcgtgccatcacatctggctagtttttgtatttttagtagagacggggtttcaccatgttggccagactggtctcgaactcctgacctcaagtgatctgcccgccttggccacccaaagtgctagggttacaggcatgagccactgtgcccagcccaggctctgggaatattgagataaataagatgcttctatccatttattcaagcacatattggtcacctactgtgtgcctggcactcatgtcacaaagataagttcctgattcggtacacttactgagcacctgctgtgtgcagggagctgagctatgggatgggaatgggagtaaacaaggtactttttacttttttctttttttcctcactgctagacggtgtgggaacttctcactcattggcttctttcccacacacctgaagagcactgactgtgtgccgggcactagtgatacaaaagagtgtgacagttgttcagtctgcattttcgatcatgggctacatgccgagtgctggggcacagagatgaacaagatcggttccttcacttcttcatgccacaagtgtttattgagcacctgtgtgccaggcctcacagactcccagttgggttgaagaatggttgactgagtttgattcttcctgtaccctcggtcgtctgagctgtgtgcagacaacatccccccaccacccaagagggagggtagctcttccgccaccaggggcaagcacaggtcctggtggccccacgccacatgttagcccccctggagggggcgccagttggagacgggggctgggtgtccctggcccactcccggtcccctgtgctttacctccttgcccttgtgtctcaggtgtggtccctgcctgcttgatgaagttgctctgttcaagcctttggtgggatcatgtgtttgggggcttttaggggacccagctgcactggggcactgcccgtggcctgggtaggacatttcccagcaagggctggaggagttgccgtgccttcagcctgaatcgaatgtcagaaccagccagcggtgcttcaccctcttggggataacttgcttagttttttaataaatgttcctggttggttttcacagcaaaaaaatttgtg

SEQ ID NO: 301704 - DNA, 2159 bp, Homo sapiens
ctatgggcccattaacgcttgaatttccttaccccttagacatatgggccggaccccgggcaaaaaaactttgccctagaggcctaggcatggcagccgctctccaagatgctgcctgtggacgagttcctgcccgtcatgttcgacaaacacccagtgtccgagtacaaggcccacttctccctccgcaacctgcatgccttctctgtggagccgctgctcatctaccccacacactacacaggagacgatggctatgtgagtgacaccgagacctcagtcgtatggaacaatgagcacgtcaagaccgactgggaccgcgccaagtcccagaagatgcgggagcagcaggcactgagccgtgaggccaagaactcggacgtgctccagtccccactggacagtgctgcccgggatgaactctgaggggtagcagccagaaagccaaagcagccatcggtggcccaggctccacgtgcttactgaggacatcagggccacctctggaccccttggcaggccacagagggctctcgtgtggggtggtgtccagccagctcttgctaagcaatcacgtgcacacaggcagcattaatggagtgcctactgcatgccagcaacagggcttggccctggggaattgggaggaaccaagccctcttcatctgttcatgtgcccagcatttattaagcacctgctgtatgcaaggttcccatgttacggcagtgaatgaggcataattgttccctccatcagcgattgattcagtcatcaagcagttactgatcagattaagaatcaggcactagtgatacacattcatttttaaaattcattcaaggatttattgagtgcctactgtgtgttgggtgccattccaggctctgggattttttttttttttttttttttaagagtagagtctgtctctgtcacccaggctggagtgcagtggtgtgacggctcactgcagcctgcgcctcccagcgtccagcaattcttgtttctcggcctcccaagtagctgggactataggtgcgtgccatcacatctggctagtttttgtatttttagtagagacggggtttcaccatgttggccagactggtctcgaactcctgacctcaagtgatctgcccgccttggccacccaaagtgctagggttacaggcatgagccactgtgcccagcccaggctctgggaatattgagataaataagatgcttctatccatttattcaagcacatattggtcacctactgtgtgcctggcactcatgtcacaaagataagttcctgattcggtacacttactgagcacctgctgtgtgcagggagctgagctatgggatgggaatgggagtaaacaaggtactttttacttttttctttttttcctcactgctagacggtgtgggaacttctcactcattggcttctttcccacacacctgaagagcactgactgtgtgccgggcactagtgatacaaaagagtgtgacagttgttcagtctgcattttcgatcatgggctacatgccgagtgctggggcacagagatgaacaagatcggttccttcacttcttcatgccacaagtgtttattgagcacctgtgtgccaggcctcacagactcccagttgggttgaagaatggttgactgagtttgattcttcctgtaccctcggtcgtctgagctgtgtgcagacaacatccccccaccacccaagagggagggtagctcttccgccaccaggggcaagcacaggtcctggtggccccacgccacatgttagcccccctggagggggcgccagttggagacgggggctgggtgtccctggcccactcccggtcccctgtgctttacctccttgcccttgtgtctcaggtgtggtccctgcctgcttgatgaagttgctctgttcaagcctttggtgggatcatgtgtttgggggcttttaggggacccagctgcactggggcactgcccgtggcctgggtaggacatttcccagcaagggctggaggagttgccgtgccttcagcctgaatcgaatgtcagaaccagccagcggtgcttcaccctcttggggataacttgcttagttttttaataaatgttcctggttggttttcacagcaaaaaaatttgtg

SEQ ID NO: 301705 - DNA, 3198 bp, Homo sapiens
gcccctatgacccctttaaggcgcggccagagtcctcccgcagaaaaacgacttaaaggagacgcgtggcgcgatggcggcggccccacgcgcgggccggcggcgcgggcagccgctcctggcgctgctgcttctgctgctggcgccactgccgccgggggccccgccgggcgccgacgcctacttccccgaggagcgctggagcccggagtcgcccctgcaggcgccgcgcgtgctcatcgcgctgttggcgcgaaacgcggcccacgcgttgcccaccacgctgggcgcactcgagcggctgcggcacccgcgggagcgcacggcgctatgggtggctacggaccacaacatggataacacgtcaactgtgctgcgggagtggctggtggccgtgaagagtttgtaccattccgtggagtggcggccagcagaggagcccaggtcctacccggacgaggaaggcccgaaacactggtctgactcacgctacgagcatgtcatgaagttgcgccaggcagccctgaaatcagctcgagacatgtgggctgattacatcctgtttgtagatgcggacaacctgatcctcaaccctgacacactgagcctgctcatcgctgagaacaagacggtggtcgcccccatgctggattcccgggctgcgtactccaacttctggtgtggaatgacttcccagggctactacaagcgcacacctgcctacatccctatccgcaagcgagaccgccggggctgctttgcagttcccatggtgcactcgaccttcctgatcgacctgcggaaggcggcgtccaggaacctggccttctacccacctcaccctgactacacctggtcctttgacgacatcatcgtctttgccttctcctgcaagcaggcagtgaagcacccgcccgcagagccctcccgcttcatctcggctcccaccaagacaccggacaagatgggcttcgacgaggtcttcatgatcaacctgaggcggcggcaggaccggcgggagcgcatgctgcgggcgctgcaggcacaggagatcgagtgccggctggtggaggccgtggacggcaaagccatgaacaccagccaggtggaggcgctggggatccagatgctgcctggctaccgggacccctaccacggccggcccctcaccaagggtgagctgggctgcttcctgagccactacaacatctggaaggaggtggtggaccgggggctgcagaaatcgcttgtgtttgaggatgacctgcgttttgagatcttcttcaagagacgtctgatgaacctcatgcgggatgtggagcgggagggcctggactgggacctcatctatgtgggccggaagcggatgcaggtggagcaccccgagaaggctgtgcctcgcgtgaggaacctggtggaggccgactattcctactggaccagtgctgcccgggatgaactctgaggggtagcagccagaaagccaaagcagccatcggtggcccaggctccacgtgcttactgaggacatcagggccacctctggaccccttggcaggccacagagggctctcgtgtggggtggtgtccagccagctcttgctaagcaatcacgtgcacacaggcagcattaatggagtgcctactgcatgccagcaacagggcttggccctggggaattgggaggaaccaagccctcttcatctgttcatgtgcccagcatttattaagcacctgctgtatgcaaggttcccatgttacggcagtgaatgaggcataattgttccctccatcagcgattgattcagtcatcaagcagttactgatcagattaagaatcaggcactagtgatacacattcatttttaaaattcattcaaggatttattgagtgcctactgtgtgttgggtgccattccaggctctgggattttttttttttttttttttttaagagtagagtctgtctctgtcacccaggctggagtgcagtggtgtgacggctcactgcagcctgcgcctcccagcgtccagcaattcttgtttctcggcctcccaagtagctgggactataggtgcgtgccatcacatctggctagtttttgtatttttagtagagacggggtttcaccatgttggccagactggtctcgaactcctgacctcaagtgatctgcccgccttggccacccaaagtgctagggttacaggcatgagccactgtgcccagcccaggctctgggaatattgagataaataagatgcttctatccatttattcaagcacatattggtcacctactgtgtgcctggcactcatgtcacaaagataagttcctgattcggtacacttactgagcacctgctgtgtgcagggagctgagctatgggatgggaatgggagtaaacaaggtactttttacttttttctttttttcctcactgctagacggtgtgggaacttctcactcattggcttctttcccacacacctgaagagcactgactgtgtgccgggcactagtgatacaaaagagtgtgacagttgttcagtctgcattttcgatcatgggctacatgccgagtgctggggcacagagatgaacaagatcggttccttcacttcttcatgccacaagtgtttattgagcacctgtgtgccaggcctcacagactcccagttgggttgaagaatggttgactgagtttgattcttcctgtaccctcggtcgtctgagctgtgtgcagacaacatccccccaccacccaagagggagggtagctcttccgccaccaggggcaagcacaggtcctggtggccccacgccacatgttagcccccctggagggggcgccagttggagacgggggctgggtgtccctggcccactcccggtcccctgtgctttacctccttgcccttgtgtctcaggtgtggtccctgcctgcttgatgaagttgctctgttcaagcctttggtgggatcatgtgtttgggggcttttaggggacccagctgcactggggcactgcccgtggcctgggtaggacatttcccagcaagggctggaggagttgccgtgccttcagcctgaatcgaatgtcagaaccagccagcggtgcttcaccctcttggggataacttgcttagttttttaataaatgttcctggttggttttcacagcaaaaaaatttgtg

SEQ ID NO: 301706 - DNA, 2537 bp, Homo sapiens
  misc_feature (2414)..(2414): n is a, c, g, or t
  misc_feature (2417)..(2417): n is a, c, g, or t
gcccctatgacccctttaaggcgcggccagagtcctcccgcagaaaaacgacttaaaggagacgcgtggcgcgatggcggcggccccacgcgcgggccggcggcgcgggcagccgctcctggcgctgctgcttctgctgctggcgccactgccgccgggggccccgccgggcgccgacgcctacttccccgaggagcgctggagcccggagtcgcccctgcaggcgccgcgcgtgctcatcgcgctgttggcgcgaaacgcggcccacgcgttgcccaccacgctgggcgcactcgagcggctgcggcacccgcgggagcgcacggcgctatgggtggctacggaccacaacatggataacacgtcaactgtgctgcgggagtggctggtggccgtgaagagtttgtaccattccgtggagtggcggccagcagaggagcccaggtcctacccggacgaggaaggcccgaaacactggtctgactcacgctacgagcatgtcatgaagttgcgccaggcagccctgaaatcagctcgagacatgtgggctgattacatcctgtttgtagatgcggacaacctgatcctcaaccctgacacactgagcctgctcatcgctgagaacaagacggtggtcgcccccatgctggattcccgggctgcgtactccaacttctggtgtggaatgacttcccagggctactacaagcgcacacctgcctacatccctatccgcaagcgagaccgccggggctgctttgcagttcccatggtgcactcgaccttcctgatcgacctgcggaaggcggcgtccaggaacctggccttctacccacctcaccctgactacacctggtcctttgacgacatcatcgtctttgccttctcctgcaagcaggcagaggttcagatgtatgtgtgcaacaaggaggagtacggattcttgccagtgccattgcgcgcccacagcaccctccaggatgaggccgagagcttcatgcatgtgcagctggaggtcatggtgaagcacccgcccgcagagccctcccgcttcatctcggctcccaccaagacaccggacaagatgggcttcgacgaggtcttcatgatcaacctgaggcggcggcaggaccggcgggagcgcatgctgcgggcgctgcaggcacaggagatcgagtgccggctggtggaggccgtggacggcaaagccatgaacaccagccaggtggaggcgctggggatccagatgctgcctggctaccgggacccctaccacggccggcccctcaccaagggtgagctgggctgcttcctgagccactacaacatctggaaggaggtggtggaccgggggctgcagaaatcgcttgtgtttgaggatgacctgcgttttgagatcttcttcaagagacgtctgatgaacctcatgcgggatgtggagcgggagggcctggactgggacctcatctatgtgggccggaagcggatgcaggtggagcaccccgagaaggctgtgcctcgcgtgaggaacctggtggaggccgactattcctactggaccctggcctacgtgatctccctgcaaggcgcccgcaaactgctggctgctgagccgctctccaagatgctgcctgtggacgagttcctgcccgtcatgttcgacaaacacccagtgtccgagtacaaggcccacttctccctccgcaacctgcatgccttctctgtggagccgctgctcatctaccccacacactacacaggagacgatggctatgtgagtgacaccgagacctcagtcgtatggaacaatgagcacgtcaagaccgactgggaccgcgccaagtcccagaagatgcgggagcagcaggcactgagccgtgaggccaagaactcggacgtgctccagtccccactggacagtgctgcccgggatgaactctgaggggtagcagccagaaagccaaagcagccatcggtggcccaggctccacgtgcttactgaggacatcagggccacctctggaccccttggcaggccacagagggctctcgtgtggggtggtgtccagccagctcttgctaagcaatcacgtgcacacaggcagcattaatggagtgcctactgcatgccagcaacagggcttggccctggggaattgggaggaaccaagccctcttcatctgttcatgtgcccagcatttattaagcacctgctgtatgcaaggttcccatgttacggcagtgaatgaggcataattgttccctccatcagcgattgattcagtcatcaagcagttactgatcagattaagaatcaggcactagtgatacacattcatttttaaaattcattcaaggatttattgagtgcctactgtgtgttgggtgccattccaggctctgggattttaanaanttaatataaggaagtacaacagtctggcttgggcacccagggttgtgtactgacagtggtgtataagagtcagtggaagctgggctcccaagggtcaagaatcctgttacgggcctccca

SEQ ID NO: 301707 - DNA, 1548 bp, Homo sapiens
  misc_feature (1470)..(1470): n is a, c, g, or t
  misc_feature (1479)..(1479): n is a, c, g, or t
  misc_feature (1527)..(1527): n is a, c, g, or t
  misc_feature (1544)..(1544): n is a, c, g, or t
gcccctatgacccctttaaggcgcggccagagtcctcccgcagaaaaacgacttaaaggagacgcgtggcgcgatggcggcggccccacgcgcgggccggcggcgcgggcagccgctcctggcgctgctgcttctgctgctggcgccactgccgccgggggccccgccgggcgccgacgcctacttccccgaggagcgctggagcccggagtcgcccctgcaggcgccgcgcgtgctcatcgcgctgttggcgcgaaacgcggcccacgcgttgcccaccacgctgggcgcactcgagcggctgcggcacccgcgggagcgcacggcgctatgggtggctacggaccacaacatggataacacgtcaactgtgctgcgggagtggctggtggccgtgaagagtttgtaccattccgtggagtggcggccagcagaggagcccaggtcctacccggacgaggaaggcccgaaacactggtctgactcacgctacgagcatgtcatgaagttgcgccaggcagccctgaaatcagctcgagacatgtgggctgattacatcctgtttgtagatgcggacaacctgatcctcaaccctgacacactgagcctgctcatcgctgagaacaagacggtggtcgcccccatgctggattcccgggctgcgtactccaacttctggtgtggaatgacttcccagggctactacaagcgcacacctgcctacatccctatccgcaagcgagaccgccggggctgctttgcagttcccatggtgcactcgaccttcctgatcgacctgcggaaggcggcgtccaggaacctggccttctacccacctcaccctgactacacctggtcctttgacgacatcatcgtctttgccttctcctgcaagcaggcagaggttcagatgtatgtgtgcaacaaggaggagtacggattcttgccagtgccattgcgcgcccacagcaccctccaggatgaggccgagagcttcatgcatgtgcagctggaggtcatggtgaagcacccgcccgcagagccctcccgcttcatctcggctcccaccaagacaccggacaagatgggcttcgacgaggtcttcatgatcaacctgaggcggcggcaggaccggcgggagcgcatgctgcgggcgctgcaggcacaggagatcgagtgccggctggtggaggccgtggacggcaaagccatgaacaccagccaggtggaggcgctggggatccagatgctgcctggctaccgggacccctaccacggccggcccctcaccaagggtgagctgggctgcttcctgagccactacaacatctggaaggaggtggtggaccgggggctgcagaaatcgcttgtgtttgaggatgacctgcgttttgagatcttcttcaagagacgtctgatgaacctcatgcgggatgtggagcgggagggcctggactgggacctcatcancatgacctncagctgcacatgcatgaagctctcggcctcatcctggagggtgctgtnggcgcgcaatggcactngcaa

SEQ ID NO: 301708 - DNA, 1130 bp, Homo sapiens
gcccctatgacccctttaaggcgcggccagagtcctcccgcagaaaaacgacttaaaggagacgcgtggcgcgatggcggcggccccacgcgcgggccggcggcgcgggcagccgctcctggcgctgctgcttctgctgctggcgccactgccgccgggggccccgccgggcgccgacgcctacttccccgaggagcgctggagcccggagtcgcccctgcaggcgccgcgcgtgctcatcgcgctgttggcgcgaaacgcggcccacgcgttgcccaccacgctgggcgcactcgagcggctgcggcacccgcgggagcgcacggcgctatgggtggctacggaccacaacatggataacacgtcaactgtgctgcgggagtggctggtggccgtgaagagtttgtaccattccgtggagtggcggccagcagaggagcccaggtcctacccggacgaggaaggcccgaaacactggtctgactcacgctacgagcatgtcatgaagttgcgccaggcagccctgaaatcagctcgagacatgtgggctgattacatcctgtttgtagatgcggacaacctgatcctcaaccctgacacactgagcctgctcatcgctgagaacaagacggtggtcgcccccatgctggattcccgggctgcgtactccaacttctggtgtggaatgacttcccagggctactacaagcgcacacctgcctacatccctatccgcaagcgagaccgccggggctgctttgcagttcccatggtgcactcgaccttcctgatcgacctgcggaaggcggcgtccaggaacctggccttctacccacctcaccctgactacacctggtcctttgacgacatcatcgtctttgccttctcctgcaagcaggcagaggttcagatgtatgtgtgcaacaaggaggagtacggattcttgccagtgccattgcgcgcccacagcaccctccaggatgaggccgagagcttcatgcatgtgcagctggaggtcatggcacccgccccagagccctcccgcttcatcgcgcgtcccgggcgccgcccgggagccgaaggcaaagctcgcttgatcttgattttcagtacgaatacagacggtcacg

SEQ ID NO: 301709 - DNA, 663 bp, Homo sapiens
ggccacagtgggaagggggcaggcaggagcagcatgaaccccctgtgccctcctctccccaggacgacttcaaagagggctacctggagacagtggcggcttattatgaggagcagcacccagagctcactcctctacttgaaaaagaaagagatggattacggtgccgaggcaacagatcccctgtcccggatgttgaggatcccgcaaccgaggagcctggggagagcttttgtgacaaggtcatgagatggttccaggccatgctgcagcggctgcagacctggtggcacggggttctggcctgggtgaaggagaaggtggtggccctggtccatgcagtgcaggccctctggaaacagttccagagtttctgctgctctctgtcagagctcttcatgtcctctttccagtcctacggagccccacggggggacaaggaggagctgacaccccagaagtgctctgaaccccaatcctcaaaatgaagatactgacaccacctttgccctccccgtcaccgcgcacccaccctgacccctccctcagctgtcctgtgccccgccctctcccgcacactcagtccccctgcctggcgttcctgccgcagctctgacctggtgctgtcgccctggcatcttaataaaacctgcttatacttcc

SEQ ID NO: 301710 - DNA, 1036 bp, Homo sapiens
caagaaaaaaaaaacttaaggctagattaatgagccccctgattatcggccgaggcagactcctgtctctctccggagccttggctccttgaacttttggccgccatgtgcttcccgaaggtcctctctgatgacatgaagaagctgaaggcccgaatgcaccaggccatagaaagattttatgataaaatgcaaaatgcagaatcaggacgtggacaggtgatgtcgagcctggcagagctggaggacgacttcaaagagggctacctggagacagtggcggcttattatgaggagcagcacccagagctcactcctctacttgaaaaagaaagagatggattacggtgccgaggcaacagatcccctgtcccggatgttgaggatcccgcaaccgaggagcctggggagagcttttgtgacaaggtcatgagatggttccaggccatgctgcagcggctgcagacctggtggcacggggttctggcctgggtgaaggagaaggtggtggccctggtccatgcagtgcaggccctctggaaacagttccagagtttctgctgctctctgtcagagctcttcatgtcctctttccagtcctacggagccccacggggggacaaggaggagctgacaccccagaagtgctctgaaccccaatcctcaaaatgaagatactgacaccaccttcacgcggttccaccggggcacccctccactgaagcaccttcccacatcatgctggagcctgtgccccgatccatccttcaacgaccaacaccaacaagcctgcactgagagaaaaggccgcaacacgagcaggagcggaagacgcctggagaagagaccgtgtaaacaaccaaaagcaaaaacgcagaaagaggacaaagaaaataaggaaagagacgatgaggaaaggcaaaacgaacaccccaaatcgaacgaaaggagaagccggccaaaataaaggaggaagaacacacggacgagaaaagaagaagacaagaggaaaaagaagaaggagggagacgacaga

SEQ ID NO: 301711 - DNA, 763 bp, Homo sapiens
  misc_feature (3)..(3): n is a, c, g, or t
  misc_feature (6)..(7): n is a, c, g, or t
  misc_feature (737)..(737): n is a, c, g, or t
  misc_feature (750)..(750): n is a, c, g, or t
ggnagnngccccagccagctgtcccgagtctggactttccctctgcccctccccactctcaggctggtggggtggggaaagcagcccattcctgggctcagagactcccaccccagctcagagggagcaggggcccagccagggacggaccctcattcctcccagggaccccagacctctgtctctctcgggtaagtctccatctctgtctgtctctgtctctgtctctgtctctgtctgtttttcacgcactcagcaaggcctcctgccctgagagaggctccgcccactaccccccactttccccataaaaccagctgagtctttgtgccaggaagactgcgtgcagaaggtgactgtctcagtggagctgggtcatctcaggtggggagttggggtccccgaaggtgaggaccctctggggaggagggtgcttctctgagacactttcttttcctcacacctgttcctcgccagcagccttggctccttgaacttttggccgccatgtgcttcccgaaggtcctctctgatgacatgaagaagctgaaggcccgaatgcaccaggccatagaaagattttatgataaaatgcaaaatgcagaatcaggacgtggacaggtgatgtcgagcctggcagagctggaggacgacttcaaagagggctacctggagacagtggcggcttattatgaggagcagcacccagagctcacttctctacttgtgaggatccngcccgatgagccntgggaggctttgt

SEQ ID NO: 301712 - DNA, 306 bp, Homo sapiens
gcggccgcctactactactactgctcgaattcaagcttctaacgatgtacggggagtcctacggagccccacggggggacaaggaggagctgacaccccagaagtgctctgaaccccaatcctcaaaatgaagatactgacaccacctttgccctccccgtcaccgcgcacccaccctgacccctccctcagctgtcctgtgccccgccctctcccgcacactcagtccccctgcctggcgttcctgccgcagctctgacctggtgctgtcgccctggcatcttaataaaacctgcttatacttcc

SEQ ID NO: 301713 - DNA, 899 bp, Homo sapiens
  misc_feature (3)..(3): n is a, c, g, or t
  misc_feature (6)..(7): n is a, c, g, or t
ggnagnngccccagccagctgtcccgagtctggactttccctctgcccctccccactctcaggctggtggggtggggaaagcagcccattcctgggctcagagactcccaccccagctcagagggagcaggggcccagccagggacggaccctcattcctcccagggaccccagacctctgtctctctcgggtaagtctccatctctgtctgtctctgtctctgtctctgtctctgtctgtttttcacgcactcagcaaggcctcctgccctgagagaggctccgcccactaccccccactttccccataaaaccagctgagtctttgtgccaggaagactgcgtgcagaaggtgactgtctcagtggagctgggtcatctcaggtggggagttggggtccccgaaggtgaggaccctctggggaggagggtgcttctctgagacactttcttttcctcacacctgttcctcgccagcagccttggctccttgaacttttggccgccatgtgcttcccgaaggtcctctctgatgacatgaagaagctgaaggcccgaatggtaatgctcctccctacttctgctcaggggttgggggcctgggtctcagcgtgtgacactgaggacactgtgggacacctgggaccctggagggacaaggatccggccctttggtgccaactctgcctctcttcacagcaccaggccatagaaagattttatgataaaatgcaaaatgcagaatcaggacgtggacaggtgggtggatttcccctcaggcaccaggtcacatgtccccgcccccaggcactccaccctgtgtggggctcagggtgagaaggatgaagagggacccacaggctccctcaccccttaccgtgggcaaatgcttgcacctg

SEQ ID NO: 301714 - DNA, 617 bp, Homo sapiens
  misc_feature (3)..(3): n is a, c, g, or t
  misc_feature (6)..(7): n is a, c, g, or t
  misc_feature (580)..(580): n is a, c, g, or t
ggnagnngccccagccagctgtcccgagtctggactttccctctgcccctccccactctcaggctggtggggtggggaaagcagcccattcctgggctcagagactcccaccccagctcagagggagcaggggcccagccagggacggaccctcattcctcccagggaccccagacctctgtctctctcgggtaagtctccatctctgtctgtctctgtctctgtctctgtctctgtctgtttttcacgcactcagcaaggcctcctgccctgagagaggctccgcccactaccccccactttccccataaaaccagctgagtctttgtgccaggaagactgcgtgcagaaggtgactgtctcagtggagctgggtcatctcaggtggggagttggggtccccgaaggtgaggaccctctggggaggagggtgcttctctgagacactttcttttcctcacacctgttcctcgccagcagccttggctccttgaacttttggccgccatgtgcttcccgaaggtcctctctgatgacatgaagaagctgaaggcccgaatgcaccaggccatagagattntatgattgcacgacttcgagggctacctggagacgtg

SEQ ID NO: 301715 - DNA, 167 bp, Homo sapiens
ggtctcctcgactcctgaggaaagcccaccgggcggggcgggaggtgaaaaggctggggaagtcagagccctctcccgcacactcagtccccctgcctggcgttcctgccgcagctctgacctggtgctgtcgccctggcatcttaataaaacctgcttatacttcc

SEQ ID NO: 301716 - DNA, 1438 bp, Homo sapiens
  misc_feature (3)..(3): n is a, c, g, or t
  misc_feature (6)..(7): n is a, c, g, or t
ggnagnngccccagccagctgtcccgagtctggactttccctctgcccctccccactctcaggctggtggggtggggaaagcagcccattcctgggctcagagactcccaccccagctcagagggagcaggggcccagccagggacggaccctcattcctcccagggaccccagacctctgtctctctcgggccttggctccttgaacttttggccgccatgtgcttcccgaaggtcctctctgatgacatgaagaagctgaaggcccgaatgcaccaggccatagaaagattttatgataaaatgcaaaatgcagaatcaggacgtggacaggtgatgtcgagcctggcagagctggaggacgacttcaaagagggctacctggagacagtggcggcttattatgaggagcagcacccagagctcactcctctacttgaaaaagaaagagatggattacggtgccgaggcaacagatcccctgtcccggatgttgaggatcccgcaaccgaggagcctggggagagcttttgtgacaaggtcatgagatggttccaggccatgctgcagcggctgcagacctggtggcacggggttctggcctgggtgaaggagaaggtggtggccctggtccatgcagtgcaggccctctggaaacagttccagagtttctgctgctctctgtcagagctcttcatgtcctctttccagtcctacggagccccacggggggacaaggaggagctgacaccccagaagtgctctgaaccccaatcctcaaaatgaagatactgacaccacctttgccctccccgtcaccgcgcacccaccctgacccctccctcagctgtcctgtgccccgccctctcccgcacactcagtccccctgcctggcgttcctgccgcagctctgacctggtgctgtcgccctggcatcttaataaaacctgcttatacttccctggcaggggagataccatgaaaggaaacagagacagacaaacgagaccaaccacacaaaccagagaacaagcccacacaaggagaaacagcacggagcaacacataagaaagcaccggcggcgggagcacaacacaacaacagacaggaggagcacaaacaagcagcagagcgcctaggccggcgaagacagccgcccgccaagtggtagacgccataaccagcgagccgcgagccgcaataagacagcgagcgagaacagaatcgctggcgcactagaagacagcaagagcgcgcggagacagacgaccaataaccaagcagaccagcggaacaaaacgaaagctgagacaaaaagagcacgcggcgacaagaaggagaacgaaatggcgagcgcgcgcgacgtaacagcggcaagagacacaaccgagcacggacagcacaaagagaccaccgacaagaaagcaacagggccgt

SEQ ID NO: 301717 - DNA, 1508 bp, Homo sapiens
  misc_feature (3)..(3): n is a, c, g, or t
  misc_feature (6)..(7): n is a, c, g, or t
ggnagnngccccagccagctgtcccgagtctggactttccctctgcccctccccactctcaggctggtggggtggggaaagcagcccattcctgggctcagagactcccaccccagctcagagggagcaggggcccagccagggacggaccctcattcctcccagggaccccagacctctgtctctctcggcagctgagtctttgtgccaggaagactgcgtgcagaaggtgactgtctcagtggagctgggtcatctcaggccttggctccttgaacttttggccgccatgtgcttcccgaaggtcctctctgatgacatgaagaagctgaaggcccgaatgcaccaggccatagaaagattttatgataaaatgcaaaatgcagaatcaggacgtggacaggtgatgtcgagcctggcagagctggaggacgacttcaaagagggctacctggagacagtggcggcttattatgaggagcagcacccagagctcactcctctacttgaaaaagaaagagatggattacggtgccgaggcaacagatcccctgtcccggatgttgaggatcccgcaaccgaggagcctggggagagcttttgtgacaaggtcatgagatggttccaggccatgctgcagcggctgcagacctggtggcacggggttctggcctgggtgaaggagaaggtggtggccctggtccatgcagtgcaggccctctggaaacagttccagagtttctgctgctctctgtcagagctcttcatgtcctctttccagtcctacggagccccacggggggacaaggaggagctgacaccccagaagtgctctgaaccccaatcctcaaaatgaagatactgacaccacctttgccctccccgtcaccgcgcacccaccctgacccctccctcagctgtcctgtgccccgccctctcccgcacactcagtccccctgcctggcgttcctgccgcagctctgacctggtgctgtcgccctggcatcttaataaaacctgcttatacttccctggcaggggagataccatgaaaggaaacagagacagacaaacgagaccaaccacacaaaccagagaacaagcccacacaaggagaaacagcacggagcaacacataagaaagcaccggcggcgggagcacaacacaacaacagacaggaggagcacaaacaagcagcagagcgcctaggccggcgaagacagccgcccgccaagtggtagacgccataaccagcgagccgcgagccgcaataagacagcgagcgagaacagaatcgctggcgcactagaagacagcaagagcgcgcggagacagacgaccaataaccaagcagaccagcggaacaaaacgaaagctgagacaaaaagagcacgcggcgacaagaaggagaacgaaatggcgagcgcgcgcgacgtaacagcggcaagagacacaaccgagcacggacagcacaaagagaccaccgacaagaaagcaacagggccgt

SEQ ID NO: 301718 - DNA, 1631 bp, Homo sapiens
  misc_feature (3)..(3): n is a, c, g, or t
  misc_feature (6)..(7): n is a, c, g, or t
ggnagnngccccagccagctgtcccgagtctggactttccctctgcccctccccactctcaggctggtggggtggggaaagcagcccattcctgggctcagagactcccaccccagctcagagggagcaggggcccagccagggacggaccctcattcctcccagggaccccagacctctgtctctctcgggtaagtctccatctctgtctgtctctgtctctgtctctgtctctgtctgtttttcacgcactcagcaaggcctcctgccctgagagaggctccgcccactaccccccactttccccataaaaccagctgagtctttgtgccaggaagactgcgtgcagaaggtgactgtctcagtggagctgggtcatctcaggccttggctccttgaacttttggccgccatgtgcttcccgaaggtcctctctgatgacatgaagaagctgaaggcccgaatgcaccaggccatagaaagattttatgataaaatgcaaaatgcagaatcaggacgtggacaggtgatgtcgagcctggcagagctggaggacgacttcaaagagggctacctggagacagtggcggcttattatgaggagcagcacccagagctcactcctctacttgaaaaagaaagagatggattacggtgccgaggcaacagatcccctgtcccggatgttgaggatcccgcaaccgaggagcctggggagagcttttgtgacaaggtcatgagatggttccaggccatgctgcagcggctgcagacctggtggcacggggttctggcctgggtgaaggagaaggtggtggccctggtccatgcagtgcaggccctctggaaacagttccagagtttctgctgctctctgtcagagctcttcatgtcctctttccagtcctacggagccccacggggggacaaggaggagctgacaccccagaagtgctctgaaccccaatcctcaaaatgaagatactgacaccacctttgccctccccgtcaccgcgcacccaccctgacccctccctcagctgtcctgtgccccgccctctcccgcacactcagtccccctgcctggcgttcctgccgcagctctgacctggtgctgtcgccctggcatcttaataaaacctgcttatacttccctggcaggggagataccatgaaaggaaacagagacagacaaacgagaccaaccacacaaaccagagaacaagcccacacaaggagaaacagcacggagcaacacataagaaagcaccggcggcgggagcacaacacaacaacagacaggaggagcacaaacaagcagcagagcgcctaggccggcgaagacagccgcccgccaagtggtagacgccataaccagcgagccgcgagccgcaataagacagcgagcgagaacagaatcgctggcgcactagaagacagcaagagcgcgcggagacagacgaccaataaccaagcagaccagcggaacaaaacgaaagctgagacaaaaagagcacgcggcgacaagaaggagaacgaaatggcgagcgcgcgcgacgtaacagcggcaagagacacaaccgagcacggacagcacaaagagaccaccgacaagaaagcaacagggccgt

SEQ ID NO: 301719 - DNA, 1099 bp, Homo sapiens
  misc_feature (3)..(3): n is a, c, g, or t
  misc_feature (6)..(7): n is a, c, g, or t
ggnagnngccccagccagctgtcccgagtctggactttccctctgcccctccccactctcaggctggtggggtggggaaagcagcccattcctgggctcagagactcccaccccagctcagagggagcaggggcccagccagggacggaccctcattcctcccagggaccccagacctctgtctctctcgggccttggctccttgaacttttggccgccatgtgcttcccgaaggtcctctctgatgacatgaagaagctgaaggcccgaatgcaccaggccatagaaagattttatgataaaatgcaaaatgcagaatcaggacgtggacaggtgatgtcgagcctggcagagctggaggacgacttcaaagagggctacctggagacagtggcggcttattatgaggagcagcacccagagctcactcctctacttgaaaaagaaagagatggattacggtgccgaggcaacagatcccctgtcccggatgttgaggatcccgcaaccgaggagcctggggagagcttttgtgacaaggtcatgagatggttccaggccatgctgcagcggctgcagacctggtggcacggggttctggcctgggtgaaggagaaggtggtggccctggtccatgcagtgcaggccctctggaaacagttccagagtttctgctgctctctgtcagagctcttcatgtcctctttccagtcctacggagccccacggggggacaaggaggagctgacaccccagaagtgctctgaaccccaatcctcaaaatgaagatactgacaccacctttgccctccccgtcaccgcgcacccaccctgacccctccctcagctgtcctgtgccccgccctctcccgcacactcagtccccctgcctggcgttcctgccgcagctctgacctggtgctgtcgccctggcatcttaataaaacctgcttatacttccctggcaggggagataccatgaatcgcggaggtgggtttcccagggcaaggctgatctgttgccgtattagtccgttttcacacagctataaagaatgcctgagactgggtgatgtataaagaaaagaagtttaactga

SEQ ID NO: 301720 - DNA, 1540 bp, Homo sapiens
  misc_feature (3)..(3): n is a, c, g, or t
  misc_feature (6)..(7): n is a, c, g, or t
ggnagnngccccagccagctgtcccgagtctggactttccctctgcccctccccactctcaggctggtggggtggggaaagcagcccattcctgggctcagagactcccaccccagctcagagggagcaggggcccagccagggacggaccctcattcctcccagggaccccagacctctgtctctctcgggccttggctccttgaacttttggccgccatgtgcttcccgaaggtcctctctgatgacatgaagaagctgaaggcccgaatgcaccaggccatagaaagattttatgataaaatgcaaaatgcagaatcaggacgtggacaggtgatgtcgagcctggcagagctggaggacgacttcaaagagggctacctggagacagtggcggcttattatgaggagcagcacccagagctcactcctctacttgaaaaagaaagagatggattacggtgccgaggcaacagatcccctgtcccggatgttgaggatcccgcaaccgaggagcctggggagagcttttgtgacaaggtcatgagatggttccaggccatgctgcagcggctgcagacctggtggcacggggttctggcctgggtgaaggagaaggtggtggccctggtccatgcagtgcaggccctctggaaacagttccagagtttctgctgctctctgtcagagctcttcatgtcctctttccagtcctacggagccccacggggggacaaggaggagctgacaccccagaagtgctctgaaccccaatcctcaaaatgaagatactgacaccacctttgccctccccgtcaccgcgcacccaccctgacccctccctcagctgtcctgtgccccgccctctcccgcacactcagtccccctgcctggcgttcctgccgcagctctgacctggtgctgtcgccctggcatcttaataaaacctgcttatacttccctggcaggggagataccatgacgtgaaaaaacaaaaaaaaactgaaacatgatctcctttaacaaagggtcgagactgaagtcctaatcatcctgtggtgtggagagggatcaatctcgaaaaagcggaaacgcgcagcatgtgtacaatcaagacactcggggggggggggcgggacccaatgccccctttatgaaggggcccttaaatatagatgagccccgttttaaaaaacatgagcacggaaaaaccgcggctgccccaaatataatggtgtggaaaaaaaccctgtttgggcgtggggggaataatgaagagaccccgccaattcgcccttccacacaaatgtcacaggcccatggacaatacaacatattgtcgtgcttatatttttgaaaaaaccgggatatagctgatacacaggcgcattattaacccaaaggggccacttggcaatacactctataaaaaacaaaacaacccgacaggggggaagtgtggcccaacatgagacaaaattcctctattgaagcccgctccccccgggaagggggaaaaggcctctttagggctgggccc

SEQ ID NO: 301721 - DNA, 1769 bp, Homo sapiens
  misc_feature (3)..(3): n is a, c, g, or t
  misc_feature (6)..(7): n is a, c, g, or t
ggnagnngccccagccagctgtcccgagtctggactttccctctgcccctccccactctcaggctggtggggtggggaaagcagcccattcctgggctcagagactcccaccccagctcagagggagcaggggcccagccagggacggaccctcattcctcccagggaccccagacctctgtctctctcgggtaagtctccatctctgtctgtctctgtctctgtctctgtctctgtctgtttttcacgcactcagcaaggcctcctgccctgagagaggctccgcccactaccccccactttccccataaaaccagctgagtctttgtgccaggaagactgcgtgcagaaggtgactgtctcagtggagctgggtcatctcaggccttggctccttgaacttttggccgccatgtgcttcccgaaggtcctctctgatgacatgaagaagctgaaggcccgaatggtaatgctcctccctacttctgctcaggggttgggggcctgggtctcagcgtgtgacactgaggacactgtgggacacctgggaccctggagggacaaggatccggccctttggtgccaactctgcctctcttcacagcaccaggccatagaaagattttatgataaaatgcaaaatgcagaatcaggacgtggacaggtgatgtcgagcctggcagagctggaggacgacttcaaagagggctacctggagacagtggcggcttattatgaggagcagcacccagagctcactcctctacttgaaaaagaaagagatggattacggtgccgaggcaacagatcccctgtcccggatgttgaggatcccgcaaccgaggagcctggggagagcttttgtgacaaggtcatgagatggttccaggccatgctgcagcggctgcagacctggtggcacggggttctggcctgggtgaaggagaaggtggtggccctggtccatgcagtgcaggccctctggaaacagttccagagtttctgctgctctctgtcagagctcttcatgtcctctttccagtcctacggagccccacggggggacaaggaggagctgacaccccagaagtgctctgaaccccaatcctcaaaatgaagatactgacaccacctttgccctccccgtcaccgcgcacccaccctgacccctccctcagctgtcctgtgccccgccctctcccgcacactcagtccccctgcctggcgttcctgccgcagctctgacctggtgctgtcgccctggcatcttaataaaacctgcttatacttccctggcaggggagataccatgaaaggaaacagagacagacaaacgagaccaaccacacaaaccagagaacaagcccacacaaggagaaacagcacggagcaacacataagaaagcaccggcggcgggagcacaacacaacaacagacaggaggagcacaaacaagcagcagagcgcctaggccggcgaagacagccgcccgccaagtggtagacgccataaccagcgagccgcgagccgcaataagacagcgagcgagaacagaatcgctggcgcactagaagacagcaagagcgcgcggagacagacgaccaataaccaagcagaccagcggaacaaaacgaaagctgagacaaaaagagcacgcggcgacaagaaggagaacgaaatggcgagcgcgcgcgacgtaacagcggcaagagacacaaccgagcacggacagcacaaagagaccaccgacaagaaagcaacagggccgt

SEQ ID NO: 301722 - DNA, 1726 bp, Homo sapiens
  misc_feature (3)..(3): n is a, c, g, or t
  misc_feature (6)..(7): n is a, c, g, or t
ggnagnngccccagccagctgtcccgagtctggactttccctctgcccctccccactctcaggctggtggggtggggaaagcagcccattcctgggctcagagactcccaccccagctcagagggagcaggggcccagccagggacggaccctcattcctcccagggaccccagacctctgtctctctcgggtaagtctccatctctgtctgtctctgtctctgtctctgtctctgtctgtttttcacgcactcagcaaggcctcctgccctgagagaggctccgcccactaccccccactttccccataaaaccagctgagtctttgtgccaggaagactgcgtgcagaaggtgactgtctcagtggagctgggtcatctcaggtggggagttggggtccccgaaggtgaggaccctctggggaggagggtgcttctctgagacactttcttttcctcacacctgttcctcgccagcagccttggctccttgaacttttggccgccatgtgcttcccgaaggtcctctctgatgacatgaagaagctgaaggcccgaatgcaccaggccatagaaagattttatgataaaatgcaaaatgcagaatcaggacgtggacaggtgatgtcgagcctggcagagctggaggacgacttcaaagagggctacctggagacagtggcggcttattatgaggagcagcacccagagctcactcctctacttgaaaaagaaagagatggattacggtgccgaggcaacagatcccctgtcccggatgttgaggatcccgcaaccgaggagcctggggagagcttttgtgacaaggtcatgagatggttccaggccatgctgcagcggctgcagacctggtggcacggggttctggcctgggtgaaggagaaggtggtggccctggtccatgcagtgcaggccctctggaaacagttccagagtttctgctgctctctgtcagagctcttcatgtcctctttccagtcctacggagccccacggggggacaaggaggagctgacaccccagaagtgctctgaaccccaatcctcaaaatgaagatactgacaccacctttgccctccccgtcaccgcgcacccaccctgacccctccctcagctgtcctgtgccccgccctctcccgcacactcagtccccctgcctggcgttcctgccgcagctctgacctggtgctgtcgccctggcatcttaataaaacctgcttatacttccctggcaggggagataccatgaaaggaaacagagacagacaaacgagaccaaccacacaaaccagagaacaagcccacacaaggagaaacagcacggagcaacacataagaaagcaccggcggcgggagcacaacacaacaacagacaggaggagcacaaacaagcagcagagcgcctaggccggcgaagacagccgcccgccaagtggtagacgccataaccagcgagccgcgagccgcaataagacagcgagcgagaacagaatcgctggcgcactagaagacagcaagagcgcgcggagacagacgaccaataaccaagcagaccagcggaacaaaacgaaagctgagacaaaaagagcacgcggcgacaagaaggagaacgaaatggcgagcgcgcgcgacgtaacagcggcaagagacacaaccgagcacggacagcacaaagagaccaccgacaagaaagcaacagggccgt

SEQ ID NO: 301723 - DNA, 1654 bp, Homo sapiens
  misc_feature (3)..(3): n is a, c, g, or t
  misc_feature (6)..(7): n is a, c, g, or t
ggnagnngccccagccagctgtcccgagtctggactttccctctgcccctccccactctcaggctggtggggtggggaaagcagcccattcctgggctcagagactcccaccccagctcagagggagcaggggcccagccagggacggaccctcattcctcccagggaccccagacctctgtctctctcgggtaagtctccatctctgtctgtctctgtctctgtctctgtctctgtctgtttttcacgcactcagcaaggcctcctgccctgagagaggctccgcccactaccccccactttccccataaaaccagctgagtctttgtgccaggaagactgcgtgcagaaggtgactgtctcagtggagctgggtcatctcaggtggggagttggggtccccgaaggccttggctccttgaacttttggccgccatgtgcttcccgaaggtcctctctgatgacatgaagaagctgaaggcccgaatgcaccaggccatagaaagattttatgataaaatgcaaaatgcagaatcaggacgtggacaggtgatgtcgagcctggcagagctggaggacgacttcaaagagggctacctggagacagtggcggcttattatgaggagcagcacccagagctcactcctctacttgaaaaagaaagagatggattacggtgccgaggcaacagatcccctgtcccggatgttgaggatcccgcaaccgaggagcctggggagagcttttgtgacaaggtcatgagatggttccaggccatgctgcagcggctgcagacctggtggcacggggttctggcctgggtgaaggagaaggtggtggccctggtccatgcagtgcaggccctctggaaacagttccagagtttctgctgctctctgtcagagctcttcatgtcctctttccagtcctacggagccccacggggggacaaggaggagctgacaccccagaagtgctctgaaccccaatcctcaaaatgaagatactgacaccacctttgccctccccgtcaccgcgcacccaccctgacccctccctcagctgtcctgtgccccgccctctcccgcacactcagtccccctgcctggcgttcctgccgcagctctgacctggtgctgtcgccctggcatcttaataaaacctgcttatacttccctggcaggggagataccatgaaaggaaacagagacagacaaacgagaccaaccacacaaaccagagaacaagcccacacaaggagaaacagcacggagcaacacataagaaagcaccggcggcgggagcacaacacaacaacagacaggaggagcacaaacaagcagcagagcgcctaggccggcgaagacagccgcccgccaagtggtagacgccataaccagcgagccgcgagccgcaataagacagcgagcgagaacagaatcgctggcgcactagaagacagcaagagcgcgcggagacagacgaccaataaccaagcagaccagcggaacaaaacgaaagctgagacaaaaagagcacgcggcgacaagaaggagaacgaaatggcgagcgcgcgcgacgtaacagcggcaagagacacaaccgagcacggacagcacaaagagaccaccgacaagaaagcaacagggccgt

SEQ ID NO: 301724 - DNA, 1684 bp, Homo sapiens
  misc_feature (3)..(3): n is a, c, g, or t
  misc_feature (6)..(7): n is a, c, g, or t
ggnagnngccccagccagctgtcccgagtctggactttccctctgcccctccccactctcaggctggtggggtggggaaagcagcccattcctgggctcagagactcccaccccagctcagagggagcaggggcccagccagggacggaccctcattcctcccagggaccccagacctctgtctctctcgggtaagtctccatctctgtctgtctctgtctctgtctctgtctctgtctgtttttcacgcactcagcaaggcctcctgccctgagagaggctccgcccactaccccccactttccccataaaacctgtctcagtggagctgggtcatctcaggtggggagttggggtccccgaaggtgaggaccctctggggaggagggtgcttctctgagacactttcttttcctcacacctgttcctcgccagcagccttggctccttgaacttttggccgccatgtgcttcccgaaggtcctctctgatgacatgaagaagctgaaggcccgaatgcaccaggccatagaaagattttatgataaaatgcaaaatgcagaatcaggacgtggacaggtgatgtcgagcctggcagagctggaggacgacttcaaagagggctacctggagacagtggcggcttattatgaggagcagcacccagagctcactcctctacttgaaaaagaaagagatggattacggtgccgaggcaacagatcccctgtcccggatgttgaggatcccgcaaccgaggagcctggggagagcttttgtgacaaggtcatgagatggttccaggccatgctgcagcggctgcagacctggtggcacggggttctggcctgggtgaaggagaaggtggtggccctggtccatgcagtgcaggccctctggaaacagttccagagtttctgctgctctctgtcagagctcttcatgtcctctttccagtcctacggagccccacggggggacaaggaggagctgacaccccagaagtgctctgaaccccaatcctcaaaatgaagatactgacaccacctttgccctccccgtcaccgcgcacccaccctgacccctccctcagctgtcctgtgccccgccctctcccgcacactcagtccccctgcctggcgttcctgccgcagctctgacctggtgctgtcgccctggcatcttaataaaacctgcttatacttccctggcaggggagataccatgaaaggaaacagagacagacaaacgagaccaaccacacaaaccagagaacaagcccacacaaggagaaacagcacggagcaacacataagaaagcaccggcggcgggagcacaacacaacaacagacaggaggagcacaaacaagcagcagagcgcctaggccggcgaagacagccgcccgccaagtggtagacgccataaccagcgagccgcgagccgcaataagacagcgagcgagaacagaatcgctggcgcactagaagacagcaagagcgcgcggagacagacgaccaataaccaagcagaccagcggaacaaaacgaaagctgagacaaaaagagcacgcggcgacaagaaggagaacgaaatggcgagcgcgcgcgacgtaacagcggcaagagacacaaccgagcacggacagcacaaagagaccaccgacaagaaagcaacagggccgt

SEQ ID NO: 301725 - DNA, 1576 bp, Homo sapiens
  misc_feature (3)..(3): n is a, c, g, or t
  misc_feature (6)..(7): n is a, c, g, or t
ggnagnngccccagccagctgtcccgagtctggactttccctctgcccctccccactctcaggctggtggggtggggaaagcagcccattcctgggctcagagactcccaccccagctcagagggagcaggggcccagccagggacggaccctcattcctcccagggaccccagacctctgtctctctcgggccttggctccttgaacttttggccgccatgtgcttcccgaaggtcctctctgatgacatgaagaagctgaaggcccgaatggtaatgctcctccctacttctgctcaggggttgggggcctgggtctcagcgtgtgacactgaggacactgtgggacacctgggaccctggagggacaaggatccggccctttggtgccaactctgcctctcttcacagcaccaggccatagaaagattttatgataaaatgcaaaatgcagaatcaggacgtggacaggtgatgtcgagcctggcagagctggaggacgacttcaaagagggctacctggagacagtggcggcttattatgaggagcagcacccagagctcactcctctacttgaaaaagaaagagatggattacggtgccgaggcaacagatcccctgtcccggatgttgaggatcccgcaaccgaggagcctggggagagcttttgtgacaaggtcatgagatggttccaggccatgctgcagcggctgcagacctggtggcacggggttctggcctgggtgaaggagaaggtggtggccctggtccatgcagtgcaggccctctggaaacagttccagagtttctgctgctctctgtcagagctcttcatgtcctctttccagtcctacggagccccacggggggacaaggaggagctgacaccccagaagtgctctgaaccccaatcctcaaaatgaagatactgacaccacctttgccctccccgtcaccgcgcacccaccctgacccctccctcagctgtcctgtgccccgccctctcccgcacactcagtccccctgcctggcgttcctgccgcagctctgacctggtgctgtcgccctggcatcttaataaaacctgcttatacttccctggcaggggagataccatgaaaggaaacagagacagacaaacgagaccaaccacacaaaccagagaacaagcccacacaaggagaaacagcacggagcaacacataagaaagcaccggcggcgggagcacaacacaacaacagacaggaggagcacaaacaagcagcagagcgcctaggccggcgaagacagccgcccgccaagtggtagacgccataaccagcgagccgcgagccgcaataagacagcgagcgagaacagaatcgctggcgcactagaagacagcaagagcgcgcggagacagacgaccaataaccaagcagaccagcggaacaaaacgaaagctgagacaaaaagagcacgcggcgacaagaaggagaacgaaatggcgagcgcgcgcgacgtaacagcggcaagagacacaaccgagcacggacagcacaaagagaccaccgacaagaaagcaacagggccgt

SEQ ID NO: 301726 - DNA, 1603 bp, Homo sapiens
  misc_feature (3)..(3): n is a, c, g, or t
  misc_feature (6)..(7): n is a, c, g, or t
ggnagnngccccagccagctgtcccgagtctggactttccctctgcccctccccactctcaggctggtggggtggggaaagcagcccattcctgggctcagagactcccaccccagctcagagggagcaggggcccagccagggacggaccctcattcctcccagggaccccagacctctgtctctctcgggtaagtctccatctctgtctgtctctgtctctgtctctgtctctgtctgtttttcacgcactcagcaaggcctcctgccctgagagaggctccgcccactaccccccactttccccataaaaccagctgagtctttgtgccaggaagactgcgtgcagaaggtgagccttggctccttgaacttttggccgccatgtgcttcccgaaggtcctctctgatgacatgaagaagctgaaggcccgaatgcaccaggccatagaaagattttatgataaaatgcaaaatgcagaatcaggacgtggacaggtgatgtcgagcctggcagagctggaggacgacttcaaagagggctacctggagacagtggcggcttattatgaggagcagcacccagagctcactcctctacttgaaaaagaaagagatggattacggtgccgaggcaacagatcccctgtcccggatgttgaggatcccgcaaccgaggagcctggggagagcttttgtgacaaggtcatgagatggttccaggccatgctgcagcggctgcagacctggtggcacggggttctggcctgggtgaaggagaaggtggtggccctggtccatgcagtgcaggccctctggaaacagttccagagtttctgctgctctctgtcagagctcttcatgtcctctttccagtcctacggagccccacggggggacaaggaggagctgacaccccagaagtgctctgaaccccaatcctcaaaatgaagatactgacaccacctttgccctccccgtcaccgcgcacccaccctgacccctccctcagctgtcctgtgccccgccctctcccgcacactcagtccccctgcctggcgttcctgccgcagctctgacctggtgctgtcgccctggcatcttaataaaacctgcttatacttccctggcaggggagataccatgaaaggaaacagagacagacaaacgagaccaaccacacaaaccagagaacaagcccacacaaggagaaacagcacggagcaacacataagaaagcaccggcggcgggagcacaacacaacaacagacaggaggagcacaaacaagcagcagagcgcctaggccggcgaagacagccgcccgccaagtggtagacgccataaccagcgagccgcgagccgcaataagacagcgagcgagaacagaatcgctggcgcactagaagacagcaagagcgcgcggagacagacgaccaataaccaagcagaccagcggaacaaaacgaaagctgagacaaaaagagcacgcggcgacaagaaggagaacgaaatggcgagcgcgcgcgacgtaacagcggcaagagacacaaccgagcacggacagcacaaagagaccaccgacaagaaagcaacagggccgt

SEQ ID NO: 301727 - DNA, 1031 bp, Homo sapiens
  misc_feature (3)..(3): n is a, c, g, or t
  misc_feature (6)..(7): n is a, c, g, or t
ggnagnngccccagccagctgtcccgagtctggactttccctctgcccctccccactctcaggctggtggggtggggaaagcagcccattcctgggctcagagactcccaccccagctcagagggagcaggggcccagccagggacggaccctcattcctcccagggaccccagacctctgtctctctcggcagctgagtctttgtgccaggaagactgcgtgcagaaggtgactgtctcagtggagctgggtcatctcaggccttggctccttgaacttttggccgccatgtgcttcccgaaggtcctctctgatgacatgaagaagctgaaggcccgaatgcaccaggccatagaaagattttatgataaaatgcaaaatgcagaatcaggacgtggacaggtgatgtcgagcctggcagagctggaggacgacttcaaagagggctacctggagacagtggcggcttattatgaggagcagcacccagagctcactcctctacttgaaaaagaaagagatggattacggtgccgaggcaacagatcccctgtcccggatgttgaggatcccgcaaccgaggagcctggggagagcttttgtgacaaggtcatgagatggttccaggccatgctgcagcggctgcagacctggtggcacggggttctggcctgggtgaaggagaaggtggtggccctggtccatgcagtgcaggccctctggaaacagttccagagtttctgctgctctctgtcagagctcttcatgtcctctttccagtcctacggagccccacggggggacaaggaggagctgacaccccagaagtgctctgaaccccaatcctcaaaatgaagatactgacaccacctttgccctccccgtcaccgcgcacccaccctgacccctccctcagctgtcctgtgccccgccctctcccgcacactcagtccccctgcctggcgttcctgccgcagctctgacctggtgctgtcgccctggcatcttaataaaacctgcttatacttcc

SEQ ID NO: 301728 - DNA, 1822 bp, Homo sapiens
  misc_feature (3)..(3): n is a, c, g, or t
  misc_feature (6)..(7): n is a, c, g, or t
ggnagnngccccagccagctgtcccgagtctggactttccctctgcccctccccactctcaggctggtggggtggggaaagcagcccattcctgggctcagagactcccaccccagctcagagggagcaggggcccagccagggacggaccctcattcctcccagggaccccagacctctgtctctctcgggtaagtctccatctctgtctgtctctgtctctgtctctgtctctgtctgtttttcacgcactcagcaaggcctcctgccctgagagaggctccgcccactaccccccactttccccataaaacctgtctcagtggagctgggtcatctcaggtggggagttggggtccccgaaggtgaggaccctctggggaggagggtgcttctctgagacactttcttttcctcacacctgttcctcgccagcagccttggctccttgaacttttggccgccatgtgcttcccgaaggtcctctctgatgacatgaagaagctgaaggcccgaatggtaatgctcctccctacttctgctcaggggttgggggcctgggtctcagcgtgtgacactgaggacactgtgggacacctgggaccctggagggacaaggatccggccctttggtgccaactctgcctctcttcacagcaccaggccatagaaagattttatgataaaatgcaaaatgcagaatcaggacgtggacaggtgatgtcgagcctggcagagctggaggacgacttcaaagagggctacctggagacagtggcggcttattatgaggagcagcacccagagctcactcctctacttgaaaaagaaagagatggattacggtgccgaggcaacagatcccctgtcccggatgttgaggatcccgcaaccgaggagcctggggagagcttttgtgacaaggtcatgagatggttccaggccatgctgcagcggctgcagacctggtggcacggggttctggcctgggtgaaggagaaggtggtggccctggtccatgcagtgcaggccctctggaaacagttccagagtttctgctgctctctgtcagagctcttcatgtcctctttccagtcctacggagccccacggggggacaaggaggagctgacaccccagaagtgctctgaaccccaatcctcaaaatgaagatactgacaccacctttgccctccccgtcaccgcgcacccaccctgacccctccctcagctgtcctgtgccccgccctctcccgcacactcagtccccctgcctggcgttcctgccgcagctctgacctggtgctgtcgccctggcatcttaataaaacctgcttatacttccctggcaggggagataccatgaaaggaaacagagacagacaaacgagaccaaccacacaaaccagagaacaagcccacacaaggagaaacagcacggagcaacacataagaaagcaccggcggcgggagcacaacacaacaacagacaggaggagcacaaacaagcagcagagcgcctaggccggcgaagacagccgcccgccaagtggtagacgccataaccagcgagccgcgagccgcaataagacagcgagcgagaacagaatcgctggcgcactagaagacagcaagagcgcgcggagacagacgaccaataaccaagcagaccagcggaacaaaacgaaagctgagacaaaaagagcacgcggcgacaagaaggagaacgaaatggcgagcgcgcgcgacgtaacagcggcaagagacacaaccgagcacggacagcacaaagagaccaccgacaagaaagcaacagggccgt

SEQ ID NO: 301729 - DNA, 1703 bp, Homo sapiens
  misc_feature (3)..(3): n is a, c, g, or t
  misc_feature (6)..(7): n is a, c, g, or t
ggnagnngccccagccagctgtcccgagtctggactttccctctgcccctccccactctcaggctggtggggtggggaaagcagcccattcctgggctcagagactcccaccccagctcagagggagcaggggcccagccagggacggaccctcattcctcccagggaccccagacctctgtctctctcgggtaagtctccatctctgtctgtctctgtctctgtctctgtctctgtctgtttttcacgcactcagcaaggcctcctgccctgagagaggctccgcccactaccccccactttccccataaaaccagctgagtctttgtgccaggaagactgcgtgcagaaggtgactgtctcagtggagctgggtcatctcaggccttggctccttgaacttttggccgccatgtgcttcccgaaggggttgggggcctgggtctcagcgtgtgacactgaggacactgtgggacacctgggaccctggagggacaaggatccggccctttggtgccaactctgcctctcttcacagcaccaggccatagaaagattttatgataaaatgcaaaatgcagaatcaggacgtggacaggtgatgtcgagcctggcagagctggaggacgacttcaaagagggctacctggagacagtggcggcttattatgaggagcagcacccagagctcactcctctacttgaaaaagaaagagatggattacggtgccgaggcaacagatcccctgtcccggatgttgaggatcccgcaaccgaggagcctggggagagcttttgtgacaaggtcatgagatggttccaggccatgctgcagcggctgcagacctggtggcacggggttctggcctgggtgaaggagaaggtggtggccctggtccatgcagtgcaggccctctggaaacagttccagagtttctgctgctctctgtcagagctcttcatgtcctctttccagtcctacggagccccacggggggacaaggaggagctgacaccccagaagtgctctgaaccccaatcctcaaaatgaagatactgacaccacctttgccctccccgtcaccgcgcacccaccctgacccctccctcagctgtcctgtgccccgccctctcccgcacactcagtccccctgcctggcgttcctgccgcagctctgacctggtgctgtcgccctggcatcttaataaaacctgcttatacttccctggcaggggagataccatgaaaggaaacagagacagacaaacgagaccaaccacacaaaccagagaacaagcccacacaaggagaaacagcacggagcaacacataagaaagcaccggcggcgggagcacaacacaacaacagacaggaggagcacaaacaagcagcagagcgcctaggccggcgaagacagccgcccgccaagtggtagacgccataaccagcgagccgcgagccgcaataagacagcgagcgagaacagaatcgctggcgcactagaagacagcaagagcgcgcggagacagacgaccaataaccaagcagaccagcggaacaaaacgaaagctgagacaaaaagagcacgcggcgacaagaaggagaacgaaatggcgagcgcgcgcgacgtaacagcggcaagagacacaaccgagcacggacagcacaaagagaccaccgacaagaaagcaacagggccgt

SEQ ID NO: 301730 - DNA, 1571 bp, Homo sapiens
  misc_feature (3)..(3): n is a, c, g, or t
  misc_feature (6)..(7): n is a, c, g, or t
ggnagnngccccagccagctgtcccgagtctggactttccctctgcccctccccactctcaggctggtggggtggggaaagcagcccattcctgggctcagagactcccaccccagctcagagggagcaggggcccagccagggacggaccctcattcctcccagggaccccagacctctgtctctctcgggtaagtctccatctctgtctgtctctgtctctgtctctgtctctgtctgtttttcacgcactcagcaaggcctcctgccctgagagaggctccgcccactaccccccactttccccataaaaccagctgagtctttgtgccaggaagactgcgtgcagaaggtgactgtctcagtggagctgggtcatctcaggccttggctccttgaacttttggccgccatgtgcttcccgaaggtcctctctgatgacatgaagaagctgaaggcccgaatggtgatgtcgagcctggcagagctggaggacgacttcaaagagggctacctggagacagtggcggcttattatgaggagcagcacccagagctcactcctctacttgaaaaagaaagagatggattacggtgccgaggcaacagatcccctgtcccggatgttgaggatcccgcaaccgaggagcctggggagagcttttgtgacaaggtcatgagatggttccaggccatgctgcagcggctgcagacctggtggcacggggttctggcctgggtgaaggagaaggtggtggccctggtccatgcagtgcaggccctctggaaacagttccagagtttctgctgctctctgtcagagctcttcatgtcctctttccagtcctacggagccccacggggggacaaggaggagctgacaccccagaagtgctctgaaccccaatcctcaaaatgaagatactgacaccacctttgccctccccgtcaccgcgcacccaccctgacccctccctcagctgtcctgtgccccgccctctcccgcacactcagtccccctgcctggcgttcctgccgcagctctgacctggtgctgtcgccctggcatcttaataaaacctgcttatacttccctggcaggggagataccatgaaaggaaacagagacagacaaacgagaccaaccacacaaaccagagaacaagcccacacaaggagaaacagcacggagcaacacataagaaagcaccggcggcgggagcacaacacaacaacagacaggaggagcacaaacaagcagcagagcgcctaggccggcgaagacagccgcccgccaagtggtagacgccataaccagcgagccgcgagccgcaataagacagcgagcgagaacagaatcgctggcgcactagaagacagcaagagcgcgcggagacagacgaccaataaccaagcagaccagcggaacaaaacgaaagctgagacaaaaagagcacgcggcgacaagaaggagaacgaaatggcgagcgcgcgcgacgtaacagcggcaagagacacaaccgagcacggacagcacaaagagaccaccgacaagaaagcaacagggccgt

SEQ ID NO: 301731 - DNA, 1146 bp, Homo sapiens
ctcgaggatctctggcaaggtggaaatcaggacgtggacaggtgatgtcgagcctggcagagctggaggacgacttcaaagagggctacctggagacagtggcggcttattatgaggagcagcacccagagctcactcctctacttgaaaaagaaagagatggattacggtgccgaggcaacagatcccctgtcccggatgttgaggatcccgcaaccgaggagcctggggagagcttttgtgacaaggtcatgagatggttccaggccatgctgcagcggctgcagacctggtggcacggggttctggcctgggtgaaggagaaggtggtggccctggtccatgcagtgcaggccctctggaaacagttccagagtttctgctgctctctgtcagagctcttcatgtcctctttccagtcctacggagccccacggggggacaaggaggagctgacaccccagaagtgctctgaaccccaatcctcaaaatgaagatactgacaccacctttgccctccccgtcaccgcgcacccaccctgacccctccctcagctgtcctgtgccccgccctctcccgcacactcagtccccctgcctggcgttcctgccgcagctctgacctggtgctgtcgccctggcatcttaataaaacctgcttatacttccctggcaggggagataccatgaaaggaaacagagacagacaaacgagaccaaccacacaaaccagagaacaagcccacacaaggagaaacagcacggagcaacacataagaaagcaccggcggcgggagcacaacacaacaacagacaggaggagcacaaacaagcagcagagcgcctaggccggcgaagacagccgcccgccaagtggtagacgccataaccagcgagccgcgagccgcaataagacagcgagcgagaacagaatcgctggcgcactagaagacagcaagagcgcgcggagacagacgaccaataaccaagcagaccagcggaacaaaacgaaagctgagacaaaaagagcacgcggcgacaagaaggagaacgaaatggcgagcgcgcgcgacgtaacagcggcaagagacacaaccgagcacggacagcacaaagagaccaccgacaagaaagcaacagggccgt

SEQ ID NO: 301732 - DNA, 1594 bp, Homo sapiens
  misc_feature (3)..(3): n is a, c, g, or t
  misc_feature (6)..(7): n is a, c, g, or t
ggnagnngccccagccagctgtcccgagtctggactttccctctgcccctccccactctcaggctggtggggtggggaaagcagcccattcctgggctcagagactcccaccccagctcagagggagcaggggcccagccagggacggaccctcattcctcccagggaccccagacctctgtctctctcgggtaagtctccatctctgtctgtctctgtctctgtctctgtctctgtctgtttttcacgcactcagcaaggcctcctgccctgagagaggctccgcccactaccccccactttccccataaaaccagctgagtctttgtgccaggaagactgcgtgcagaaggtgactgtctcagtggagctgggtcatctcaggtggggagttggggtccccgaaggccttggctccttgaacttttggccgccatgtgcttcccgaaggtcctctctgatgacatgaagaagctgaaggcccgaatggtgatgtcgagcctggcagagctggaggacgacttcaaagagggctacctggagacagtggcggcttattatgaggagcagcacccagagctcactcctctacttgaaaaagaaagagatggattacggtgccgaggcaacagatcccctgtcccggatgttgaggatcccgcaaccgaggagcctggggagagcttttgtgacaaggtcatgagatggttccaggccatgctgcagcggctgcagacctggtggcacggggttctggcctgggtgaaggagaaggtggtggccctggtccatgcagtgcaggccctctggaaacagttccagagtttctgctgctctctgtcagagctcttcatgtcctctttccagtcctacggagccccacggggggacaaggaggagctgacaccccagaagtgctctgaaccccaatcctcaaaatgaagatactgacaccacctttgccctccccgtcaccgcgcacccaccctgacccctccctcagctgtcctgtgccccgccctctcccgcacactcagtccccctgcctggcgttcctgccgcagctctgacctggtgctgtcgccctggcatcttaataaaacctgcttatacttccctggcaggggagataccatgaaaggaaacagagacagacaaacgagaccaaccacacaaaccagagaacaagcccacacaaggagaaacagcacggagcaacacataagaaagcaccggcggcgggagcacaacacaacaacagacaggaggagcacaaacaagcagcagagcgcctaggccggcgaagacagccgcccgccaagtggtagacgccataaccagcgagccgcgagccgcaataagacagcgagcgagaacagaatcgctggcgcactagaagacagcaagagcgcgcggagacagacgaccaataaccaagcagaccagcggaacaaaacgaaagctgagacaaaaagagcacgcggcgacaagaaggagaacgaaatggcgagcgcgcgcgacgtaacagcggcaagagacacaaccgagcacggacagcacaaagagaccaccgacaagaaagcaacagggccgt

SEQ ID NO: 301733 - DNA, 1284 bp, Homo sapiens
ggaggcatccaagccccagggctccttgaggaaacaacaggggtgccagacgtggcccgggcccctggctgggcccagttcggggtgtgtgggagctgaggactcactgggcttgaggactgactgatgtggggtgcagaggaggcttgggcctggaaccgagtgctttgttcctaacagtgatgtcgagcctggcagagctggaggacgacttcaaagagggctacctggagacagtggcggcttattatgaggagcagcacccagagctcactcctctacttgaaaaagaaagagatggattacggtgccgaggcaacagatcccctgtcccggatgttgaggatcccgcaaccgaggagcctggggagagcttttgtgacaaggtcatgagatggttccaggccatgctgcagcggctgcagacctggtggcacggggttctggcctgggtgaaggagaaggtggtggccctggtccatgcagtgcaggccctctggaaacagttccagagtttctgctgctctctgtcagagctcttcatgtcctctttccagtcctacggagccccacggggggacaaggaggagctgacaccccagaagtgctctgaaccccaatcctcaaaatgaagatactgacaccacctttgccctccccgtcaccgcgcacccaccctgacccctccctcagctgtcctgtgccccgccctctcccgcacactcagtccccctgcctggcgttcctgccgcagctctgacctggtgctgtcgccctggcatcttaataaaacctgcttatacttccctggcaggggagataccatgaaaggaaacagagacagacaaacgagaccaaccacacaaaccagagaacaagcccacacaaggagaaacagcacggagcaacacataagaaagcaccggcggcgggagcacaacacaacaacagacaggaggagcacaaacaagcagcagagcgcctaggccggcgaagacagccgcccgccaagtggtagacgccataaccagcgagccgcgagccgcaataagacagcgagcgagaacagaatcgctggcgcactagaagacagcaagagcgcgcggagacagacgaccaataaccaagcagaccagcggaacaaaacgaaagctgagacaaaaagagcacgcggcgacaagaaggagaacgaaatggcgagcgcgcgcgacgtaacagcggcaagagacacaaccgagcacggacagcacaaagagaccaccgacaagaaagcaacagggccgt

SEQ ID NO: 301734 - DNA, 1535 bp, Homo sapiens
  misc_feature (3)..(3): n is a, c, g, or t
  misc_feature (6)..(7): n is a, c, g, or t
ggnagnngccccagccagctgtcccgagtctggactttccctctgcccctccccactctcaggctggtggggtggggaaagcagcccattcctgggctcagagactcccaccccagctcagagggagcaggggcccagccagggacggaccctcattcctcccagggaccccagacctctgtctctctcgggtaagtctccatctctgtctgtctctgtctctgtctctgtctctgtctgtttttcacgcactcagcaaggcctcctgccctgagagaggctccgcccactaccccccactttccccataaaaccagctgagtctttgtgccaggaagactgcgtgcagaaggtgactgtctcagtggagctgggtcatctcaggtggggagttggggtccccgaaggtgaggaccctctggggaggagggtgatgtcgagcctggcagagctggaggacgacttcaaagagggctacctggagacagtggcggcttattatgaggagcagcacccagagctcactcctctacttgaaaaagaaagagatggattacggtgccgaggcaacagatcccctgtcccggatgttgaggatcccgcaaccgaggagcctggggagagcttttgtgacaaggtcatgagatggttccaggccatgctgcagcggctgcagacctggtggcacggggttctggcctgggtgaaggagaaggtggtggccctggtccatgcagtgcaggccctctggaaacagttccagagtttctgctgctctctgtcagagctcttcatgtcctctttccagtcctacggagccccacggggggacaaggaggagctgacaccccagaagtgctctgaaccccaatcctcaaaatgaagatactgacaccacctttgccctccccgtcaccgcgcacccaccctgacccctccctcagctgtcctgtgccccgccctctcccgcacactcagtccccctgcctggcgttcctgccgcagctctgacctggtgctgtcgccctggcatcttaataaaacctgcttatacttccctggcaggggagataccatgaaaggaaacagagacagacaaacgagaccaaccacacaaaccagagaacaagcccacacaaggagaaacagcacggagcaacacataagaaagcaccggcggcgggagcacaacacaacaacagacaggaggagcacaaacaagcagcagagcgcctaggccggcgaagacagccgcccgccaagtggtagacgccataaccagcgagccgcgagccgcaataagacagcgagcgagaacagaatcgctggcgcactagaagacagcaagagcgcgcggagacagacgaccaataaccaagcagaccagcggaacaaaacgaaagctgagacaaaaagagcacgcggcgacaagaaggagaacgaaatggcgagcgcgcgcgacgtaacagcggcaagagacacaaccgagcacggacagcacaaagagaccaccgacaagaaagcaacagggccgt

SEQ ID NO: 301735 - DNA, 1211 bp, Homo sapiens
caagagtgtcaatcaagacgtaggacatgcctgctcctgaaggtttggagagaaaaggctgggggtaggactgggttcaaagagtgtcaatccagacgtaggacaggtgatgtcgagcctggcagagctggaggacgacttcaaagagggctacctggagacagtggcggcttattatgaggagcagcacccagagctcactcctctacttgaaaaagaaagagatggattacggtgccgaggcaacagatcccctgtcccggatgttgaggatcccgcaaccgaggagcctggggagagcttttgtgacaaggtcatgagatggttccaggccatgctgcagcggctgcagacctggtggcacggggttctggcctgggtgaaggagaaggtggtggccctggtccatgcagtgcaggccctctggaaacagttccagagtttctgctgctctctgtcagagctcttcatgtcctctttccagtcctacggagccccacggggggacaaggaggagctgacaccccagaagtgctctgaaccccaatcctcaaaatgaagatactgacaccacctttgccctccccgtcaccgcgcacccaccctgacccctccctcagctgtcctgtgccccgccctctcccgcacactcagtccccctgcctggcgttcctgccgcagctctgacctggtgctgtcgccctggcatcttaataaaacctgcttatacttccctggcaggggagataccatgaaaggaaacagagacagacaaacgagaccaaccacacaaaccagagaacaagcccacacaaggagaaacagcacggagcaacacataagaaagcaccggcggcgggagcacaacacaacaacagacaggaggagcacaaacaagcagcagagcgcctaggccggcgaagacagccgcccgccaagtggtagacgccataaccagcgagccgcgagccgcaataagacagcgagcgagaacagaatcgctggcgcactagaagacagcaagagcgcgcggagacagacgaccaataaccaagcagaccagcggaacaaaacgaaagctgagacaaaaagagcacgcggcgacaagaaggagaacgaaatggcgagcgcgcgcgacgtaacagcggcaagagacacaaccgagcacggacagcacaaagagaccaccgacaagaaagcaacagggccgt

SEQ ID NO: 301736 - DNA, 1203 bp, Homo sapiens
  misc_feature (24)..(24): n is a, c, g, or t
gagctgggtcatctcaggccttgntcctttgaacttttggccgccatgtgcttcccgaagtcctctctgatgacatgaagaagctgaaggcccgaatggtgatgtcgagcctggcagagctggaggacgacttcaaagagggctacctggagacagtggcggcttattatgaggagcagcacccagagctcactcctctacttgaaaaagaaagagatggattacggtgccgaggcaacagatcccctgtcccggatgttgaggatcccgcaaccgaggagcctggggagagcttttgtgacaaggtcatgagatggttccaggccatgctgcagcggctgcagacctggtggcacggggttctggcctgggtgaaggagaaggtggtggccctggtccatgcagtgcaggccctctggaaacagttccagagtttctgctgctctctgtcagagctcttcatgtcctctttccagtcctacggagccccacggggggacaaggaggagctgacaccccagaagtgctctgaaccccaatcctcaaaatgaagatactgacaccacctttgccctccccgtcaccgcgcacccaccctgacccctccctcagctgtcctgtgccccgccctctcccgcacactcagtccccctgcctggcgttcctgccgcagctctgacctggtgctgtcgccctggcatcttaataaaacctgcttatacttccctggcaggggagataccatgaaaggaaacagagacagacaaacgagaccaaccacacaaaccagagaacaagcccacacaaggagaaacagcacggagcaacacataagaaagcaccggcggcgggagcacaacacaacaacagacaggaggagcacaaacaagcagcagagcgcctaggccggcgaagacagccgcccgccaagtggtagacgccataaccagcgagccgcgagccgcaataagacagcgagcgagaacagaatcgctggcgcactagaagacagcaagagcgcgcggagacagacgaccaataaccaagcagaccagcggaacaaaacgaaagctgagacaaaaagagcacgcggcgacaagaaggagaacgaaatggcgagcgcgcgcgacgtaacagcggcaagagacacaaccgagcacggacagcacaaagagaccaccgacaagaaagcaacagggccgt

SEQ ID NO: 301737 - DNA, 1795 bp, Homo sapiens
  misc_feature (3)..(3): n is a, c, g, or t
  misc_feature (6)..(7): n is a, c, g, or t
ggnagnngccccagccagctgtcccgagtctggactttccctctgcccctccccactctcaggctggtggggtggggaaagcagcccattcctgggctcagagactcccaccccagctcagagggagcaggggcccagccagggacggaccctcattcctcccagggaccccagacctctgtctctctcgggtaagtctccatctctgtctgtctctgtctctgtctctgtctctgtctgtttttcacgcactcagcaaggcctcctgccctgagagaggctccgcccactaccccccactttccccataaaacctgtctcagtggagctgggtcatctcaggtggggagttggggtccccgaaggtgaggaccctctggggaggagggtgcttctctgagacactttcttttcctcacacctgttcctcgccagcagccttggctccttgaacttttggccgccatgtgcttcccgaaggtcctctctgatgacatgaagaagctgaaggcccgaatggtaatgctcctccctacttctgctcaggggttgggggcctgggtctcagcgtgtgacactgaggacactgtgggacacctgggaccctggagggacaaggatccggccctttggtgccaactctgcctctcttcacagcaccaggccatagaaagattttatgataaaatgcaaaatgcagaatcaggacgtggacaggacgacttcaaagagggctacctggagacagtggcggcttattatgaggagcagcacccagagctcactcctctacttgaaaaagaaagagatggattacggtgccgaggcaacagatcccctgtcccggatgttgaggatcccgcaaccgaggagcctggggagagcttttgtgacaaggtcatgagatggttccaggccatgctgcagcggctgcagacctggtggcacggggttctggcctgggtgaaggagaaggtggtggccctggtccatgcagtgcaggccctctggaaacagttccagagtttctgctgctctctgtcagagctcttcatgtcctctttccagtcctacggagccccacggggggacaaggaggagctgacaccccagaagtgctctgaaccccaatcctcaaaatgaagatactgacaccacctttgccctccccgtcaccgcgcacccaccctgacccctccctcagctgtcctgtgccccgccctctcccgcacactcagtccccctgcctggcgttcctgccgcagctctgacctggtgctgtcgccctggcatcttaataaaacctgcttatacttccctggcaggggagataccatgaaaggaaacagagacagacaaacgagaccaaccacacaaaccagagaacaagcccacacaaggagaaacagcacggagcaacacataagaaagcaccggcggcgggagcacaacacaacaacagacaggaggagcacaaacaagcagcagagcgcctaggccggcgaagacagccgcccgccaagtggtagacgccataaccagcgagccgcgagccgcaataagacagcgagcgagaacagaatcgctggcgcactagaagacagcaagagcgcgcggagacagacgaccaataaccaagcagaccagcggaacaaaacgaaagctgagacaaaaagagcacgcggcgacaagaaggagaacgaaatggcgagcgcgcgcgacgtaacagcggcaagagacacaaccgagcacggacagcacaaagagaccaccgacaagaaagcaacagggccgt

SEQ ID NO: 301738 - DNA, 1140 bp, Homo sapiens
ggccacagtgggaagggggcaggcaggagcagcatgaaccccctgtgccctcctctccccaggacgacttcaaagagggctacctggagacagtggcggcttattatgaggagcagcacccagagctcactcctctacttgaaaaagaaagagatggattacggtgccgaggcaacagatcccctgtcccggatgttgaggatcccgcaaccgaggagcctggggagagcttttgtgacaaggtcatgagatggttccaggccatgctgcagcggctgcagacctggtggcacggggttctggcctgggtgaaggagaaggtggtggccctggtccatgcagtgcaggccctctggaaacagttccagagtttctgctgctctctgtcagagctcttcatgtcctctttccagtcctacggagccccacggggggacaaggaggagctgacaccccagaagtgctctgaaccccaatcctcaaaatgaagatactgacaccacctttgccctccccgtcaccgcgcacccaccctgacccctccctcagctgtcctgtgccccgccctctcccgcacactcagtccccctgcctggcgttcctgccgcagctctgacctggtgctgtcgccctggcatcttaataaaacctgcttatacttccctggcaggggagataccatgaaaggaaacagagacagacaaacgagaccaaccacacaaaccagagaacaagcccacacaaggagaaacagcacggagcaacacataagaaagcaccggcggcgggagcacaacacaacaacagacaggaggagcacaaacaagcagcagagcgcctaggccggcgaagacagccgcccgccaagtggtagacgccataaccagcgagccgcgagccgcaataagacagcgagcgagaacagaatcgctggcgcactagaagacagcaagagcgcgcggagacagacgaccaataaccaagcagaccagcggaacaaaacgaaagctgagacaaaaagagcacgcggcgacaagaaggagaacgaaatggcgagcgcgcgcgacgtaacagcggcaagagacacaaccgagcacggacagcacaaagagaccaccgacaagaaagcaacagggccgt

SEQ ID NO: 301739 - DNA, 1544 bp, Homo sapiens
  misc_feature (3)..(3): n is a, c, g, or t
  misc_feature (6)..(7): n is a, c, g, or t
ggnagnngccccagccagctgtcccgagtctggactttccctctgcccctccccactctcaggctggtggggtggggaaagcagcccattcctgggctcagagactcccaccccagctcagagggagcaggggcccagccagggacggaccctcattcctcccagggaccccagacctctgtctctctcgggtaagtctccatctctgtctgtctctgtctctgtctctgtctctgtctgtttttcacgcactcagcaaggcctcctgccctgagagaggctccgcccactaccccccactttccccataaaaccagctgagtctttgtgccaggaagactgcgtgcagaaggtgactgtctcagtggagctgggtcatctcaggccttggctccttgaacttttggccgccatgtgcttcccgaaggtcctctctgatgacatgaagaagctgaaggcccgaatggacgacttcaaagagggctacctggagacagtggcggcttattatgaggagcagcacccagagctcactcctctacttgaaaaagaaagagatggattacggtgccgaggcaacagatcccctgtcccggatgttgaggatcccgcaaccgaggagcctggggagagcttttgtgacaaggtcatgagatggttccaggccatgctgcagcggctgcagacctggtggcacggggttctggcctgggtgaaggagaaggtggtggccctggtccatgcagtgcaggccctctggaaacagttccagagtttctgctgctctctgtcagagctcttcatgtcctctttccagtcctacggagccccacggggggacaaggaggagctgacaccccagaagtgctctgaaccccaatcctcaaaatgaagatactgacaccacctttgccctccccgtcaccgcgcacccaccctgacccctccctcagctgtcctgtgccccgccctctcccgcacactcagtccccctgcctggcgttcctgccgcagctctgacctggtgctgtcgccctggcatcttaataaaacctgcttatacttccctggcaggggagataccatgaaaggaaacagagacagacaaacgagaccaaccacacaaaccagagaacaagcccacacaaggagaaacagcacggagcaacacataagaaagcaccggcggcgggagcacaacacaacaacagacaggaggagcacaaacaagcagcagagcgcctaggccggcgaagacagccgcccgccaagtggtagacgccataaccagcgagccgcgagccgcaataagacagcgagcgagaacagaatcgctggcgcactagaagacagcaagagcgcgcggagacagacgaccaataaccaagcagaccagcggaacaaaacgaaagctgagacaaaaagagcacgcggcgacaagaaggagaacgaaatggcgagcgcgcgcgacgtaacagcggcaagagacacaaccgagcacggacagcacaaagagaccaccgacaagaaagcaacagggccgt

SEQ ID NO: 301740 - DNA, 1109 bp, Homo sapiens
  misc_feature (3)..(3): n is a, c, g, or t
  misc_feature (6)..(7): n is a, c, g, or t
  misc_feature (1043)..(1043): n is a, c, g, or t
ggnagnngccccagccagctgtcccgagtctggactttccctctgcccctccccactctcaggctggtggggtggggaaagcagcccattcctgggctcagagactcccaccccagctcagagggagcaggggcccagccagggacggaccctcattcctcccagggaccccagacctctgtctctctcggcagctgagtctttgtgccaggaagactgcgtgcagaaggtgactgtctcagtggagctgggtcatctcaggccttggctccttgaacttttggccgccatgtgcttcccgaaggtcctctctgatgacatgaagaagctgaaggcccgaatgcaccaggccatagaaagattttatgataaaatgcaaaatgcagaatcaggacgtggacaggtgatgtcgagcctggcagagctggaggacgacttcaaagagggctacctggagacagtggcggcttattatgaggagcagcacccagagctcactcctctacttgaaaaagaaagagatggattacggtgccgaggcaacagatcccctgtcccggatgttgaggatcccgcaaccgaggagcctggggagagcttttgtgacaaggtcatgagatggttccaggccatgctgcagcggctgcagacctggtggcacggggttctggcctgggtgaaggagaaggtggtggccctggtccatgcagtgcaggccctctggaaacagttccagagtttctgctgctctctgtcagagctcttcatgtcctctttccagtcctacggagccccacggggggacaaggaggagctgacaccccagaagtgctctgaaccccaatcctcaaaatgaagatactgacaccacctttgccctccccgtcaccgcgcacccaccctgacccctccctcagctgtcctgtgccccgccctctcccgcacactcagtccccctgcctggcgttcctgccgcagctctgacctggtgctgtcgccctggcatcttaataaaacctgcttatacttccaaaaaaaaaaanaaaagtgatgtattctagttgctaactatctactagtatgataattctttgggggggggcccgggc

SEQ ID NO: 301741 - DNA, 1030 bp, Homo sapiens
  misc_feature (3)..(3): n is a, c, g, or t
  misc_feature (6)..(7): n is a, c, g, or t
ggnagnngccccagccagctgtcccgagtctggactttccctctgcccctccccactctcaggctggtggggtggggaaagcagcccattcctgggctcagagactcccaccccagctcagagggagcaggggcccagccagggacggaccctcattcctcccagggaccccagacctctgtctctctcggcagctgagtctttgtgccaggaagactgcgtgcagaaggtgactgtctcagtggagctgggtcatctcaggccttggctccttgaacttttggccgccatgtgcttcccgaaggtcctctctgatgacatgaagaagctgaaggcccgaatgcaccaggccatagaaagattttatgataaaatgcaaaatgcagaatcaggacgtggacaggtgatgtcgagcctggcagagctggaggacgacttcaaagagggctacctggagacagtggcggcttattatgaggagcagcacccagagctcactcctctacttgaaaaagaaagagatggattacggtgccgaggcaacagatcccctgtcccggatgttgaggatcccgcaaccgaggagcctggggagagcttttgtgacaaggtcatgagatggttccaggccatgctgcagcggctgcagacctggtggcacggggttctggcctgggtgaaggagaaggtggtggccctggtccatgcagtgcaggccctctggaaacagttccagagtttctgctgctctctgtcagagctcttcatgtcctctttccagtcctacggagccccacggggggacaaggaggagctgacaccccagaagtgctctgaaccccaatcctcaaaatgaagatactgacaccacctttgccctccccgtcaccgcgcacccaccctgacccctccctcagctgtcctgtgccccgccctctcccgcacactcagtccccctgcctggcgttcctgccgcatccgaagcagttgccggaacaatagctaacattaaattggacaagatattttg

SEQ ID NO: 301742 - DNA, 1095 bp, Homo sapiens
gtactaaagctgcggactgattcaatagagggctactggtatactgttggcggcttataatgaggagcagcacccagaagctcactcctctacttgaaaaagaaagagatggattacggtgccgaggcaacagatcccctgtcccggatgttgaggatcccgcaaccgaggagcctggggagagcttttgtgacaaggtcatgagatggttccaggccatgctgcagcggctgcagacctggtggcacggggttctggcctgggtgaaggagaaggtggtggccctggtccatgcagtgcaggccctctggaaacagttccagagtttctgctgctctctgtcagagctcttcatgtcctctttccagtcctacggagccccacggggggacaaggaggagctgacaccccagaagtgctctgaaccccaatcctcaaaatgaagatactgacaccacctttgccctccccgtcaccgcgcacccaccctgacccctccctcagctgtcctgtgccccgccctctcccgcacactcagtccccctgcctggcgttcctgccgcagctctgacctggtgctgtcgccctggcatcttaataaaacctgcttatacttccctggcaggggagataccatgaaaggaaacagagacagacaaacgagaccaaccacacaaaccagagaacaagcccacacaaggagaaacagcacggagcaacacataagaaagcaccggcggcgggagcacaacacaacaacagacaggaggagcacaaacaagcagcagagcgcctaggccggcgaagacagccgcccgccaagtggtagacgccataaccagcgagccgcgagccgcaataagacagcgagcgagaacagaatcgctggcgcactagaagacagcaagagcgcgcggagacagacgaccaataaccaagcagaccagcggaacaaaacgaaagctgagacaaaaagagcacgcggcgacaagaaggagaacgaaatggcgagcgcgcgcgacgtaacagcggcaagagacacaaccgagcacggacagcacaaagagaccaccgacaagaaagcaacagggccgt

SEQ ID NO: 301743 - DNA, 1111 bp, Homo sapiens
gttgacgagctcgcaatcgtagagtcatagtcaatagctggtaggcggagcgggggacaggtggctggcttatgatgaggcgctgcgacccataagctcactcctctacttgaaaaagaaagagatggattacggtgccgaggcaacagatcccctgtcccggatgttgaggatcccgcaaccgaggagcctggggagagcttttgtgacaaggtcatgagatggttccaggccatgctgcagcggctgcagacctggtggcacggggttctggcctgggtgaaggagaaggtggtggccctggtccatgcagtgcaggccctctggaaacagttccagagtttctgctgctctctgtcagagctcttcatgtcctctttccagtcctacggagccccacggggggacaaggaggagctgacaccccagaagtgctctgaaccccaatcctcaaaatgaagatactgacaccacctttgccctccccgtcaccgcgcacccaccctgacccctccctcagctgtcctgtgccccgccctctcccgcacactcagtccccctgcctggcgttcctgccgcagctctgacctggtgctgtcgccctggcatcttaataaaacctgcttatacttccctggcaggggagataccatgaaaggaaacagagacagacaaacgagaccaaccacacaaaccagagaacaagcccacacaaggagaaacagcacggagcaacacataagaaagcaccggcggcgggagcacaacacaacaacagacaggaggagcacaaacaagcagcagagcgcctaggccggcgaagacagccgcccgccaagtggtagacgccataaccagcgagccgcgagccgcaataagacagcgagcgagaacagaatcgctggcgcactagaagacagcaagagcgcgcggagacagacgaccaataaccaagcagaccagcggaacaaaacgaaagctgagacaaaaagagcacgcggcgacaagaaggagaacgaaatggcgagcgcgcgcgacgtaacagcggcaagagacacaaccgagcacggacagcacaaagagaccaccgacaagaaagcaacagggccgt

SEQ ID NO: 301744 - DNA, 868 bp, Homo sapiens
  misc_feature (3)..(3): n is a, c, g, or t
  misc_feature (6)..(7): n is a, c, g, or t
ggnagnngccccagccagctgtcccgagtctggactttccctctgcccctccccactctcaggctggtggggtggggaaagcagcccattcctgggctcagagactcccaccccagctcagagggagcaggggcccagccagggacggaccctcattcctcccagggaccccagacctctgtctctctcgggccttggctccttgaacttttggccgccatgtgcttcccgaaggtcctctctgatgacatgaagaagctgaaggcccgaatgcaccaggccatagaaagattttatgataaaatgcaaaatgcagaatcaggacgtggacaggtgatgtcgagcctggcagagctggaggacgacttcaaagagggctacctggagacagtggcggcttattatgaggagcagcacccagagctcactcctctacttgaaaaagaaagagatggattacggtgccgaggcaacagatcccctgtcccggatgttgaggatcccgcaaccgaggagcctggggagagcttttgtgacaaggtcatgagatggttccaggccatgctgcagcggctgcagacctggtggcacggggttctggcctgggtgaaggagaaggtggtggccctggtccatgcagtgcaggccctctggaaacagttccagagtttctgctgctctctgtcagagctcttcatgtcctctttccagtcctacggagccccacggggggacaaggaggagctgacaccccagaagtgctctgaaccccaatcctcaaaatgaagatactgacaccacctttgccctccccgtcaccgcgcacccaccctgagactcccgtaccagggggattactagagggcct

SEQ ID NO: 301745 - DNA, 1066 bp, Homo sapiens
  misc_feature (3)..(3): n is a, c, g, or t
  misc_feature (6)..(7): n is a, c, g, or t
ggnagnngccccagccagctgtcccgagtctggactttccctctgcccctccccactctcaggctggtggggtggggaaagcagcccattcctgggctcagagactcccaccccagctcagagggagcaggggcccagccagggacggaccctcattcctcccagggaccccagacctctgtctctctcgggtaagtctccatctctgtctgtctctgtctctgtctctgtctctgtctgtttttcacgcactcagcaaggcctcctgccctgagagaggctccgcccactaccccccactttccccataaaaccagctgagtctttgtgccaggaagactgcgtgcagaaggtgagccttggctccttgaacttttggccgccatgtgcttcccgaaggtcctctctgatgacatgaagaagctgaaggcccgaatggtgatgtcgagcctggcagagctggaggacgacttcaaagagggctacctggagacagtggcggcttattatgaggagcagcacccagagctcactcctctacttgaaaaagaaagagatggattacggtgccgaggcaacagatcccctgtcccggatgttgaggatcccgcaaccgaggagcctggggagagcttttgtgacaaggtcatgagatggttccaggccatgctgcagcggctgcagacctggtggcacggggttctggcctgggtgaaggagaaggtggtggccctggtccatgcagtgcaggccctctggaaacagttccagagtttctgctgctctctgtcagagctcttcatgtcctctttccagtcctacggagccccacggggggacaaggaggagctgacaccccagaagtgctctgaaccccaatcctcaaaatgaagatactgacaccacctttgccctccccgtcaccgcgcacccaccctgacccctccctcagctgtcctgtgccccgccctctcccgcacactcagtccccctgcctggcgttcctgccgcagctctgacctggtgctgtcgccctggcatcttaataaaacctgcttatacttcc

SEQ ID NO: 301746 - DNA, 837 bp, Homo sapiens
  misc_feature (3)..(3): n is a, c, g, or t
  misc_feature (6)..(7): n is a, c, g, or t
ggnagnngccccagccagctgtcccgagtctggactttccctctgcccctccccactctcaggctggtggggtggggaaagcagcccattcctgggctcagagactcccaccccagctcagagggagcaggggcccagccagggacggaccctcattcctcccagggaccccagacctctgtctctctcgggccttggctccttgaacttttggccgccatgtgcttcccgaaggtcctctctgatgacatgaagaagctgaaggcccgaatgcaccaggccatagaaagattttatgataaaatgcaaaatgcagaatcaggacgtggacaggtgatgtcgagcctggcagagctggaggacgacttcaaagagggctacctggagacagtggcggcttattatgaggagcagcacccagagctcactcctctacttgaaaaagaaagagatggattacggtgccgaggcaacagatcccctgtcccggatgttgaggatcccgcaaccgaggagcctggggagagcttttgtgacaaggtcatgagatggttccaggccatgctgcagcggctgcagacctggtggcacggggttctggcctgggtgaaggagaaggtggtggccctggtccatgcagtgcaggccctctggaaacagttccagagtttctgctgctctctgtcagagctcttcatgtcctctttccagtcctacggagccccacggggggacaaggaggagctgacaccccagaagtgctctgaaccccaatcctcaaaatgaagatactgacaccacctcgtgccaccaggtctgcagccgctgcagtcgacg

SEQ ID NO: 301747 - DNA, 1150 bp, Homo sapiens
  misc_feature (3)..(3): n is a, c, g, or t
  misc_feature (6)..(7): n is a, c, g, or t
ggnagnngccccagccagctgtcccgagtctggactttccctctgcccctccccactctcaggctggtggggtggggaaagcagcccattcctgggctcagagactcccaccccagctcagagggagcaggggcccagccagggacggaccctcattcctcccagggaccccagacctctgtctctctcgggccttggctccttgaacttttggccgccatgtgcttcccgaaggtcctctctgatgacatgaagaagctgaaggcccgaatgcaccaggccatagaaagattttatgataaaatgcaaaatgcagaatcaggacgtggacaggtgatgtcgagcctggcagagctggaggacgacttcaaagagggctacctggagacagtggcggcttattatgaggagcagcacccagagctcactcctctacttgaaaaagaaagagatggattacggtgccgaggcaacagatcccctgtcccggatgttgaggatcccgcaaccgaggagcctggggagagcttttgtgacaaggtcatgagatggttccaggccatgctgcagcggctgcagacctggtggcacggggttctggcctgggtgaaggagaaggtggtggccctggtccatgcagtgcaggccctctggaaacagttccagagtttctgctgctctctgtcagagctcttcatgtcctctttccagtcctacggagccccacggggggacaaggaggagctgacaccccagaagtgctctgaaccccaatcctcaaaatgaagatactgacaccaccttcacgcggttccaccggggcacccctccactgaagcaccttcccacatcatgctggagcctgtgccccgatccatccttcaacgaccaacaccaacaagcctgcactgagagaaaaggccgcaacacgagcaggagcggaagacgcctggagaagagaccgtgtaaacaaccaaaagcaaaaacgcagaaagaggacaaagaaaataaggaaagagacgatgaggaaaggcaaaacgaacaccccaaatcgaacgaaaggagaagccggccaaaataaaggaggaagaacacacggacgagaaaagaagaagacaagaggaaaaagaagaaggagggagacgacaga

SEQ ID NO: 301748 - DNA, 757 bp, Homo sapiens
  misc_feature (3)..(3): n is a, c, g, or t
  misc_feature (6)..(7): n is a, c, g, or t
ggnagnngccccagccagctgtcccgagtctggactttccctctgcccctccccactctcaggctggtggggtggggaaagcagcccattcctgggctcagagactcccaccccagctcagagggagcaggggcccagccagggacggaccctcattcctcccagggaccccagacctctgtctctctcgggccttggctccttgaacttttggccgccatgtgcttcccgaaggtcctctctgatgacatgaagaagctgaaggcccgaatgcaccaggccatagaaagattttatgataaaatgcaaaatgcagaatcaggacgtggacaggtgatgtcgagcctggcagagctggaggacgacttcaaagagggctacctggagacagtggcggcttattatgaggagcagcacccagagctcactcctctacttgaaaaagaaagagatggattacggtgccgaggcaacagatcccctgtcccggatgttgaggatcccgcaaccgaggagcctggggagagcttttgtgacaaggtcatgagatggttccaggccatgctgcagcggctgcagacctggtggcacggggttctggcctgggtgaaggagaaggtggtggccctggtccatgcagtgcaggccctctggaaacagttccagagtttctgctgctctctgtcagagctcttcatgtcctctttccatctgggccccgtccagtctctgggccccgtccagtctctgggccccg

SEQ ID NO: 301749 - DNA, 1370 bp, Homo sapiens
  misc_feature (3)..(3): n is a, c, g, or t
  misc_feature (6)..(7): n is a, c, g, or t
ggnagnngccccagccagctgtcccgagtctggactttccctctgcccctccccactctcaggctggtggggtggggaaagcagcccattcctgggctcagagactcccaccccagctcagagggagcaggggcccagccagggacggaccctcattcctcccagggaccccagacctctgtctctctcgggccttggctccttgaacttttggccgccatgtgcttcccgaaggtcctctctgatgacatgaagaagctgaaggcccgaatgcaccaggccatagaaagattttatgataaaatgcaaaatgcagaatcaggacgtggacaggtgatgtcgagcctggcagagctggaggacgacttcaaagagggctacctggagacagtggcggcttattatgaggagcagcacccagagctcactcctctacttgaaaaagaaagagatggattacggtgccgaggcaacagatcccctgtcccggatgttgaggatcccgcaaccgaggagcctggggagagcttttgtgacaaggtcctacggagccccacggggggacaaggaggagctgacaccccagaagtgctctgaaccccaatcctcaaaatgaagatactgacaccacctttgccctccccgtcaccgcgcacccaccctgacccctccctcagctgtcctgtgccccgccctctcccgcacactcagtccccctgcctggcgttcctgccgcagctctgacctggtgctgtcgccctggcatcttaataaaacctgcttatacttccctggcaggggagataccatgacgtgaaaaaacaaaaaaaaactgaaacatgatctcctttaacaaagggtcgagactgaagtcctaatcatcctgtggtgtggagagggatcaatctcgaaaaagcggaaacgcgcagcatgtgtacaatcaagacactcggggggggggggcgggacccaatgccccctttatgaaggggcccttaaatatagatgagccccgttttaaaaaacatgagcacggaaaaaccgcggctgccccaaatataatggtgtggaaaaaaaccctgtttgggcgtggggggaataatgaagagaccccgccaattcgcccttccacacaaatgtcacaggcccatggacaatacaacatattgtcgtgcttatatttttgaaaaaaccgggatatagctgatacacaggcgcattattaacccaaaggggccacttggcaatacactctataaaaaacaaaacaacccgacaggggggaagtgtggcccaacatgagacaaaattcctctattgaagcccgctccccccgggaagggggaaaaggcctctttagggctgggccc

SEQ ID NO: 301750 - DNA, 1563 bp, Homo sapiens
  misc_feature (3)..(3): n is a, c, g, or t
  misc_feature (6)..(7): n is a, c, g, or t
ggnagnngccccagccagctgtcccgagtctggactttccctctgcccctccccactctcaggctggtggggtggggaaagcagcccattcctgggctcagagactcccaccccagctcagagggagcaggggcccagccagggacggaccctcattcctcccagggaccccagacctctgtctctctcgggtaagtctccatctctgtctgtctctgtctctgtctctgtctctgtctgtttttcacgcactcagcaaggcctcctgccctgagagaggctccgcccactaccccccactttccccataaaaccagctgagtctttgtgccaggaagactgcgtgcagaaggtgactgtctcagtggagctgggtcatctcaggccttggctccttgaacttttggccgccatgtgcttcccgaaggtcctctctgatgacatgaagaagctgaaggcccgaatgcaccaggccatagaaagattttatgataaaatgcaaaatgcagaatcaggacgtggacaggtgatgtcgagcctggcagagctggaggacgacttcaaagagggctacctggagacagtggcggcttattatgaggagcagcacccagagctcactcctctacttgaaaaagaaagagatggattacggtgccgaggcaacagatcccctgtcccggatgttgaggatcccgcaaccgaggagcctggggagagcttttgtgacaaggtcctacggagccccacggggggacaaggaggagctgacaccccagaagtgctctgaaccccaatcctcaaaatgaagatactgacaccacctttgccctccccgtcaccgcgcacccaccctgacccctccctcagctgtcctgtgccccgccctctcccgcacactcagtccccctgcctggcgttcctgccgcagctctgacctggtgctgtcgccctggcatcttaataaaacctgcttatacttccctggcaggggagataccatgacgtgaaaaaacaaaaaaaaactgaaacatgatctcctttaacaaagggtcgagactgaagtcctaatcatcctgtggtgtggagagggatcaatctcgaaaaagcggaaacgcgcagcatgtgtacaatcaagacactcggggggggggggcgggacccaatgccccctttatgaaggggcccttaaatatagatgagccccgttttaaaaaacatgagcacggaaaaaccgcggctgccccaaatataatggtgtggaaaaaaaccctgtttgggcgtggggggaataatgaagagaccccgccaattcgcccttccacacaaatgtcacaggcccatggacaatacaacatattgtcgtgcttatatttttgaaaaaaccgggatatagctgatacacaggcgcattattaacccaaaggggccacttggcaatacactctataaaaaacaaaacaacccgacaggggggaagtgtggcccaacatgagacaaaattcctctattgaagcccgctccccccgggaagggggaaaaggcctctttagggctgggccc

SEQ ID NO: 301751 - DNA, 684 bp, Homo sapiens
  misc_feature (3)..(3): n is a, c, g, or t
  misc_feature (6)..(7): n is a, c, g, or t
ggnagnngccccagccagctgtcccgagtctggactttccctctgcccctccccactctcaggctggtggggtggggaaagcagcccattcctgggctcagagactcccaccccagctcagagggagcaggggcccagccagggacggaccctcattcctcccagggaccccagacctctgtctctctcgggccttggctccttgaacttttggccgccatgtgcttcccgaaggtcctctctgatgacatgaagaagctgaaggcccgaatgcaccaggccatagaaagattttatgataaaatgcaaaatgcagaatcaggacgtggacaggtgatgtcgagcctggcagagctggaggacgacttcaaagagggctacctggagacagtggcggcttattatgaggagcagcacccagagctcactcctctacttgaaaaagaaagagatggattacggtgccgaggcaacagatcccctgtcccggatgttgaggatcccgcaaccgaggagcctggggagagcttttgtgacaaggtcatgagatggttccaggccatgctgcagcggctgcagacctggtggcacgggcctgtaatcccagatactcaggaggctgaggcaggagaatcacttgaacctgggaggcagaggttgcagtgagctgagatcacgccattg

SEQ ID NO: 301752 - DNA, 809 bp, Homo sapiens
  misc_feature (3)..(3): n is a, c, g, or t
  misc_feature (6)..(7): n is a, c, g, or t
ggnagnngccccagccagctgtcccgagtctggactttccctctgcccctccccactctcaggctggtggggtggggaaagcagcccattcctgggctcagagactcccaccccagctcagagggagcaggggcccagccagggacggaccctcattcctcccagggaccccagacctctgtctctctcgggccttggctccttgaacttttggccgccatgtgcttcccgaaggtcctctctgatgacatgaagaagctgaaggcccgaatgcaccaggccatagaaagattttatgataaaatgcaaaatgcagaatcaggacgtggacaggtgatgtcgagcctggcagagctggaggacgacttcaaagagggctacctggagacagtggcggcttattatgaggagcagcacccagagctcactcctctacttgaaaaagaaagagatggattacggtgccgaggcaacagatcccctgtcccggatgttgaggatcccgcaaccgaggagcctggggagagcttttgtgacaaggtcatgagatggttccaggtcctacggagccccacggggggacaaggaggagctgacaccccagaagtgctctgaaccccaatcctcaaaatgaagatactgacaccacctttgccctccccgtcaccgcgcacccaccctgacccctccctcagctgtcctgtgccccgccctctcccgcacactcagtccccctgcctggcgttcctgccgcagctctgacctggtgctgtcgccctggcatcttaataaaacctgcttatacttcc

SEQ ID NO: 301753 - DNA, 1216 bp, Homo sapiens
ggaggcatccaagccccagggctccttgaggaaacaacaggggtgccagacgtggcccgggcccctggctgggcccagttcggggtgtgtgggagctgaggactcactgggcttgaggactgactgatgtggggtgcagaggaggcttgggcctggaaccgagtgctttgttcctaacagtgatgtcgagcctggcagagctggaggacgacttcaaagagggctacctggagacagtggcggcttattatgaggagcagcacccagagctcactcctctacttgaaaaagaaagagatggattacggtgccgaggcaacagatcccctgtcccggatgttgaggatcccgcaaccgaggagcctggggagagcttttgtgacaaggtcctacggagccccacggggggacaaggaggagctgacaccccagaagtgctctgaaccccaatcctcaaaatgaagatactgacaccacctttgccctccccgtcaccgcgcacccaccctgacccctccctcagctgtcctgtgccccgccctctcccgcacactcagtccccctgcctggcgttcctgccgcagctctgacctggtgctgtcgccctggcatcttaataaaacctgcttatacttccctggcaggggagataccatgacgtgaaaaaacaaaaaaaaactgaaacatgatctcctttaacaaagggtcgagactgaagtcctaatcatcctgtggtgtggagagggatcaatctcgaaaaagcggaaacgcgcagcatgtgtacaatcaagacactcggggggggggggcgggacccaatgccccctttatgaaggggcccttaaatatagatgagccccgttttaaaaaacatgagcacggaaaaaccgcggctgccccaaatataatggtgtggaaaaaaaccctgtttgggcgtggggggaataatgaagagaccccgccaattcgcccttccacacaaatgtcacaggcccatggacaatacaacatattgtcgtgcttatatttttgaaaaaaccgggatatagctgatacacaggcgcattattaacccaaaggggccacttggcaatacactctataaaaaacaaaacaacccgacaggggggaagtgtggcccaacatgagacaaaattcctctattgaagcccgctccccccgggaagggggaaaaggcctctttagggctgggccc

SEQ ID NO: 301754 - DNA, 1078 bp, Homo sapiens
  misc_feature (3)..(3): n is a, c, g, or t
  misc_feature (6)..(7): n is a, c, g, or t
ggnagnngccccagccagctgtcccgagtctggactttccctctgcccctccccactctcaggctggtggggtggggaaagcagcccattcctgggctcagagactcccaccccagctcagagggagcaggggcccagccagggacggaccctcattcctcccagggaccccagacctctgtctctctcgggtaagtctccatctctgtctgtctctgtctctgtctctgtctctgtctgtttttcacgcactcagcaaggcctcctgccctgagagaggctccgcccactaccccccactttccccataaaaccagctgagtctttgtgccaggaagactgcgtgcagaaggtgactgtctcagtggagctgggtcatctcaggccttggctccttgaacttttggccgccatgtgcttcccgaaggtcctctctgatgacatgaagaagctgaaggcccgaatggtgatgtcgagcctggcagagctggaggacgacttcaaagagggctacctggagacagtggcggcttattatgaggagcagcacccagagctcactcctctacttgaaaaagaaagagatggattacggtgccgaggcaacagatcccctgtcccggatgttgaggatcccgcaaccgaggagcctggggagagcttttgtgacaaggtcatgagatggttccaggccatgctgcagcggctgcagacctggtggcacggggttctggcctgggtgaaggagaaggtggtggcaataatacccaaaatctgattggtcatatttttccaaagagtaatgcagtctgaagtattaaatgtattttcgtgtcttccttataagggggattctccaagttgtaaatttaaacgagtaaatatcacatttgtcattaacacagtatacttgcagtgtcctcagatttatttgggactattttgatgccaaggtgatatagagacttgactgaacattatttcttctattagaattggaaatggtgtattttcctaatgaggggagtaccttttaaatgaaggtacctttactttgagggaatgcggtactcattga

SEQ ID NO: 301755 - DNA, 453 bp, Homo sapiens
agaaaaaccttacatgaaaatacaaagagccagaatagtcaagacactctcaaagaagaaaaataagttttaaaatcagcttgtcaattccaacaacaatgatgcacttgatagtttgggaatttattatagctatcaatcagttttgggaaaattgacgtctttacaatattgagttttctgattcatgaacatggtttacctctctttccatttgggtcttctttaaggtttaccaataggattttatatttttgtccattgtggtcttgcttatcttaagtttgatttgtaaatattttatgtttcttttagtctattgtaaattgtgtatttttaatttcatttttttttttgttaatagcatataaaacacaccttgtcttttaactggagcattttgtccattgtgtatttaatgtaattaaatctaccatcttattttatgctaca
